United States Patent Application Publication US 2011/0183924 A1 - sequence listing, part 193

SEQ ID NO: 459456 - DNA, 7796 bp, Homo sapiens
  misc_feature (1472)..(1472): n is a, c, g, or t
tgggaacggcccaccgcagggttggccaccttgagaagctgcgaagatggcggagtaaggcgtgccgctgcaaactggcctctgggccgggggcgagcagcccccgggaggccgagtgcatctgttggaccgtgcgaggagaagaaaaaaaatatcggccagaggagaggaactaaccgaacattcttcctccctaccttatagaggggagtggtcatctacactaaagcaaagtgttaggcgcgtccgtgcgaagagaccaccaaacaggctttgtgttccttatcacaggaagaaaattttccttgacctttaggtgcttttatattcatctcaaaaacaaaattctgaactcaggacttggcaagtgtctctatgttgtctcctagagtgggtagtcctgcttcttttacccagttactttccctgtttttgaaatgtggctatcacttctctacacattacctccatgatttggaatggaaaaggccacttttctttttgttctgcctctcaaattcaacacagaggagctcctaggattccagttatcctgctaacatctccaggaagaaagaagcaactcacatgggtcttttgctgtttgcttaattataaagacatcattttgcaagcagaaggctgagtttcatttgaaacaggtgcttaggtggtggtatttgtgaatacttttcattccaagcaagaagactaaagaagtagcaagtatgaatgacttcagggtttaaaaaaaatgtcttccagtttcagccactaccatgataagcacagttgagactgcagcagtaaattccaaatatgtgtttctaatttgacgtgaaagatactaaaaatttatatttgtatatttaaatcctggctcatcctgtgacatagatttactgaataggaacaaaggcccaattttaaacaaaaacctaggccgggtgtggtggctcacacctgtaatcccaacactttgggaggccaaggcaggcaaatcacctgaggttgggagtttgagaccagcctgaccaacatggagaaaccccatctctactaaaaatagaaaattagccaggtgtggtggtagatacgtgtaatctcagctactcgtgaggctgaggcaggagaattgcttgaatccgggaggcggaggttgcagtgaactgagattgcaccactgcactccagcctgggcgacagagtgagactccgtctcagaaaaataaaaaacaactttggacatagaggagttgggggcagaggggggaggatgagagaattttccatgtaactccttttccttaagaaaaagaagcaaaaatccctcatgcagtgccatctgactttatggtgtttcacattatatagttactttttttaataaacgcataagattaactcttcctgcaacccaaggtggatacttggatgtttgatttttatttatttatttatttattttttgnggcagtctctctctgttgcccaggctggagtgatgcgtgatttctgctcactgcagtctctcccacccgggttcaagcgattctcctgcctcagcctcccaagtagctaggattacaggcgcgcaccaccacgctcagcctgatttctaggctgaaaaggctgggactcaggtactttccccagttgggactgaactttctcatcagagaatgggcctcagaagcaatgttcccaaacttgtggttgggtcatcgtggaaaagaaacctcaaataagaaaaataattacaataagaaatggattttcttttttcccacaacagttatacattataaagaacagactgtcgtagaaaactgtctttgcttccaaatcagcagaggaccattgtatgtattgtcaggtctttatataagagtgaaacctttatttatgcttcttgtgagtagagaataaattttaaaactaattagatgaaattaagaacagagtattggaacatctctgtgttttccggaatgtttactcaggtccatgaatgctgtgatgctgggaacttagggaagattcaccaaaatttgagagtgataaaaatggcctaaaatgggaaatggtgagcactcttattattagtgagattggtcaatcagcccatttgaaatgggtaaaaaatactttcagtaaaataattacatattatatataaaatatttctttttttgagggcagctactgagtgataaaagcatagtagaaatcactttggttaaaagtaactcaaatttttctcttaagtaatctaccaacttcctgatgtttttctttaatattttggaactgttcaagacagaatggagcctacatatatggtgttccactagtatgttgaaaatgtcatatcatggagaatggagacaccttccaggtgtctgttaaacccatcttctctgtgtacttctggcatcttttttggtaggatcatttggcagggggtagagtacctgtacttttggcaccattgaaaccagctctggcccacttgtttgaatagctatcagactcagcgtctctatatgctttatatacagttgagagaaccagtgtttaatgctcttgaaattgtatcttccatgcttcagaccagatgcatttaacaaaatggatatattccagctgtagttgcccagtgtttacttaacacatctacatttttttcttgtctattttggtccccttgataggaaaagctataattttaggcaggactatacgtcgatttgtagccatgcttccttcctttcccttgctcatccatgttagctggcagtttttcttttgaaaagttaaaaccgggatatgtgcaatagaaatatatatatatatatgtatattttaatacttgtggacaaatgttacaagttgtttaagaacaacaaaatcaccaatgtcttccattttgagatgtgtatagttttgtaagcattagtgcttggtagcatattgtagtgccatgttaggggttagtgcatgagtctagtgattttaaacttcaggatgaattattgataataacaaatagtgtaaaaagagtggaaaatctaaaccttttctttttccataatgtctaaatctgttatattcttcctggggaaaagagattaaggcccaaaagactcatttatgaatagaaatgtggggtcaaaatctgagatactatatttgaggacatttcagctttccataaggtatctggaaaccagctgtctttgtgtcttatgaaacctcaagtcaaaatgagaccgcatttaattattctgctttgctctttttttggggtgggggggagatagagtttcactctgtcacccaggctggagtgcagtggcacaatctttgctcactgtaacctctgcctcttgggttcaagtgattctcgtgccccagcctcccgagtagctgggactacaggcacgtgccaccacgcccagctaatttttatatttttagtagagacggggtttgctgtgttggccaggctggtctcaaactcctgacctcaagtaatccacctggcctgctcttttcatgtcttaacatggcatgtcttttagtttcattattttcctactccttgtatgtcaagaaattacattttgcatgtcttatggagatgctgttaattgcttcagtgagtgcttttctaatctgcagaccatttacatttcctgtttgcagcatgctgtgtgcaaacactcagtaatttggagtattcaattatttgttagggctcttcctatttccaaatgtgctgaattgtctattgatgggattttcagatcttttcatgagaactggaaatgtagctgggtggcacctacctaggttgctacgtagtgagtagactttctcttgggtatagtaagcctcagacagctttcacttttatctactttacttgtggaaataaaacagtcattttgttctgaaagaataagatagctttctgtagagaaggaattcctacctctaaaagctgccttgagaactcagaactggcagttttctgaggtgatttttaaatttcagtattagggagagtccagcatttgctgacacagattctacataactaatgtatgatagcaaatgcaaaactattataatgtggtgtatcttgcgcatacacaggttagaacaagtagactctggcagcagatctccagagacccaagtttaggttctcatagtgtatttgaagtagttatactcctggcttaagtagtttagtgcctgggagaatccattactgaaaagcatttaacttaaaaaaaaaaaaaatgaaaaggtagtgaatacagaatagcacaatatataggaaaggatatttcctgttgaaaaaaaaagccataaaattaatagtaattttcaagaggtagaattttagtagcaataagtttgtgcatgtatagtaatttgcattagcaaggttgtacaatagaataagtgatactactggagtttgtggggctctgcaaccaagagttgcacaagggccaggtgcggtggcttacacctataatcccagcactttgggaggccaaggtgggcggatcacaaggtcaagagatcaggaccatcctggccaacatggtgaaatgccatctctactaaaaatacaaaacttagctgggcatggtggcacatgcctgtaatcccagctactcaggaggctgaggcagtagaatcacttaaacctgagaggcggaggttgcagtgagctgagatcacaccactgtactccagcctggtgacagtaagactccacctcaaacaaacaaaaaatgcacaaaaggaaaaaatgttctggataaagagcatatgaaaggtactttcttttagaacagtatgaatgtatatgaatttatctttatgtgagaaataatcttttttgtaagttaaaggttaaagaccctgcttgtttcctaaatcagagggttagagctgttgaaattaaacctttatagtgcttaacctggaaacaaatgtactacagccccactgaagccgctctatgggttttttgcttacgatgttttagcaacaggcatttattttgtagaatggtatactttctgctttgtctcctcatctttctccactggtttcctgggtacattttttttaaagggagagaagtttgtgagtttaatgttttaaaaaaactcccaagaacatggataagccggatttctctcatgcttatgattagggagttaggatttaaagatgcaaagcagaaggactgaaaggaatagccagtgaatatgtttcagtgggtgaggtgtgaaaccttgtctaatatagatgtgtcctatggcctgtgactgcttattctttatcaatgagaactcagcaaactagtttctttcttgatctgaggaaccacacagctcacatcagaatataatagtggaactagggtgacttcactccctttcacctgatgtctatcttggccttttagcaccttgactatccctgaaaagactgggtctttgttttcccagggaaaaaacgaagtgatgtagatctaagaaatagtgcctctttaatatttaattcttacatgacaactaacacacagggaaaaggctatgttaagttgattatagctcctcttaaaatgtcctatgctgtcagttggtcttagagacatgggaataaccaagcaatattcagacatctgcactatctggggacagcgctacatagtacaatgatgtcagcagttcagttacttggaacaattaaagattacccttaacagccatgttaatacatctaaatgctaaaatatactacgagtttttcatagtcttgaaagtatacagttaattacttttcaaagttactgtggtctcatgtttactcttcttgtatctgtgatatgcaaaaagatgaagactcttggcctccaggagtttacattctcatggtgctgttggttcaagcagattgctttagtttattaatgaacattgcttggctattaattatatcctatttggaaggatcccttggtgaacagttttaaaaagcagagggctgtgctaaatttcagggtattgatagcttgagtttacattgtattagccctgctcgttatcatttttttccccagggagctatgcaggtaatgctcattagcatgaatcagaaaagaaaccattctgcctaagagcatcttaaccatccccctaaaccacctatgctctcctgttatagttgtcagtaaatcacgaagaaaattaacagctccttaagactctacatccctcaattctctttcttttcccagagtttgtacatcattctctactcagatggaccaggatttgcatataagccttttaaaactgactagtggtcctaattttaacatttttgtgtatgactcctatcccttttctgaagcagcattgtgatagatgtggagcttctacctgcatttctaagcaattattaacccaacttttgagttgaaacttgcatggatccttgttatgtcccgtaattcctctgaatcaaggaatttattttgcatgcttattaaactcaaactgggtctgattgaaagtgcaagcaatagtgacaggaccttaactctggttttagagtacgaacattctaatgcatgactcaaaatgtccagtgttgtggttactagttattttatatatgcatttgttaataatgaagcaatagagactaagaccaatagcttgaatatattcagattattttcatgttttaataaaggatttttcttacttccattgaaaatgggaagtagaagataaacaggggcaaccacaagacattcaaactgtcaggactagggcgtagcagtgcccaccctctaaccacttgcctggttccattagtccccaagcatgtttgaaaacaaaagacacaaactaagcatgctgaataaaactagctgctatggctgtaataatcagaaaggtgcagagtttcagaaagagtaggaaagtagggaatgccagtatggagtatgtaaaataactagatatggatatggggtttgtttatgatatgctttatgtagacaaagtttgaggtcttttaaaactgggatttgagttgaaaagagtcaggatgcacatatttccactatttcaggattttcagatgactaggcacatgttgtggatgatactggtaccaactaccaatgaccaactataaagtacccctgcaataagggagacttcctttttgtagaatagtcctgaaaatactgacagatctgtggttagtttgttattttattgcataaaaaacagtttaaacaaattttatagccaaagttttatccttgatgggtttggccagactgcaatttcttgactaaagcttttaatgccaggttaaacaggagaaactttttccactagaagaaaatccttgctatctattttttccaatagaagaaaatccttgctatttattttatttgatgaataaacaaatttattgcagtagcttaaaaaaattttttttttaaacagtctcactctgtcgcccaggctggagtgaagcaatgtgatctcagctcactgcaacctccacctccctcccagctactcgggaggctgaggcagaagaatcgcttgaaccgggaggccgaggttgcaatgagctgagatagcaccactgcactccagcctgggtgacagagcaagactcagtcttaaaaaaaaaaaaaaaaaaagaaaaagaaatattccataatacaaaat

SEQ ID NO: 459457 - DNA, 5560 bp, Homo sapiens
  misc_feature (50)..(50): n is a, c, g, or t
cgccaaatgtgaaacaccataaagtcagatggcactgcatgagggatttntgcttctttttcttaaggaaaaggagttacatggaaaattctctcatcctcccccctctgcccccaactcctctatgtccaaagttgttttttatttttctgagacggagtctcactctgtcgcccaggcgggagtgcagtggtgcaatctcagttcactgcaacctccgcctcccggattcaagcaattactcctgacctcaagtaatccacctggcctgctcttttcatgtcttaacatggcatgtcttttagtttcattattttcctactccttgtatgtcaagaaattacattttgcatgtcttatggagatgctgttaattgcttcagtgagtgcttttctaatctgcagaccatttacatttcctgtttgcagcatgctgtgtgcaaacactcagtaatttggagtattcaattatttgttagggctcttcctatttccaaatgtgctgaattgtctattgatgggattttcagatcttttcatgagaactggaaatgtagctgggtggcacctacctaggttgctacgtagtgagtagactttctcttgggtatagtaagcctcagacagctttcacttttatctactttacttgtggaaataaaacagtcattttgttctgaaagaataagatagctttctgtagagaaggaattcctacctctaaaagctgccttgagaactcagaactggcagttttctgaggtgatttttaaatttcagtattagggagagtccagcatttgctgacacagattctacataactaatgtatgatagcaaatgcaaaactattataatgtggtgtatcttgcgcatacacaggttagaacaagtagactctggcagcagatctccagagacccaagtttaggttctcatagtgtatttgaagtagttatactcctggcttaagtagtttagtgcctgggagaatccattactgaaaagcatttaacttaaaaaaaaaaaaaatgaaaaggtagtgaatacagaatagcacaatatataggaaaggatatttcctgttgaaaaaaaaagccataaaattaatagtaattttcaagaggtagaattttagtagcaataagtttgtgcatgtatagtaatttgcattagcaaggttgtacaatagaataagtgatactactggagtttgtggggctctgcaaccaagagttgcacaagggccaggtgcggtggcttacacctataatcccagcactttgggaggccaaggtgggcggatcacaaggtcaagagatcaggaccatcctggccaacatggtgaaatgccatctctactaaaaatacaaaacttagctgggcatggtggcacatgcctgtaatcccagctactcaggaggctgaggcagtagaatcacttaaacctgagaggcggaggttgcagtgagctgagatcacaccactgtactccagcctggtgacagtaagactccacctcaaacaaacaaaaaatgcacaaaaggaaaaaatgttctggataaagagcatatgaaaggtactttcttttagaacagtatgaatgtatatgaatttatctttatgtgagaaataatcttttttgtaagttaaaggttaaagaccctgcttgtttcctaaatcagagggttagagctgttgaaattaaacctttatagtgcttaacctggaaacaaatgtactacagccccactgaagccgctctatgggttttttgcttacgatgttttagcaacaggcatttattttgtagaatggtatactttctgctttgtctcctcatctttctccactggtttcctgggtacattttttttaaagggagagaagtttgtgagtttaatgttttaaaaaaactcccaagaacatggataagccggatttctctcatgcttatgattagggagttaggatttaaagatgcaaagcagaaggactgaaaggaatagccagtgaatatgtttcagtgggtgaggtgtgaaaccttgtctaatatagatgtgtcctatggcctgtgactgcttattctttatcaatgagaactcagcaaactagtttctttcttgatctgaggaaccacacagctcacatcagaatataatagtggaactagggtgacttcactccctttcacctgatgtctatcttggccttttagcaccttgactatccctgaaaagactgggtctttgttttcccagggaaaaaacgaagtgatgtagatctaagaaatagtgcctctttaatatttaattcttacatgacaactaacacacagggaaaaggctatgttaagttgattatagctcctcttaaaatgtcctatgctgtcagttggtcttagagacatgggaataaccaagcaatattcagacatctgcactatctggggacagcgctacatagtacaatgatgtcagcagttcagttacttggaacaattaaagattacccttaacagccatgttaatacatctaaatgctaaaatatactacgagtttttcatagtcttgaaagtatacagttaattacttttcaaagttactgtggtctcatgtttactcttcttgtatctgtgatatgcaaaaagatgaagactcttggcctccaggagtttacattctcatggtgctgttggttcaagcagattgctttagtttattaatgaacattgcttggctattaattatatcctatttggaaggatcccttggtgaacagttttaaaaagcagagggctgtgctaaatttcagggtattgatagcttgagtttacattgtattagccctgctcgttatcatttttttccccagggagctatgcaggtaatgctcattagcatgaatcagaaaagaaaccattctgcctaagagcatcttaaccatccccctaaaccacctatgctctcctgttatagttgtcagtaaatcacgaagaaaattaacagctccttaagactctacatccctcaattctctttcttttcccagagtttgtacatcattctctactcagatggaccaggatttgcatataagccttttaaaactgactagtggtcctaattttaacatttttgtgtatgactcctatcccttttctgaagcagcattgtgatagatgtggagcttctacctgcatttctaagcaattattaacccaacttttgagttgaaacttgcatggatccttgttatgtcccgtaattcctctgaatcaaggaatttattttgcatgcttattaaactcaaactgggtctgattgaaagtgcaagcaatagtgacaggaccttaactctggttttagagtacgaacattctaatgcatgactcaaaatgtccagtgttgtggttactagttattttatatatgcatttgttaataatgaagcaatagagactaagaccaatagcttgaatatattcagattattttcatgttttaataaaggatttttcttacttccattgaaaatgggaagtagaagataaacaggggcaaccacaagacattcaaactgtcaggactagggcgtagcagtgcccaccctctaaccacttgcctggttccattagtccccaagcatgtttgaaaacaaaagacacaaactaagcatgctgaataaaactagctgctatggctgtaataatcagaaaggtgcagagtttcagaaagagtaggaaagtagggaatgccagtatggagtatgtaaaataactagatatggatatggggtttgtttatgatatgctttatgtagacaaagtttgaggtcttttaaaactgggatttgagttgaaaagagtcaggatgcacatatttccactatttcaggattttcagatgactaggcacatgttgtggatgatactggtaccaactaccaatgaccaactataaagtacccctgcaataagggagacttcctttttgtagaatagtcctgaaaatactgacagatctgtggttagtttgttattttattgcataaaaaacagtttaaacaaattttatagccaaagttttatccttgatgggtttggccagactgcaatttcttgactaaagcttttaatgccaggttaaacaggagaaactttttccactagaagaaaatccttgctatctattttttccaatagaagaaaatccttgctatttattttatttgatgaataaacaaatttattgcagtagcttaaaaaaattttttttttaaacagtctcactctgtcgcccaggctggagtgaagcaatgtgatctcagctcactgcaacctccacctcccgagtagctgggattacagacatgcaccaccaccctcagctaatttttgtatttttagtagagacggggtttcgccatgttggccaggctggtctttaactcctggccttacgtgatccgcccccccttagccttccaaagtgctgggattacaggtgtgagccactgcacctggcctgtagtagcttaaaattttccttgagaaaattcctgactttaaaaataacccttatataagtacaagtgattgtgacaaatgacgtaaaaatggcattcatgatgtctgaaacaagcctaaatagaattcaagattagactaaatgattttcacaaagcacattcaaggttttacattctatgattgaaaaaaattttttgaaaactttttatttcattctttcctgtaggattttgctacaaataactttgggaatgaataaagtggaatggtaactttccagtggttcagaattgaattagacttcttgtgactgtgatgtttggtttccattgaaatatatgaagtgagatgtcatatcctgaatatagtttgtcttccccaattacttgatagcatgtctgtcagccagtaaagattaagaacagagtttctctaaattcctccgattattccactaaggcacattaaaatacttaattttgggaaaccagacatcacagatttctccatgaagtcctaaatcttctttaaagtcagaataggtatcttagttactgacagtattcaggtttttttctcccttggtgatatgtcattccatcagtgaaaaaatattttctcccagggataagaaaggtattctggtaatacattatcatcaatccttaaacagtaacagtcttggcacttatcacaaaaccgacccatttcttataaccagaaagattatcttagactgtccttcacattatactttacctactgccttgtaagaataagagttgctcactgtgtttacttgctgtcctccatattctccattgcaccattggtgtataacgttaagagtttcattgaatattattttaagtattacaaaaggcagcttgcttcttaatctatgcatctttggggtttttgaagaaatttaattctttgatgtaaaaaggaactgttaaaaaagttggaagctctgcacctgtgtatatatatattttagcaataaagcagcatgggctgagaatgca

SEQ ID NO: 459458 - DNA, 7609 bp, Homo sapiens
  misc_feature (1472)..(1472): n is a, c, g, or t
tgggaacggcccaccgcagggttggccaccttgagaagctgcgaagatggcggagtaaggcgtgccgctgcaaactggcctctgggccgggggcgagcagcccccgggaggccgagtgcatctgttggaccgtgcgaggagaagaaaaaaaatatcggccagaggagaggaactaaccgaacattcttcctccctaccttatagaggggagtggtcatctacactaaagcaaagtgttaggcgcgtccgtgcgaagagaccaccaaacaggctttgtgttccttatcacaggaagaaaattttccttgacctttaggtgcttttatattcatctcaaaaacaaaattctgaactcaggacttggcaagtgtctctatgttgtctcctagagtgggtagtcctgcttcttttacccagttactttccctgtttttgaaatgtggctatcacttctctacacattacctccatgatttggaatggaaaaggccacttttctttttgttctgcctctcaaattcaacacagaggagctcctaggattccagttatcctgctaacatctccaggaagaaagaagcaactcacatgggtcttttgctgtttgcttaattataaagacatcattttgcaagcagaaggctgagtttcatttgaaacaggtgcttaggtggtggtatttgtgaatacttttcattccaagcaagaagactaaagaagtagcaagtatgaatgacttcagggtttaaaaaaaatgtcttccagtttcagccactaccatgataagcacagttgagactgcagcagtaaattccaaatatgtgtttctaatttgacgtgaaagatactaaaaatttatatttgtatatttaaatcctggctcatcctgtgacatagatttactgaataggaacaaaggcccaattttaaacaaaaacctaggccgggtgtggtggctcacacctgtaatcccaacactttgggaggccaaggcaggcaaatcacctgaggttgggagtttgagaccagcctgaccaacatggagaaaccccatctctactaaaaatagaaaattagccaggtgtggtggtagatacgtgtaatctcagctactcgtgaggctgaggcaggagaattgcttgaatccgggaggcggaggttgcagtgaactgagattgcaccactgcactccagcctgggcgacagagtgagactccgtctcagaaaaataaaaaacaactttggacatagaggagttgggggcagaggggggaggatgagagaattttccatgtaactccttttccttaagaaaaagaagcaaaaatccctcatgcagtgccatctgactttatggtgtttcacattatatagttactttttttaataaacgcataagattaactcttcctgcaacccaaggtggatacttggatgtttgatttttatttatttatttatttattttttgnggcagtctctctctgttgcccaggctggagtgatgcgtgatttctgctcactgcagtctctcccacccgggttcaagcgattctcctgcctcagcctcccaagtagctaggattacaggcgcgcaccaccacgctcagcctgatttctaggctgaaaaggctgggactcaggtactttccccagttgggactgaactttctcatcagagaatgggcctcagaagcaatgttcccaaacttgtggttgggtcatcgtggaaaagaaacctcaaataagaaaaataattacaataagaaatggattttcttttttcccacaacagttatacattataaagaacagactgtcgtagaaaactgtctttgcttccaaatcagcagaggaccattgtatgtattgtcaggtctttatataagagtgaaacctttatttatgcttcttgtgagtagagaataaattttaaaactaattagatgaaattaagaacagagtattggaacatctctgtgttttccggaatgtttactcaggtccatgaatgctgtgatgctgggaacttagggaagattcaccaaaatttgagagtgataaaaatggcctaaaatgggaaatggtgagcactcttattattagtgagattggtcaatcagcccatttgaaatgggtaaaaaatactttcagtaaaataattacatattatatataaaatatttctttttttgagggcagctactgagtgataaaagcatagtagaaatcactttggttaaaagtaactcaaatttttctcttaagtaatctaccaacttcctgatgtttttctttaatattttggaactgttcaagacagaatggagcctacatatatggtgttccactagtatgttgaaaatgtcatatcatggagaatggagacaccttccaggtgtctgttaaacccatcttctctgtgtacttctggcatcttttttggtaggatcatttggcagggggtagagtacctgtacttttggcaccattgaaaccagctctggcccacttgtttgaatagctatcagactcagcgtctctatatgctttatatacagttgagagaaccagtgtttaatgctcttgaaattgtatcttccatgcttcagaccagatgcatttaacaaaatggatatattccagctgtagttgcccagtgtttacttaacacatctacatttttttcttgtctattttggtccccttgataggaaaagctataattttaggcaggactatacgtcgatttgtagccatgcttccttcctttcccttgctcatccatgttagctggcagtttttcttttgaaaagttaaaaccgggatatgtgcaatagaaatatatatatatatatgtatattttaatacttgtggacaaatgttacaagttgtttaagaacaacaaaatcaccaatgtcttccattttgagatgtgtatagttttgtaagcattagtgcttggtagcatattgtagtgccatgttaggggttagtgcatgagtctagtgattttaaacttcaggatgaattattgataataacaaatagtgtaaaaagagtggaaaatctaaaccttttctttttccataatgtctaaatctgttatattcttcctggggaaaagagattaaggcccaaaagactcatttatgaatagaaatgtggggtcaaaatctgagatactatatttgaggacatttcagctttccataaggtatctggaaaccagctgtctttgtgtcttatgaaacctcaagtcaaaatgagaccgcatttaattattctgctttgctctttttttggggtgggggggagatagagtttcactctgtcacccaggctggagtgcagtggcacaatctttgctcactgtaacctctgcctcttgggttcaagtgattctcgtgccccagcctcccgagtagctgggactacaggcacgtgccaccacgcccagctaatttttatatttttagtagagacggggtttgctgtgttggccaggctggtctcaaactcctgacctcaagtaatccacctggcctgctcttttcatgtcttaacatggcatgtcttttagtttcattattttcctactccttgtatgtcaagaaattacattttgcatgtcttatggagatgctgttaattgcttcagtgagtgcttttctaatctgcagaccatttacatttcctgtttgcagcatgctgtgtgcaaacactcagtaatttggagtattcaattatttgttagggctcttcctatttccaaatgtgctgaattgtctattgatgggattttcagatcttttcatgagaactggaaatgtagctgggtggcacctacctaggttgctacgtagtgagtagactttctcttgggtatagtaagcctcagacagctttcacttttatctactttacttgtggaaataaaacagtcattttgttctgaaagaataagatagctttctgtagagaaggaattcctacctctaaaagctgccttgagaactcagaactggcagttttctgaggtgatttttaaatttcagtattagggagagtccagcatttgctgacacagattctacataactaatgtatgatagcaaatgcaaaactattataatgtggtgtatcttgcgcatacacaggttagaacaagtagactctggcagcagatctccagagacccaagtttaggttctcatagtgtatttgaagtagttatactcctggcttaagtagtttagtgcctgggagaatccattactgaaaagcatttaacttaaaaaaaaaaaaaatgaaaaggtagtgaatacagaatagcacaatatataggaaaggatatttcctgttgaaaaaaaaagccataaaattaatagtaattttcaagaggtagaattttagtagcaataagtttgtgcatgtatagtaatttgcattagcaaggttgtacaatagaataagtgatactactggagtttgtggggctctgcaaccaagagttgcacaagggccaggtgcggtggcttacacctataatcccagcactttgggaggccaaggtgggcggatcacaaggtcaagagatcaggaccatcctggccaacatggtgaaatgccatctctactaaaaatacaaaacttagctgggcatggtggcacatgcctgtaatcccagctactcaggaggctgaggcagtagaatcacttaaacctgagaggcggaggttgcagtgagctgagatcacaccactgtactccagcctggtgacagtaagactccacctcaaacaaacaaaaaatgcacaaaaggaaaaaatgttctggataaagagcatatgaaaggtactttcttttagaacagtatgaatgtatatgaatttatctttatgtgagaaataatcttttttgtaagttaaaggttaaagaccctgcttgtttcctaaatcagagggttagagctgttgaaattaaacctttatagtgcttaacctggaaacaaatgtactacagccccactgaagccgctctatgggttttttgcttacgatgttttagcaacaggcatttattttgtagaatggtatactttctgctttgtctcctcatctttctccactggtttcctgggtacattttttttaaagggagagaagtttgtgagtttaatgttttaaaaaaactcccaagaacatggataagccggatttctctcatgcttatgattagggagttaggatttaaagatgcaaagcagaaggactgaaaggaatagccagtgaatatgtttcagtgggtgaggtgtgaaaccttgtctaatatagatgtgtcctatggcctgtgactgcttattctttatcaatgagaactcagcaaactagtttctttcttgatctgaggaaccacacagctcacatcagaatataatagtggaactagggtgacttcactccctttcacctgatgtctatcttggccttttagcaccttgactatccctgaaaagactgggtctttgttttcccagggaaaaaacgaagtgatgtagatctaagaaatagtgcctctttaatatttaattcttacatgacaactaacacacagggaaaaggctatgttaagttgattatagctcctcttaaaatgtcctatgctgtcagttggtcttagagacatgggaataaccaagcaatattcagacatctgcactatctggggacagcgctacatagtacaatgatgtcagcagttcagttacttggaacaattaaagattacccttaacagccatgttaatacatctaaatgctaaaatatactacgagtttttcatagtcttgaaagtatacagttaattacttttcaaagttactgtggtctcatgtttactcttcttgtatctgtgatatgcaaaaagatgaagactcttggcctccaggagtttacattctcatggtgctgttggttcaagcagattgctttagtttattaatgaacattgcttggctattaattatatcctatttggaaggatcccttggtgaacagttttaaaaagcagagggctgtgctaaatttcagggtattgatagcttgagtttacattgtattagccctgctcgttatcatttttttccccagggagctatgcaggtaatgctcattagcatgaatcagaaaagaaaccattctgcctaagagcatcttaaccatccccctaaaccacctatgctctcctgttatagttgtcagtaaatcacgaagaaaattaacagctccttaagactctacatccctcaattctctttcttttcccagagtttgtacatcattctctactcagatggaccaggatttgcatataagccttttaaaactgactagtggtcctaattttaacatttttgtgtatgactcctatcccttttctgaagcagcattgtgatagatgtggagcttctacctgcatttctaagcaattattaacccaacttttgagttgaaacttgcatggatccttgttatgtcccgtaattcctctgaatcaaggaatttattttgcatgcttattaaactcaaactgggtctgattgaaagtgcaagcaatagtgacaggaccttaactctggttttagagtacgaacattctaatgcatgactcaaaatgtccagtgttgtggttactagttattttatatatgcatttgttaataatgaagcaatagagactaagaccaatagcttgaatatattcagattattttcatgttttaataaaggatttttcttacttccattgaaaatgggaagtagaagataaacaggggcaaccacaagacattcaaactgtcaggactagggcgtagcagtgcccaccctctaaccacttgcctggttccattagtccccaagcatgtttgaaaacaaaagacacaaactaagcatgctgaataaaactagctgctatggctgtaataatcagaaaggtgcagagtttcagaaagagtaggaaagtagggaatgccagtatggagtatgtaaaataactagatatggatatggggtttgtttatgatatgctttatgtagacaaagtttgaggtcttttaaaactgggatttgagttgaaaagagtcaggatgcacatatttccactatttcaggattttcagatgactaggcacatgttgtggatgatactggtaccaactaccaatgaccaactataaagtacccctgcaataagggagacttcctttttgtagaatagtcctgaaaatactgacagatctgtggttagtttgttattttattgcataaaaaacagtttaaacaaattttatagccaaagttttatccttgatgggtttggccagactgcaatttcttgactaaagcttttaatgccaggttaaacaggagaaactttttccactagaagaaaatccttgctatctattttttccaatagaagaaaatccttgctatttattttatttgatgaataaacaaatttattgcagtgagctgagatcacaccactgtactccagcctggtgacagtaagactccacctcaaacaaacaaaaaatgcac

SEQ ID NO: 459459 - DNA, 4529 bp, Homo sapiens
  misc_feature (1472)..(1472): n is a, c, g, or t
tgggaacggcccaccgcagggttggccaccttgagaagctgcgaagatggcggagtaaggcgtgccgctgcaaactggcctctgggccgggggcgagcagcccccgggaggccgagtgcatctgttggaccgtgcgaggagaagaaaaaaaatatcggccagaggagaggaactaaccgaacattcttcctccctaccttatagaggggagtggtcatctacactaaagcaaagtgttaggcgcgtccgtgcgaagagaccaccaaacaggctttgtgttccttatcacaggaagaaaattttccttgacctttaggtgcttttatattcatctcaaaaacaaaattctgaactcaggacttggcaagtgtctctatgttgtctcctagagtgggtagtcctgcttcttttacccagttactttccctgtttttgaaatgtggctatcacttctctacacattacctccatgatttggaatggaaaaggccacttttctttttgttctgcctctcaaattcaacacagaggagctcctaggattccagttatcctgctaacatctccaggaagaaagaagcaactcacatgggtcttttgctgtttgcttaattataaagacatcattttgcaagcagaaggctgagtttcatttgaaacaggtgcttaggtggtggtatttgtgaatacttttcattccaagcaagaagactaaagaagtagcaagtatgaatgacttcagggtttaaaaaaaatgtcttccagtttcagccactaccatgataagcacagttgagactgcagcagtaaattccaaatatgtgtttctaatttgacgtgaaagatactaaaaatttatatttgtatatttaaatcctggctcatcctgtgacatagatttactgaataggaacaaaggcccaattttaaacaaaaacctaggccgggtgtggtggctcacacctgtaatcccaacactttgggaggccaaggcaggcaaatcacctgaggttgggagtttgagaccagcctgaccaacatggagaaaccccatctctactaaaaatagaaaattagccaggtgtggtggtagatacgtgtaatctcagctactcgtgaggctgaggcaggagaattgcttgaatccgggaggcggaggttgcagtgaactgagattgcaccactgcactccagcctgggcgacagagtgagactccgtctcagaaaaataaaaaacaactttggacatagaggagttgggggcagaggggggaggatgagagaattttccatgtaactccttttccttaagaaaaagaagcaaaaatccctcatgcagtgccatctgactttatggtgtttcacattatatagttactttttttaataaacgcataagattaactcttcctgcaacccaaggtggatacttggatgtttgatttttatttatttatttatttattttttgnggcagtctctctctgttgcccaggctggagtgatgcgtgatttctgctcactgcagtctctcccacccgggttcaagcgattctcctgcctcagcctcccaagtagctaggattacaggcgcgcaccaccacgctcagcctgatttctaggctgaaaaggctgggactcaggtactttccccagttgggactgaactttctcatcagagaatgggcctcagaagcaatgttcccaaacttgtggttgggtcatcgtggaaaagaaacctcaaataagaaaaataattacaataagaaatggattttcttttttcccacaacagttatacattataaagaacagactgtcgtagaaaactgtctttgcttccaaatcagcagaggaccattgtatgtattgtcaggtctttatataagagtgaaacctttatttatgcttcttgtgagtagagaataaattttaaaactaattagatgaaattaagaacagagtattggaacatctctgtgttttccggaatgtttactcaggtccatgaatgctgtgatgctgggaacttagggaagattcaccaaaatttgagagtgataaaaatggcctaaaatgggaaatggtgagcactcttattattagtgagattggtcaatcagcccatttgaaatgggtaaaaaatactttcagtaaaataattacatattatatataaaatatttctttttttgagggcagctactgagtgataaaagcatagtagaaatcactttggttaaaagtaactcaaatttttctcttaagtaatctaccaacttcctgatgtttttctttaatattttggaactgttcaagacagaatggagcctacatatatggtgttccactagtatgttgaaaatgtcatatcatggagaatggagacaccttccaggtgtctgttaaacccatcttctctgtgtacttctggcatcttttttggtaggatcatttggcagggggtagagtacctgtacttttggcaccattgaaaccagctctggcccacttgtttgaatagctatcagactcagcgtctctatatgctttatatacagttgagagaaccagtgtttaatgctcttgaaattgtatcttccatgcttcagaccagatgcatttaacaaaatggatatattccagctgtagttgcccagtgtttacttaacacatctacatttttttcttgtctattttggtccccttgataggaaaagctataattttaggcaggactatacgtcgatttgtagccatgcttccttcctttcccttgctcatccatgttagctggcagtttttcttttgaaaagttaaaaccgggatatgtgcaatagaaatatatatatatatatgtatattttaatacttgtggacaaatgttacaagttgtttaagaacaacaaaatcaccaatgtcttccattttgagatgtgtatagttttgtaagcattagtgcttggtagcatattgtagtgccatgttaggggttagtgcatgagtctagtgattttaaacttcaggatgaattattgataataacaaatagtgtaaaaagagtggaaaatctaaaccttttctttttccataatgtctaaatctgttatattcttcctggggaaaagagattaaggcccaaaagactcatttatgaatagaaatgtggggtcaaaatctgagatactatatttgaggacatttcagctttccataaggtatctggaaaccagctgtctttgtgtcttatgaaacctcaagtcaaaatgagaccgcatttaattattctgctttgctctttttttggggtgggggggagatagagtttcactctgtcacccaggctggagtgcagtggcacaatctttgctcactgtaacctctgcctcttgggttcaagtgattctcgtgccccagcctcccgagtagctgggactacaggcacgtgccaccacgcccagctaatttttatatttttagtagagacggggtttgctgtgttggccaggctggtctcaaactcctgacctcaagtaatccacctggcctgctcttttcatgtcttaacatggcatgtcttttagtttcattattttcctactccttgtatgtcaagaaattacattttgcatgtcttatggagatgctgttaattgcttcagtgagtgcttttctaatctgcagaccatttacatttcctgtttgcagcatgctgtgtgcaaacactcagtaatttggagtattcaattatttgttagggctcttcctatttccaaatgtgctgaattgtctattgatgggattttcagatcttttcatgagaactggaaatgtagctgggtggcacctacctaggttgctacgtagtgagtagactttctcttgggtatagtaagcctcagacagctttcacttttatctactttacttgtggaaataaaacagtcattttgttctgaaagaataagatagctttctgtagagaaggaattcctacctctaaaagctgccttgagaactcagaactggcagttttctgaggtgatttttaaatttcagtattagggagagtccagcatttgctgacacagattctacataactaatgtatgatagcaaatgcaaaactattataatgtggtgtatcttgcgcatacacaggttagaacaagtagactctggcagcagatctccagagacccaagtttaggttctcatagtgtatttgaagtagttatactcctggcttaagtagtttagtgcctgggagaatccattactgaaaagcatttaacttaaaaaaaaaaaaaaaaaaaaaaaaaaaaaccccgagagggcatcatatgccggggcgcggggaaacaacgggcgtcatcagaaaaggggccacatgggccaaagcgctgtggttctcctggcacccaaggcttcccttgcgcaccacgggcggaaagatcggcgacgggtcccccatataggggaggggccgatataaaatttcgaataagcccagggtaacccggctttgg

SEQ ID NO: 459460 - DNA, 2552 bp, Homo sapiens
tgggaacggcccaccgcagggttggccaccttgagaagctgcgaagatggcggagtaaggcgtgccgctgcaaactggcctctgggccgggggcgagcagcccccgggaggccgagtgcatctgttggaccgtgcgaggagaagaaaaaaaatatcggccagaggagaggaactaaccgaacattcttcctccctaccttatagaggggagtggtcatctacactaaagcaaagtgttaggcgcgtccgtgcgaagagaccaccaaacaggctttgtgttccttatcacaggaagaaaattttccttgacctttaggtgcttttatattcatctcaaaaacaaaattctgaactcaggacttggcaagtgtctctatgttgtctcctagagtgggtagtcctgcttcttttacccagttactttccctgtttttgaaatgtggctatcacttctctacacattacctccatgatttggaatggaaaaggccacttttctttttgttctgcctctcaaattcaacacagaggagctcctaggattccagttatcctgctaacatctccaggaagaaagaagcaactcacatgggtcttttgctgtttgcttaattataaagacatcattttgcaagcagaaggctgagtttcatttgaaacaggtgcttaggtggtggtatttgtgaatacttttcattccaagcaagaagactaaagaagtagcaagtatgaatgacttcagggtttaaaaaaaatgtcttccagtttcagccactaccatgataagcacagttgagactgcagcagtaaattccaaatatgtgtttctaatttgacgtgaaagatactaaaaatttatatttgtatatttaaatcctggctcatcctgtgacatagatttactgaataggaacaaaggcccaattttaaacaaaaacctaggccgggtgtggtggctcacacctgtaatcccaacactttgggaggccaaggcaggcaaatcacctgaggttgggagtttgagaccagcctgaccaacatggagaaaccccatctctactaaaaatagaaaattagccaggtgtggtggtagatacgtgtaatctcagctactcgtgaggctgaggcaggcaaatcacctgaggttgggagtttgagaccagcctgaccaacatggagaaaccccatctctactaaaaatagaaaattagctgggtgcggtggcttacacctataatcccagcactttgggaggccaaggtgggcggatcacaaggtcaagagatcaggaccatcctggccaacatggtgaaatgccatctctactaaaaatacaaaacttaggagtagctgggattacagacatgcaccaccaccctcagctaatttttgtatttttagtagagacggggtttcgccatgttggccaggctggtctttaactcctggccttacgtgatccgcccccccttagccttccaaagtgctgggattacaggtgtgagccactgcacctggcctgtagtagcttaaaattttccttgagaaaattcctgactttaaaaataacccttatataagtacaagtgattgtgacaaatgacgtaaaaatggcattcatgatgtctgaaacaagcctaaatagaattcaagattagactaaatgattttcacaaagcacattcaaggttttacattctatgattgaaaaaaattttttgaaaactttttatttcattctttcctgtaggattttgctacaaataactttgggaatgaataaagtggaatggtaactttccagtggttcagaattgaattagacttcttgtgactgtgatgtttggtttccattgaaatatatgaagtgagatgtcatatcctgaatatagtttgtcttccccaattacttgatagcatgtctgtcagccagtaaagattaagaacagagtttctctaaattcctccgattattccactaaggcacattaaaatacttaattttgggaaaccagacatcacagatttctccatgaagtcctaaatcttctttaaagtcagaataggtatcttagttactgacagtattcaggtttttttctcccttggtgatatgtcattccatcagtgaaaaaatattttctcccagggataagaaaggtattctggtaatacattatcatcaatccttaaacagtaacagtcttggcacttatcacaaaaccgacccatttcttataaccagaaagattatcttagactgtccttcacattatactttacctactgccttgtaagaataagagttgctcactgtgtttacttgctgtcctccatattctccattgcaccattggtgtataacgttaagagtttcattgaatattattttaagtattacaaaaggcagcttgcttcttaatctatgcatctttggggtttttgaagaaatttaattctttgatgtaaaaaggaactgttaaaaaagttggaagctctgcacctgtgtatatatatattttagcaataaagcagcatgggctgagaatgca

SEQ ID NO: 459461 - DNA, 4268 bp, Homo sapiens
ctagacagatacgattgagctcgtacccattcttcgctcaattctctccactggtgacagtaagactccacctcaaaccaaccaaaaaatgcacaaaaggaaaaaatgttctggataaagagaatatgaaggctgaggcagtagaatcacttaaacctgagaggcggaggttgcagtgagctgagatcacaccactgtactccagcctggtgacagtaagactccacctcaaacaaacaaaaaatgcacaaaaggaaaaaatgttctggataaagagcatatgaaaggtactttcttttagaacagtatgaatgtatatgaatttatctttatgtgagaaataatcttttttgtaagttaaaggttaaagaccctgcttgtttcctaaatcagagggttagagctgttgaaattaaacctttatagtgcttaacctggaaacaaatgtactacagccccactgaagccgctctatgggttttttgcttacgatgttttagcaacaggcatttattttgtagaatggtatactttctgctttgtctcctcatctttctccactggtttcctgggtacattttttttaaagggagagaagtttgtgagtttaatgttttaaaaaaactcccaagaacatggataagccggatttctctcatgcttatgattagggagttaggatttaaagatgcaaagcagaaggactgaaaggaatagccagtgaatatgtttcagtgggtgaggtgtgaaaccttgtctaatatagatgtgtcctatggcctgtgactgcttattctttatcaatgagaactcagcaaactagtttctttcttgatctgaggaaccacacagctcacatcagaatataatagtggaactagggtgacttcactccctttcacctgatgtctatcttggccttttagcaccttgactatccctgaaaagactgggtctttgttttcccagggaaaaaacgaagtgatgtagatctaagaaatagtgcctctttaatatttaattcttacatgacaactaacacacagggaaaaggctatgttaagttgattatagctcctcttaaaatgtcctatgctgtcagttggtcttagagacatgggaataaccaagcaatattcagacatctgcactatctggggacagcgctacatagtacaatgatgtcagcagttcagttacttggaacaattaaagattacccttaacagccatgttaatacatctaaatgctaaaatatactacgagtttttcatagtcttgaaagtatacagttaattacttttcaaagttactgtggtctcatgtttactcttcttgtatctgtgatatgcaaaaagatgaagactcttggcctccaggagtttacattctcatggtgctgttggttcaagcagattgctttagtttattaatgaacattgcttggctattaattatatcctatttggaaggatcccttggtgaacagttttaaaaagcagagggctgtgctaaatttcagggtattgatagcttgagtttacattgtattagccctgctcgttatcatttttttccccagggagctatgcaggtaatgctcattagcatgaatcagaaaagaaaccattctgcctaagagcatcttaaccatccccctaaaccacctatgctctcctgttatagttgtcagtaaatcacgaagaaaattaacagctccttaagactctacatccctcaattctctttcttttcccagagtttgtacatcattctctactcagatggaccaggatttgcatataagccttttaaaactgactagtggtcctaattttaacatttttgtgtatgactcctatcccttttctgaagcagcattgtgatagatgtggagcttctacctgcatttctaagcaattattaacccaacttttgagttgaaacttgcatggatccttgttatgtcccgtaattcctctgaatcaaggaatttattttgcatgcttattaaactcaaactgggtctgattgaaagtgcaagcaatagtgacaggaccttaactctggttttagagtacgaacattctaatgcatgactcaaaatgtccagtgttgtggttactagttattttatatatgcatttgttaataatgaagcaatagagactaagaccaatagcttgaatatattcagattattttcatgttttaataaaggatttttcttacttccattgaaaatgggaagtagaagataaacaggggcaaccacaagacattcaaactgtcaggactagggcgtagcagtgcccaccctctaaccacttgcctggttccattagtccccaagcatgtttgaaaacaaaagacacaaactaagcatgctgaataaaactagctgctatggctgtaataatcagaaaggtgcagagtttcagaaagagtaggaaagtagggaatgccagtatggagtatgtaaaataactagatatggatatggggtttgtttatgatatgctttatgtagacaaagtttgaggtcttttaaaactgggatttgagttgaaaagagtcaggatgcacatatttccactatttcaggattttcagatgactaggcacatgttgtggatgatactggtaccaactaccaatgaccaactataaagtacccctgcaataagggagacttcctttttgtagaatagtcctgaaaatactgacagatctgtggttagtttgttattttattgcataaaaaacagtttaaacaaattttatagccaaagttttatccttgatgggtttggccagactgcaatttcttgactaaagcttttaatgccaggttaaacaggagaaactttttccactagaagaaaatccttgctatctattttttccaatagaagaaaatccttgctatttattttatttgatgaataaacaaatttattgcagtagcttaaaaaaattttttttttaaacagtctcactctgtcgcccaggctggagtgaagcaatgtgatctcagctcactgcaacctccacctcccgagtagctgggattacagacatgcaccaccaccctcagctaatttttgtatttttagtagagacggggtttcgccatgttggccaggctggtctttaactcctggccttacgtgatccgcccccccttagccttccaaagtgctgggattacaggtgtgagccactgcacctggcctgtagtagcttaaaattttccttgagaaaattcctgactttaaaaataacccttatataagtacaagtgattgtgacaaatgacgtaaaaatggcattcatgatgtctgaaacaagcctaaatagaattcaagattagactaaatgattttcacaaagcacattcaaggttttacattctatgattgaaaaaaattttttgaaaactttttatttcattctttcctgtaggattttgctacaaataactttgggaatgaataaagtggaatggtaactttccagtggttcagaattgaattagacttcttgtgactgtgatgtttggtttccattgaaatatatgaagtgagatgtcatatcctgaatatagtttgtcttccccaattacttgatagcatgtctgtcagccagtaaagattaagaacagagtttctctaaattcctccgattattccactaaggcacattaaaatacttaattttgggaaaccagacatcacagatttctccatgaagtcctaaatcttctttaaagtcagaataggtatcttagttactgacagtattcaggtttttttctcccttggtgatatgtcattccatcagtgaaaaaatattttctcccagggataagaaaggtattctggtaatacattatcatcaatccttaaacagtaacagtcttggcacttatcacaaaaccgacccatttcttataaccagaaagattatcttagactgtccttcacattatactttacctactgccttgtaagaataagagttgctcactgtgtttacttgctgtcctccatattctccattgcaccattggtgtataacgttaagagtttcattgaatattattttaagtattacaaaaggcagcttgcttcttaatctatgcatctttggggtttttgaagaaatttaattctttgatgtaaaaaggaactgttaaaaaagttggaagctctgcacctgtgtatatatatattttagcaataaagcagcatgggctgagaatgca

SEQ ID NO: 459462 - DNA, 2620 bp, Homo sapiens
atccggccgtcgtatctcatgcgcggcagatagtattgtggtcatgtatatcgggtagaaagtccgcagctccttaagactctacatccctcaattctctttcttttcccagagtttgtacatcattctctactcagatggaccaggatttgcatataagccttttaaaactgactagtggtcctaattttaacatttttgtgtatgactcctatcccttttctgaagcagcattgtgatagatgtggagcttctacctgcatttctaagcaattattaacccaacttttgagttgaaacttgcatggatccttgttatgtcccgtaattcctctgaatcaaggaatttattttgcatgcttattaaactcaaactgggtctgattgaaagtgcaagcaatagtgacaggaccttaactctggttttagagtacgaacattctaatgcatgactcaaaatgtccagtgttgtggttactagttattttatatatgcatttgttaataatgaagcaatagagactaagaccaatagcttgaatatattcagattattttcatgttttaataaaggatttttcttacttccattgaaaatgggaagtagaagataaacaggggcaaccacaagacattcaaactgtcaggactagggcgtagcagtgcccaccctctaaccacttgcctggttccattagtccccaagcatgtttgaaaacaaaagacacaaactaagcatgctgaataaaactagctgctatggctgtaataatcagaaaggtgcagagtttcagaaagagtaggaaagtagggaatgccagtatggagtatgtaaaataactagatatggatatggggtttgtttatgatatgctttatgtagacaaagtttgaggtcttttaaaactgggatttgagttgaaaagagtcaggatgcacatatttccactatttcaggattttcagatgactaggcacatgttgtggatgatactggtaccaactaccaatgaccaactataaagtacccctgcaataagggagacttcctttttgtagaatagtcctgaaaatactgacagatctgtggttagtttgttattttattgcataaaaaacagtttaaacaaattttatagccaaagttttatccttgatgggtttggccagactgcaatttcttgactaaagcttttaatgccaggttaaacaggagaaactttttccactagaagaaaatccttgctatctattttttccaatagaagaaaatccttgctatttattttatttgatgaataaacaaatttattgcagtagcttaaaaaaattttttttttaaacagtctcactctgtcgcccaggctggagtgaagcaatgtgatctcagctcactgcaacctccacctcccgagtagctgggattacagacatgcaccaccaccctcagctaatttttgtatttttagtagagacggggtttcgccatgttggccaggctggtctttaactcctggccttacgtgatccgcccccccttagccttccaaagtgctgggattacaggtgtgagccactgcacctggcctgtagtagcttaaaattttccttgagaaaattcctgactttaaaaataacccttatataagtacaagtgattgtgacaaatgacgtaaaaatggcattcatgatgtctgaaacaagcctaaatagaattcaagattagactaaatgattttcacaaagcacattcaaggttttacattctatgattgaaaaaaattttttgaaaactttttatttcattctttcctgtaggattttgctacaaataactttgggaatgaataaagtggaatggtaactttccagtggttcagaattgaattagacttcttgtgactgtgatgtttggtttccattgaaatatatgaagtgagatgtcatatcctgaatatagtttgtcttccccaattacttgatagcatgtctgtcagccagtaaagattaagaacagagtttctctaaattcctccgattattccactaaggcacattaaaatacttaattttgggaaaccagacatcacagatttctccatgaagtcctaaatcttctttaaagtcagaataggtatcttagttactgacagtattcaggtttttttctcccttggtgatatgtcattccatcagtgaaaaaatattttctcccagggataagaaaggtattctggtaatacattatcatcaatccttaaacagtaacagtcttggcacttatcacaaaaccgacccatttcttataaccagaaagattatcttagactgtccttcacattatactttacctactgccttgtaagaataagagttgctcactgtgtttacttgctgtcctccatattctccattgcaccattggtgtataacgttaagagtttcattgaatattattttaagtattacaaaaggcagcttgcttcttaatctatgcatctttggggtttttgaagaaatttaattctttgatgtaaaaaggaactgttaaaaaagttggaagctctgcacctgtgtatatatatattttagcaataaagcagcatgggctgagaatgca

SEQ ID NO: 459463 - DNA, 4299 bp, Homo sapiens
  misc_feature (1472)..(1472): n is a, c, g, or t
tgggaacggcccaccgcagggttggccaccttgagaagctgcgaagatggcggagtaaggcgtgccgctgcaaactggcctctgggccgggggcgagcagcccccgggaggccgagtgcatctgttggaccgtgcgaggagaagaaaaaaaatatcggccagaggagaggaactaaccgaacattcttcctccctaccttatagaggggagtggtcatctacactaaagcaaagtgttaggcgcgtccgtgcgaagagaccaccaaacaggctttgtgttccttatcacaggaagaaaattttccttgacctttaggtgcttttatattcatctcaaaaacaaaattctgaactcaggacttggcaagtgtctctatgttgtctcctagagtgggtagtcctgcttcttttacccagttactttccctgtttttgaaatgtggctatcacttctctacacattacctccatgatttggaatggaaaaggccacttttctttttgttctgcctctcaaattcaacacagaggagctcctaggattccagttatcctgctaacatctccaggaagaaagaagcaactcacatgggtcttttgctgtttgcttaattataaagacatcattttgcaagcagaaggctgagtttcatttgaaacaggtgcttaggtggtggtatttgtgaatacttttcattccaagcaagaagactaaagaagtagcaagtatgaatgacttcagggtttaaaaaaaatgtcttccagtttcagccactaccatgataagcacagttgagactgcagcagtaaattccaaatatgtgtttctaatttgacgtgaaagatactaaaaatttatatttgtatatttaaatcctggctcatcctgtgacatagatttactgaataggaacaaaggcccaattttaaacaaaaacctaggccgggtgtggtggctcacacctgtaatcccaacactttgggaggccaaggcaggcaaatcacctgaggttgggagtttgagaccagcctgaccaacatggagaaaccccatctctactaaaaatagaaaattagccaggtgtggtggtagatacgtgtaatctcagctactcgtgaggctgaggcaggagaattgcttgaatccgggaggcggaggttgcagtgaactgagattgcaccactgcactccagcctgggcgacagagtgagactccgtctcagaaaaataaaaaacaactttggacatagaggagttgggggcagaggggggaggatgagagaattttccatgtaactccttttccttaagaaaaagaagcaaaaatccctcatgcagtgccatctgactttatggtgtttcacattatatagttactttttttaataaacgcataagattaactcttcctgcaacccaaggtggatacttggatgtttgatttttatttatttatttatttattttttgnggcagtctctctctgttgcccaggctggagtgatgcgtgatttctgctcactgcagtctctcccacccgggttcaagcgattctcctgcctcagcctcccaagtagctaggattacaggcgcgcaccaccacgctcagcctgatttctaggctgaaaaggctgggactcaggtactttccccagttgggactgaactttctcatcagagaatgggcctcagaagcaatgttcccaaacttgtggttgggtcatcgtggaaaagaaacctcaaataagaaaaataattacaataagaaatggattttcttttttcccacaacagttatacattataaagaacagactgtcgtagaaaactgtctttgcttccaaatcagcagaggaccattgtatgtattgtcaggtctttatataagagtgaaacctttatttatgcttcttgtgagtagagaataaattttaaaactaattagatgaaattaagaacagagtattggaacatctctgtgttttccggaatgtttactcaggtccatgaatgctgtgatgctgggaacttagggaagattcaccaaaatttgagagtgataaaaatggcctaaaatgggaaatggtgagcactcttattattagtgagattggtcaatcagcccatttgaaatgggtaaaaaatactttcagtaaaataattacatattatatataaaatatttctttttttgagggcagctactgagtgataaaagcatagtagaaatcactttggttaaaagtaactcaaatttttctcttaagtaatctaccaacttcctgatgtttttctttaatattttggaactgttcaagacagaatggagcctacatatatggtgttccactagtatgttgaaaatgtcatatcatggagaatggagacaccttccaggtgtctgttaaacccatcttctctgtgtacttctggcatcttttttggtaggatcatttggcagggggtagagtacctgtacttttggcaccattgaaaccagctctggcccacttgtttgaatagctatcagactcagcgtctctatatgctttatatacagttgagagaaccagtgtttaatgctcttgaaattgtatcttccatgcttcagaccagatgcatttaacaaaatggatatattccagctgtagttgcccagtgtttacttaacacatctacatttttttcttgtctattttggtccccttgataggaaaagctataattttaggcaggactatacgtcgatttgtagccatgcttccttcctttcccttgctcatccatgttagctggcagtttttcttttgaaaagttaaaaccgggatatgtgcaatagaaatatatatatatatatgtatattttaatacttgtggacaaatgttacaagttgtttaagaacaacaaaatcaccaatgtcttccattttgagatgtgtatagttttgtaagcattagtgcttggtagcatattgtagtgccatgttaggggttagtgcatgagtctagtgattttaaacttcaggatgaattattgataataacaaatagtgtaaaaagagtggaaaatctaaaccttttctttttccataatgtctaaatctgttatattcttcctggggaaaagagattaaggcccaaaagactcatttatgaatagaaatgtggggtcaaaatctgagatactatatttgaggacatttcagctttccataaggtatctggaaaccagctgtctttgtgtcttatgaaacctcaagtcaaaatgagaccgcatttaattattctgctttgctctttttttggggtgggggggagatagagtttcactctgtcacccaggctggagtgcagtggcacaatctttgctcactgtaacctctgcctcttgggttcaagtgattctcgtgccccagcctcccgagtagctgggactacaggcacgtgccaccacgcccagctaatttttatatttttagtagagacggggtttgctgtgttggccaggctggtctcaaactcctgacctcaagtaatccacctggcctgctcttttcatgtcttaacatggcatgtcttttagtttcattattttcctactccttgtatgtcaagaaattacattttgcatgtcttatggagatgctgttaattgcttcagtgagtgcttttctaatctgcagaccatttacatttcctgtttgcagcatgctgtgtgcaaacactcagtaatttggagtattcaattatttgttagggctcttcctatttccaaatgtgctgaattgtctattgatgggattttcagatcttttcatgagaactggaaatgtagctgggtggcacctacctaggttgctacgtagtgagtagactttctcttgggtatagtaagcctcagacagctttcacttttatctactttacttgtggaaataaaacagtcattttgttctgaaagaataagatagctttctgtagagaaggaattcctacctctaaaagctgccttgagaactcagaactggcagttttctgaggtgatttttaaatttcagtattagggagagtccagcatttgctgacacagattctacataactaatgtatgatagcaaatgcaaaactattataatgtggtgtatcttgcgcatacacaggttagaacaagtagactctggcagcagatctccagagacccaagtttaggttctcatagtgtatcttaaggagcaaacacctatcccccattctcctcgtatccctcaacaccgacatcattaccgggttttcctttt

SEQ ID NO: 459464 - DNA, 1823 bp, Homo sapiens
tgggaacggcccaccgcagggttggccaccttgagaagctgcgaagatggcggagtaaggcgtgccgctgcaaactggcctctgggccgggggcgagcagcccccgggaggccgagtgcatctgttggaccgtgcgaggagaagaaaaaaaatatcggccagaggagaggaactaaccgaacattcttcctccctaccttatagaggggagtggtcatctacactaaagcaaagtgttaggcgcgtccgtgcgaagagaccaccaaacaggctttgtgttccttatcacaggaagaaaattttccttgacctttaggtgcttttatattcatctcaaaaacaaaattctgaactcaggacttggcaagtaagtaattgtgggctaatcgttccaaatactgtttaagtagcttgaaaacaggtacatagaagtggaacaataagccgttagcttcagcagaagacgaacatgaaaaatgactgtaagctattgaaatttaagttaaatcttttatttttcaacaaaagaaatgtattaaataaaaaggagtaatcttgatcatttgctcaaactaccaataattttcactgtctaaagaaaacagacacatatttaattagattgaaggaaatcaaatgattaaaaaataggcctggcccggtggctcacgcctgtaatcccagcagtttgggaggccgaggctggtctttaactcctggccttacgtgatccgcccccccttagccttccaaagtgctgggattacaggtgtgagccactgcacctggcctgtagtagcttaaaattttccttgagaaaattcctgactttaaaaataacccttatataagtacaagtgattgtgacaaatgacgtaaaaatggcattcatgatgtctgaaacaagcctaaatagaattcaagattagactaaatgattttcacaaagcacattcaaggttttacattctatgattgaaaaaaattttttgaaaactttttatttcattctttcctgtaggattttgctacaaataactttgggaatgaataaagtggaatggtaactttccagtggttcagaattgaattagacttcttgtgactgtgatgtttggtttccattgaaatatatgaagtgagatgtcatatcctgaatatagtttgtcttccccaattacttgatagcatgtctgtcagccagtaaagattaagaacagagtttctctaaattcctccgattattccactaaggcacattaaaatacttaattttgggaaaccagacatcacagatttctccatgaagtcctaaatcttctttaaagtcagaataggtatcttagttactgacagtattcaggtttttttctcccttggtgatatgtcattccatcagtgaaaaaatattttctcccagggataagaaaggtattctggtaatacattatcatcaatccttaaacagtaacagtcttggcacttatcacaaaaccgacccatttcttataaccagaaagattatcttagactgtccttcacattatactttacctactgccttgtaagaataagagttgctcactgtgtttacttgctgtcctccatattctccattgcaccattggtgtataacgttaagagtttcattgaatattattttaagtattacaaaaggcagcttgcttcttaatctatgcatctttggggtttttgaagaaatttaattctttgatgtaaaaaggaactgttaaaaaagttggaagctctgcacctgtgtatatatatattttagcaataaagcagcatgggctgagaatgca

SEQ ID NO: 459465 - DNA, 3541 bp, Homo sapiens
  misc_feature (1472)..(1472): n is a, c, g, or t
tgggaacggcccaccgcagggttggccaccttgagaagctgcgaagatggcggagtaaggcgtgccgctgcaaactggcctctgggccgggggcgagcagcccccgggaggccgagtgcatctgttggaccgtgcgaggagaagaaaaaaaatatcggccagaggagaggaactaaccgaacattcttcctccctaccttatagaggggagtggtcatctacactaaagcaaagtgttaggcgcgtccgtgcgaagagaccaccaaacaggctttgtgttccttatcacaggaagaaaattttccttgacctttaggtgcttttatattcatctcaaaaacaaaattctgaactcaggacttggcaagtgtctctatgttgtctcctagagtgggtagtcctgcttcttttacccagttactttccctgtttttgaaatgtggctatcacttctctacacattacctccatgatttggaatggaaaaggccacttttctttttgttctgcctctcaaattcaacacagaggagctcctaggattccagttatcctgctaacatctccaggaagaaagaagcaactcacatgggtcttttgctgtttgcttaattataaagacatcattttgcaagcagaaggctgagtttcatttgaaacaggtgcttaggtggtggtatttgtgaatacttttcattccaagcaagaagactaaagaagtagcaagtatgaatgacttcagggtttaaaaaaaatgtcttccagtttcagccactaccatgataagcacagttgagactgcagcagtaaattccaaatatgtgtttctaatttgacgtgaaagatactaaaaatttatatttgtatatttaaatcctggctcatcctgtgacatagatttactgaataggaacaaaggcccaattttaaacaaaaacctaggccgggtgtggtggctcacacctgtaatcccaacactttgggaggccaaggcaggcaaatcacctgaggttgggagtttgagaccagcctgaccaacatggagaaaccccatctctactaaaaatagaaaattagccaggtgtggtggtagatacgtgtaatctcagctactcgtgaggctgaggcaggagaattgcttgaatccgggaggcggaggttgcagtgaactgagattgcaccactgcactccagcctgggcgacagagtgagactccgtctcagaaaaataaaaaacaactttggacatagaggagttgggggcagaggggggaggatgagagaattttccatgtaactccttttccttaagaaaaagaagcaaaaatccctcatgcagtgccatctgactttatggtgtttcacattatatagttactttttttaataaacgcataagattaactcttcctgcaacccaaggtggatacttggatgtttgatttttatttatttatttatttattttttgnggcagtctctctctgttgcccaggctggagtgatgcgtgatttctgctcactgcagtctctcccacccgggttcaagcgattctcctgcctcagcctcccaagtagctaggattacaggcgcgcaccaccacgctcagcctgatttctaggctgaaaaggctgggactcaggtactttccccagttgggactgaactttctcatcagagaatgggcctcagaagcaatgttcccaaacttgtggttgggtcatcgtggaaaagaaacctcaaataagaaaaataattacaataagaaatggattttcttttttcccacaacagttatacattataaagaacagactgtcgtagaaaactgtctttgcttccaaatcagcagaggaccattgtatgtattgtcaggtctttatataagagtgaaacctttatttatgcttcttgtgagtagagaataaattttaaaactaattagatgaaattaagaacagagtattggaacatctctgtgttttccggaatgtttactcaggtccatgaatgctgtgatgctgggaacttagggaagattcaccaaaatttgagagtgataaaaatggcctaaaatgggaaatggtgagcactcttattattagtgagattggtcaatcagcccatttgaaatgggtaaaaaatactttcagtaaaataattacatattatatataaaatatttctttttttgagggcagctactgagtgataaaagcatagtagaaatcactttggttaaaagtaactcaaatttttctcttaagtaatctaccaacttcctgatgtttttctttaatattttggaactgttcaagacagaatggagcctacatatatggtgttccactagtatgttgaaaatgtcatatcatggagaatggagacaccttccaggtgtctgttaaacccatcttctctgtgtacttctggcatcttttttggtaggatcatttggcagggggtagagtacctgtacttttggcaccattgaaaccagctctggcccacttgtttgaatagctatcagactcagcgtctctatatgctttatatacagttgagagaaccagtgtttaatgctcttgaaattgtatcttccatgcttcagaccagatgcatttaacaaaatggatatattccagctgtagttgcccagtgtttacttaacacatctacatttttttcttgtctattttggtccccttgataggaaaagctataattttaggcaggactatacgtcgatttgtagccatgcttccttcctttcccttgctcatccatgttagctggcagtttttcttttgaaaagttaaaaccgggatatgtgcaatagaaatatatatatatatatgtatattttaatacttgtggacaaatgttacaagttgtttaagaacaacaaaatcaccaatgtcttccattttgagatgtgtatagttttgtaagcattagtgcttggtagcatattgtagtgccatgttaggggttagtgcatgagtctagtgattttaaacttcaggatgaattattgataataacaaatagtgtaaaaagagtggaaaatctaaaccttttctttttccataatgtctaaatctgttatattcttcctggggaaaagagattaaggcccaaaagactcatttatgaatagaaatgtggggtcaaaatctgagatactatatttgaggacatttcagctttccataaggtatctggaaaccagctgtctttgtgtcttatgaaacctcaagtcaaaatgagaccgcatttaattattctgctttgctctttttttggggtgggggggagatagagtttcactctgtcacccaggctggagtgcagtggcacaatctttgctcactgtaacctctgcctcttgggttcaagtgattctcgtgccccagctactcgggaggctgaggcaggagaatggcgtgaacccgggaggcggagcttgcagtgagccgagatcccgccactgcactccagcctgggcgacagagcgagactccttctcaaaaaaaaaaa

SEQ ID NO: 459466 - DNA, 1113 bp, Homo sapiens
tgggaacggcccaccgcagggttggccaccttgagaagctgcgaagatggcggagtaaggcgtgagccactgcacctggcctgtagtagcttaaaattttccttgagaaaattcctgactttaaaaataacccttatataagtacaagtgattgtgacaaatgacgtaaaaatggcattcatgatgtctgaaacaagcctaaatagaattcaagattagactaaatgattttcacaaagcacattcaaggttttacattctatgattgaaaaaaattttttgaaaactttttatttcattctttcctgtaggattttgctacaaataactttgggaatgaataaagtggaatggtaactttccagtggttcagaattgaattagacttcttgtgactgtgatgtttggtttccattgaaatatatgaagtgagatgtcatatcctgaatatagtttgtcttccccaattacttgatagcatgtctgtcagccagtaaagattaagaacagagtttctctaaattcctccgattattccactaaggcacattaaaatacttaattttgggaaaccagacatcacagatttctccatgaagtcctaaatcttctttaaagtcagaataggtatcttagttactgacagtattcaggtttttttctcccttggtgatatgtcattccatcagtgaaaaaatattttctcccagggataagaaaggtattctggtaatacattatcatcaatccttaaacagtaacagtcttggcacttatcacaaaaccgacccatttcttataaccagaaagattatcttagactgtccttcacattatactttacctactgccttgtaagaataagagttgctcactgtgtttacttgctgtcctccatattctccattgcaccattggtgtataacgttaagagtttcattgaatattattttaagtattacaaaaggcagcttgcttcttaatctatgcatctttggggtttttgaagaaatttaattctttgatgtaaaaaggaactgttaaaaaagttggaagctctgcacctgtgtatatatatattttagcaataaagcagcatgggctgagaatgca

SEQ ID NO: 459467 - DNA, 1501 bp, Homo sapiens
tgggaacggcccaccgcagggttggccaccttgagaagctgcgaagatggcggagtaaggcgtgccgctgcaaactggcctctgggccgggggcgagcagcccccgggaggccgagtgcatctgttggaccgtgcgaggagaagaaaaaaaatatcggccagaggagaggaactaaccgaacattcttcctccctaccttatagaggggagtggtcatctacactaaagcaaagtgttaggcgcgtccgtgcgaagagaccaccaaacaggctttgtgttccttatcacaggaagaaaattttccttgacctttaggtgcttttatattcatctcaaaaacaaaattctgaactcaggacttggcaagtgtctctatgttgtctcctagagtgggtagtcctgcttcttttacccagttactttccctgtttttgaaatgtggctatcacttctctacacattacctccatgatttggaatggaaaaggccacttttctttttgttctgcctctcaaattcaacacagaggagctcctaggattccagttatcctgctaacatctccaggaagaaagaagcaactcacatgggtcttttgctgtttgcttaattataaagacatcattttgcaagcagaaggctgagtttcatttgaaacaggtgcttaggtggtggtatttgtgaatacttttcattccaagcaagaagactaaagaagtagcaagtatgaatgacttcagggtttaaaaaaaatgtcttccagtttcagccactaccatgataagcacagttgagactgcagcagtaaattccaaatatgtgtttctaatttgacgtgaaagatactaaaaatttatatttgtatatttaaatcctggctcatcctgtgacatagatttactgaataggaacaaaggcccaattttaaacaaaaacctaggccgggtgtggtggctcacacctgtaatcccaacactttgggaggccaaggcaggcaaatcacctgaggttgggagtttgagaccagcctgaccaacatggagaaaccccatctctactaaaaatagaaaattagccaggtgtggtggtagatacgtgtaatctcagtcagcctcccaagtagctaggattacaggcgcgcaccaccacgctcagcctgatttctaggctgaaaaggctgggactcaggtactttccccagttgggactgaactttctcatcagagaatgggcctcagaagcaatgttcccaaacttgtggttgggtcatcgtggaaaagaaacctcaaataagaaaaataattacaataagaaatggattttcttttttcccacaacagttatacattataaagaacagactgtcgtagaaaactgtctttgcttccaaatcagcagaggaccattgtatgtattgtcaggtctttatataagagtgaaacctttatttatgcttcttgtgagtagagaataaattttaaaactaattagatgaaatt

SEQ ID NO: 459468 - DNA, 979 bp, Homo sapiens
tgggaacggcccaccgcagggttggccaccttgagaagctgcgaagatggcggagtaaggcgtgccgctgcaaactggcctctgggccgggggcgagcagcccccgggaggccgagtgcatctgttggaccgtgcgaggagaagaaaaaaaatatcggccagaggagaggaactaaccgaacattcttcctccctaccttatagaggggagtggtcatctacactaaagcaaagtgttaggcgcgtccgtgcgaagagaccaccaaacaggctttgtgttccttatcacaggaagaaaattttccttgacctttaggtgcttttatattcatctcaaaaacaaaattctgaactcaggacttggcaaaccaccgctgaaacttcacttctacacagaggctttctttcccagaaacccagaccagatggagtttcactctgtcgcccaggctggagtgcagtggcacgatctcggctgactgcagcctctacctgctgggttcaagcaattcttctgcctcaggttcctgagtagctgggattacaggtgcgcaccaccatgcctggctaatttttgtatttttagtagagacgaggtttcaccacgttggcgaggctggtcttgaactcctgacctcaagtgatccactgcctcggcctccgaaaatctggaattatagatgtgagccactgcgccaggcctgtaattttatgtatctttatgtgattatttgaatgtccctctctgactagattataaattctaaggatagtgtgtctatttttgcttaccttttatccccagcacctagtctaacactttacaaatatatattaaattaatattttgataagttactcaaagtgctacataaaacaaaattatagaaaatagtactttggtaactgtttcgttttatcattgctttcattatttctctgttaacctcagtttacaactgaaaaagacaaattgtat

SEQ ID NO: 459469 - DNA, 857 bp, Homo sapiens
tgggaacggcccaccgcagggttggccaccttgagaagctgcgaagatggcggagtaaggcgtgccgctgcaaactggcctctgggccgggggcgagcagcccccgggaggccgagtgcatctgttggaccgtgcgaggagaagaaaaaaaatatcggccagaggagaggaactaaccgaacattcttcctccctaccttatagaggggagtggtcatctacactaaagcaaagtgttaggcgcgtccgtgcgaagagaccaccaaacaggctttgtgttccttatcacaggaagaaaattttccttgacctttaggtgcttttatattcatctcaaaaacaaaattctgaactcaggacttggcaagaggtgcaagcgaagatgcag[450 bp omitted]tttctactaaaaatacaaa

SEQ ID NO: 459470 - DNA, 550 bp, Homo sapiens
ctgcctacctctgagtctctgtcaaatgcaagtgatggtggctaacttccttcctatagcaagctctgaataaataccttttgtttgttctcatttaggttgtcttcattcatttccacagtttctctggaggttccaacaagatacggtctccattgcccattgctctggaccccagccatcacccagtgcagcagtgatgccttatgacaagtcagcacctggtctgaactctgctctctttgcactgaattctttgagtttttattccaagttcagtcattggttttagtattggttcccatctgcttggcatccttggtggaattgggcttcttttttcaatttctttttgctgtctttttgttttactgtgttgagtagtgctatctaaatgtgtttatcataaaagaagcagcacatgatcataggcccatgagcctgtttttcaagccagccaaacagcacatttagtttgacattcacactggacctctgtccatttttataaacttcgctttgggtcatcaataaaactaaatgaagttct

SEQ ID NO: 459471 - DNA, 1866 bp, Homo sapiens
agtttcccgtgggtgtgttcacagaacactgggcccctttccatagttcacagacgtggacaatgagcagatgaggctttctccctctggtcctgaagtagcatcatttcatctgaaatggccacaagcaattttggtttatttttcataacagaatcaaagacatcaccaaaaactccatcccacttcttgcaggggaggaatttgttattttcccttggatcctgttgaacacatgtggcatcctgcctgaacccctcccgcagctgccatgcgatccagagctccatccacttgcccacctaagtggaaagggccttcgagggccatcagtttgcagacgacactgtgcattcctttttctctttcggacgctggctccacaatccgggctccaggaggtggaatcgctgttcacttactgccccctagtggtccgcatttctgaaagttctttatccctgtttcctttgagatttttctccgtagatttataggtgtttaggatggggttagtaatgtggccaaggaggtggttgttttctcaagggtgagacctcgtctccgatctccgtctcttggagctagcattcccctctatccacagacaccacgtctgtcgtcatttttattttctgcaatcatttcttctcttggtagcttggagaagagttcatccttgttgatgagacaatcagtataaaccagaggttctcatttaggggcaattttgctcccccttccccagggacattggacaatgtctgggtctggagacattctggtttgtcacaagctggggtaggcaaggtttctactggcatccagtagatgaaggccaggggcgctgctaaacatcgtaccgtgcagtttccccacaccacagcgaagaattacacagcccaaaatgtcaaatgctgaagttgaaaagcctgatattaaccactgtgggcttcttgttttactgcaccgcaggtcggtctccctctctctctctttctctctttctccctctctctcctaccccaccctcccacctatccctccttctgtccctctgttggcatcagcaccactgaataaaaagactcggtcctctgttagccaggcacaatcgtccctttggccaatgtagaacattccctggaaaaccctccttgtacctgcctcacaccactgcaaaatgttcccagccactgttaaaagatgagcgacccccctccaccaccaccacacgaaaggcaggggggaggagctggggctctacacaaaatcagaggctgagacgggcactcggcccctcctcttcctctgtgaggcctcgtgttcagctctatgtgctggtgtccttgctcccgcagcgagttggaagactttgttgaagacttgaagaaggactccacggcagccagccgattggttactctgaaagacgtggaagacggggctttcctcctgcgtcaagtgggagaggctgtagctaccctgaaaggtaaactttctgctgggtcgggggaggagtctgagctgtctttcctgcggtgtttaaaaatctgccacatagaggattcattcatgtatgcaagtatttattaaacgtctacatgtgccaggcattgttctggacacttgggataccccacagcacaaagtaggtgcacatccccctcttcttggagctggtattagagtgggtgctgtaagatttcacactaaatgattccagtaacactttctatttgctaggctcttacagtgcaccgggatgcatgtgccaaacccgttaaaaacacaaggtgggaggatcacttgatcccaggagttcaagaccagcctgggcaatatagagagactcacatctctacc

SEQ ID NO: 459472 - DNA, 5385 bp, Homo sapiens
taatttttttttttccaaagagatgggatcttgctacattgcccaggtgggtctcgaactcctggcctcaagcaatcctcttgccatggcctcccaaagcactgggattacaggcataagccattgcacccagcccttgaatttttgaaaattaggctctttaacacctgcttggacttcaaagaacgaaggtgagtacttacacaataaccaaacagtgcattccttggaaattccaaacctagatctcttgttacatgcttgccaagcttgtcctgaacgttcctaagtgcagcaggaaagaagtggctcagcttgtgctgtgtgtcccctgagtcttgacctgtgactaataactgtttcctttgtgtgcaggggttctctatctccagtatggagatgaaaccaagcagctcaggatgccgaatgaaatcacaagtgcagacacaatccgtgctctcttcgtaagtgcctttccacagcagctcaccatgaaaatgctggaatcgcccagtgtcgccatttacatcaaagatgaaagcagaaatgtctattatgaattaaatgatgtaaggaacattcaagacagatcactcctcaaagtgtacaacaaggatcctgcacatgcgtttaatcacacaccaaaaactatgaatggagacatgaggatgcagagagaacttgtttatgcaagaggagatggccctggggcccctcgccccggatctactgctcatccaccccatgcgattccaaattccccaccgtctactccagtgccccattccatgcccccctccccgtccagaattccttatgggggcacccgctccatggttgttcctggcaatgccaccatccccagggacagaatctccagcctgccagtctccagacccatctctccaagcccaagcgccattttagaaagaagagatgtcaagcctgatgaagacatgagtggcaaaaacattgcaatgtacagaaatgagggtttctatgctgatccttacctttatcacgagggacggatgagcatagcctcatcccatggtggacacccactggatgtccccgaccacatcattgcatatcaccgcaccgccatccggtcagcgagtgcttattgtaacccctcaatgcaagcggaaatgcatatggaacaatcactgtacagacagaaatcaaggaaatatccggatagccatttgcctacactgggctccaaaacaccccctgcctctcctcacagagtcagtgacctgaggatgatagacatgcacgctcactataatgcccacggcccccctcacaccatgcagccagaccgggcctctccgagccgccaggcctttaaaaaggagccaggcaccttggtgtatatagaaaagccacggagcgctgcaggattatccagccttgtagacctcggccctcctctaatggagaagcaagtttttgcctacagcacggcgacaatacccaaagacagagagaccagagagaggatgcaagccatggagaaacagattgccagtttaactggccttgttcagtctgcgctttttaaagggcccattacaagttatagcaaagatgcgtctagcgagaaaatgatgaaaaccacagccaacaggaaccacacagatagtgcaggaacgccccatgtgtctggtgggaagatgctcagtgctctggagtccacggtgcctcccagccagcctccacctgtgggcacctcagccatccacatgagcctgcttgagatgaggcggagcgtggcggaactcaggctccagctccagcagatgcggcagctccagctgcagaaccaggagttgctgagggcaatgatgaagaaggccgagctggaaatcagtggcaaagtgatggaaacaatgaagagactggaggatcccgtgcagcgcacgatggcgcgtcctagtggagcaagagagacaaaaatatcttcatgaggaagagaagatcgtcaagaagttgtgcgagttggaagactttgttgaagacttgaagaaggactccacggcagccagccgattggttactctgaaagacgtggaagacggggctttcctcctgcgtcaagtgggagaggctgtagctaccctgaaaggagaatttccaaccttacaaaacaagatgcgagccatcctgcgcatagaagtggaggccgtgcggtttctgaaggaggagccacacaagctggacagtctcctgaagcgtgtgcgcagcatgacagacgtcctgaccatgctgcggagacatgtcactgatgggctcctgaaaggcacggacgcagcccaagccgcacagtacatggctatggaaaaggccacagccgcagaagtcctgaagagtcaggaggaggcagcccacacctccggccagcccttccacagcacaggtgcccctggcgatgcgaagtcggaagtggtgcctttgtccggcatgatggttcgccacgcgcagagctcccctgtggtcatccagccctcccagcactccgtggccctgctgaaccctgctcagaacttgcctcacgtggccagctccccagccgtcccccaggaagcaacctccactctgcagatgtcgcaggctccgcagtccccacagatacccatgaatgggtctgccatgcagagcttgttcattgaagaaatccacagtgtgagtgccaagaacagggcagtgtctatcgagaaagcagaaaagaaatgggaggaaaaaaggcaaaatctggatcactataatgggaaagagtttgagaagctcctagaagaagctcaggccaatatcatgaagtcaataccaaatctggagatgccgccagccacaggcccactgccaaggggagatgccccagtggacaaggtggaactttcagaagattctccaaattcggaacaggacttggaaaagctggggggaaagtcgccccctcctcctccgccacctcctcgtcgaagctacctgccaggatcgggactcaccaccacgaggtcaggcgatgtggtctacaccggcagaaaggagaacatcaccgctaaggcaagcagtgaagatgctggaccaagcccacagaccagagctacaaaatatccagcagaggagcctgcttcagcctggaccccatccccaccgcctgtcaccacctcctcctcaaaggatgaggaggaagaagaagaagaaggagacaaaataatggcagaactccagggctccagcggggccccacagacgagcaggatgcctgtccccatgagtgccaagaacagacccggaaccctggacaaacccggcaagcagtccaaactgcaggatccccgccaatatcgtcaggctaatggaagtgctaagaaatctggtggggactttaagcctacttccccctccttacctgcttctaagattccagccctttctcccagctctgggaaaagcagttctctgccctcttctagtggtgacagctctaacctccctaatccacctgctactaaaccatcgattgcttctaaccctctcagcccccaaacaggaccacctgctcactctgcctccctcatcccttctgtctctaatggctctttgaagtttcagagcctcactcatacaggtaaaggtcaccatctttcattctcaccgcagagtcaaaatggccgagcaccccctcctttgtcattttcctcctcccctccttctcctgcctcctccgtctcactgaatcaaggtgccaagggcaccaggaccatccatactcccagcctcaccagctacaaggcacagaatggaagttcaagcaaagccaccccatccacagcaaaagaaacctcttaaaggtcaaatcctattaggcacaagtcggagttacatttaaaaaaaattaacagtctacaacaactgttttcacaagagaatgtaacatattgctgtatcgtttgaggcttaatgctaaatatgtgctaaatactggattaatagatttcagtaaagctcgttcgttttgtttggttttctttttacctagttgctatagtgtctacagtctatactcaatacctataaaatgcagtaagcatgtgttacagaaagaggttctggtgggagagaaaggtgcgtgtgagacaggagaattgtcttaagcatataaaacatgtatgattccagaattttagtatgttttgtataaaactatttttcattacggagactagaagtgaacagagaattacacaagtgtgactatacaaattgtaaaacagatactataatatttccttttattttagtgttatttagctttattacagatttctatttttgtcaaaacttcatggttcctttcaagatcttttttgccaaaacattttgatactatagcattgtacatttgaaagtagtgttctagactataaaaccaatgaacttctacatgagccctacagacaggcatgtgtagaaggcaatttatcaaacctattgcactgccatgaaaagtgtgtataataatttgctagcccaagcaagctagttttctttgcttgcttcttttctttcttttttccttccttttttttttttttttcttttttaacatgttgagattctctagttgttttctttggcgtatctaaccccttcttttgttttctgagacctggtaacccacgctcttgcattgtggattttaaaatgtatactctgtacggttctgtaaaccgaaaaacttttgtaaatatataaatatacatagacataaaaatactgtatgtgacagcacatagagtagttttcccacaccaaagttaatttttatgcatgctttaaaagtatatatcgggaccggcagaaatggaagtatccatacatttttaaaaagcaacaagtttgcacagctagagtgtttttgtaaataaatgtatttgtataacacagtcatgtaatatacagaactataagcagagactttgcaaaactaaataaagggctgcatgcttattattttttgtaccttgtcactataactacttcctagtcaaagaacgaaatgtaactgttaccgagttaaatgtttttccgctttgagggatgtaaccacatccactcagaggacactacttttctgaaagctctggggtgactaatgatgagttcctaataaattaattgcaagtgtggtgccttggatgtggcctgttggctcgctttcttctctgtggcttatcaaggtgtagatgacagaaagcaaacctggatacagagtttccaccctcagttcctggaggggctcttattattttctctctttttaaaaaacttccagtagaagtaaagtggaaataaaatgtctttatcacttgg

SEQ ID NO: 459473 - DNA, 2531 bp, Homo sapiens
aagcgaccagattgcccagcgcctggagaatgggctgcagccagagagagcataggaggatgttgttctctgtacactgtctctaaaaatggtgctttttggctgggcacggtggctcatgcctgtaatcccagcactttggaaggctgcggcgggcagatcacttgcggtcaggagttcgagacctgcctgatgatcatggagaaaccccatctctactaaaaattcaaaattagccgggtgtggtggtgtggtgggcacctgtaatcccagctacttgggaggctgaggcagaagaatcgtttgaacccgggaggcagaggttgcagtgaactgagatcgtgccattgcactccagcctgggcaacaagagtgaaactccatctcaaaaaaaacaaacaagcaaaaaaatgatgccttttagcaaaatagtgactgactggcttttaataccacaataaaaagacattagcaaaagtggtgtgagagcatgatcatgagtcctgtagagaaagtaaccaaaagtgatacatttctatgtggttccctcccagacaaaatgccaggctccacccactagttcaccctccctgttagcaatggctggtacgtgttcaggtttagattggtgccagacactttattttattgtctcaccgagtctccatgaccaacctacgagctatgagatattactaccccttttttggatagacacagaggtgaatagcttgcccatggacacacatctactaagtggtaaaactggaaatcgaacccaggcagtctttccccagaggccagttcatcaccatgcagtgctgatgttgggacctaatggtggttctgcttgtggcctgtgttgaaatgttttatctttattcagagaaaacagaaggcatgatgtggctttaagcaggtggtgacatggtcagattgcatttcccctcaatttacatggataatggacagttgacaaagacatcatcacccccatgagatgataaaccagtccatgaaaccggaaaacaggaaaccattgaaatttgttaaatgatatttcagtggaactttggggataatatactaggcataatatcattattgtgatggaggctgattgagtgaattcactcgatggagctgctgttagaaaattgtcctgctccagggactcaagtgctcaaccagactcctgcgaagcctgaataaagctcccacctcctatattctctgggatgagaaacaagaatgttctcggaactgtttggaaattgtgagttctgtatacaggtagcctacctccaatctagagaaattcataaattgccaaaagccctggactcatccagaatcattatcattgccaacattaaagtcctatgttttaagcatctgtgatttcatggtacttggtacatggaaccatgtgaacgaaaaggacacagatcctctttgaactgatactgacgtatttcatagccaaatcaccacgtgttgagttcccattctacaccatgcggtatttcatgtaaccctcaagaatggccaaggaaagtggattccccatcattagaggtaaggaaatgaagaccaagggagtctaaataatgggcccaaagtctcacagtgggctagagagagagtatgggattagacccaaagtcttcttggctccaaagcaggtgccctgtgctgctccctctaaagatacatcagtgagagtttacgcctgttgtccatgatgcattgaccagagtagaaaaaggatcctttgtcttgcaggcagtctggttgccagttggctgccaaaattcagatgttggtggaagaagccacattatgtacagtctttgctccctttcctttctcattgaaataagtaaagattcagccgcagggctgtctacccaaagtgctccgaagacttcaaggcattcactcgcctccatttcaggcaggcagagcccactgaggttgatttttttgtgttcacagctgcagaaccaggagttgctgagggcaatgatgaagaaggccgagctggaaatcagtggcaaagtgatggaaacaatgaagagactggaggatcccgtgcagcgcacgatggcgcgtcctagtggagcaagagagacaaaaatatcttcatgaggaagagaagatcgtcaagaagttgtggtgagtgccagtcacttgcatgttgagctgtttcacctgcaaaggaaaattatcattactaagaaggaggtccttcccagttggtggtcttgccctctctttattgagcacctactgtgtaaaagttagagttctgctgatgctggtatatgtggacacttcagcacctgtccatggaggcccaggaaattcagtggccctcaggtgactgaatttctttaaaagttgcggcattgctgggcatggtagttcacacctgtagtcccagttactcatgaggctgaggcgggaggattgcttgagtccaggagttcgagaccagcctgggtaacacagggagatcctgtctctta

SEQ ID NO: 459474 - DNA, 5588 bp, Homo sapiens
catggaagaaacatttctcgttagttcagcattggttttagttatgctgatttccgggacaggaaaaatgccttcctactcagaattaactttcatagagtagaaacaaaacctctgaatgtccgtgaaatagttttaacaagagtggatactgctcctttaaaccacatattttgactaaaagcttccttctgtaaaaaacccaaggcttgcatttagtcaccatgaagacaggcaaagctgaaagcattggagagaggggtggtttcgaggtctctgcaagtctagaaagtttcttctagaaaagaaaggctcacggaaaatgtaagatgcagagagaacttgtttatgcaagaggagatggccctggggcccctcgccccggatctactgctcatccaccccatgcgattccaaattccccaccgtctactccagtgccccattccatgcccccctccccgtccagaattccttatgggggcacccgctccatggttgttcctggcaatgccaccatccccagggacagaatctccagcctgccagtctccagacccatctctccaagcccaagcgccattttagaaagaagagatgtcaagcctgatgaagacatgagtggcaaaaacattgcaatgtacagaaatgagggtttctatgctgatccttacctttatcacgagggacggatgagcatagcctcatcccatggtggacacccactggatgtccccgaccacatcattgcatatcaccgcaccgccatccggtcagcgagtgcttattgtaacccctcaatgcaagcggaaatgcatatggaacaatcactgtacagacagaaatcaaggaaatatccggatagccatttgcctacactgggctccaaaacaccccctgcctctcctcacagagtcagtgacctgaggatgatagacatgcacgctcactataatgcccacggcccccctcacaccatgcagccagaccgggcctctccgagccgccaggcctttaaaaaggagccaggcaccttggtgtatatagaaaagccacggagcgctgcaggattatccagccttgtagacctcggccctcctctaatggagaagcaagtttttgcctacagcacggcgacaatacccaaagacagagagaccagagagaggatgcaagccatggagaaacagattgccagtttaactggccttgttcagtctgcgctttttaaagggcccattacaagttatagcaaagatgcgtctaggtaaaaaagaagaaagccaatgaaaaaaataattcaatctgtttctcttttaatcattaagataattcattcattcaaatctgttttcttgtaatcatttcaaggctgaaaatattcacatctctatggatcatgggcgttatttttttgttttggggggtttggttgctttttttctttcctccttctggtaattcttggtcgaaagtaacactttggcccaagaaggtaaatgggcttcccagtgcatgtggcttcatggaccactcaccgtgcagtgcctgcaaccaccacccttgcgtgtccacgtcgccatcatctgaaagtcacaagtgagcctggctgcattccacccccagtgtcaggtgcacacctgggaagccttttccatcctggccaattgtgatgctgatgctaaaataccttcattgcttaatcccatcactgccaattgcttcaaatagtggatggaatgggctttaaaaaaaaaaaaaaaggcattttggaaactgcatagctgactctctttttcttttattcagcgagaaaatgatgaaaaccacagccaacaggaaccacacagatagtgcaggaacgccccatgtgtctggtgggaagatgctcagtgctctggagtccacggtgcctcccagccagcctccacctgtgggcacctcagccatccacatgagcctgcttgagatgaggcggagcgtggcggaactcaggctccagctccagcagatgcggcagctccagctgcagaaccaggagttgctgagggcaatgatgaagaaggccgagctggaaatcagtggcaaagtgatggaaacaatgaagagactggaggatcccgtgcagcgcacgatggcgcgtcctagtggagcaagagagacaaaaatatcttcatgaggaagagaagatcgtcaagaagttgtgcgagttggaagactttgttgaagacttgaagaaggactccacggcagccagccgattggttactctgaaagacgtggaagacggggctttcctcctgcgtcaagtgggagaggctgtagctaccctgaaaggagaatttccaaccttacaaaacaagatgcgagccatcctgcgcatagaagtggaggccgtgcggtttctgaaggaggagccacacaagctggacagtctcctgaagcgtgtgcgcagcatgacagacgtcctgaccatgctgcggagacatgtcactgatgggctcctgaaaggcacggacgcagcccaagccgcacagtacatggctatggaaaaggccacagccgcagaagtcctgaagagtcaggaggaggcagcccacacctccggccagcccttccacagcacaggtgcccctggcgatgcgaagtcggaagtggtgcctttgtccggcatgatggttcgccacgcgcagagctcccctgtggtcatccagccctcccagcactccgtggccctgctgaaccctgctcagaacttgcctcacgtggccagctccccagccgtcccccaggaagcaacctccactctgcagatgtcgcaggctccgcagtccccacagatacccatgaatgggtctgccatgcagagcttgttcattgaagaaatccacagtgtgagtgccaagaacagggcagtgtctatcgagaaagcagaaaagaaatgggaggaaaaaaggcaaaatctggatcactataatgggaaagagtttgagaagctcctagaagaagctcaggccaatatcatgaagtcaataccaaatctggagatgccgccagccacaggcccactgccaaggggagatgccccagtggacaaggtggaactttcagaagattctccaaattcggaacaggacttggaaaagctggggggaaagtcgccccctcctcctccgccacctcctcgtcgaagctacctgccaggatcgggactcaccaccacgaggtcaggcgatgtggtctacaccggcagaaaggagaacatcaccgctaaggcaagcagtgaagatgctggaccaagcccacagaccagagctacaaaatatccagcagaggagcctgcttcagcctggaccccatccccaccgcctgtcaccacctcctcctcaaaggatgaggaggaagaagaagaagaaggagacaaaataatggcagaactccagggctccagcggggccccacagacgagcaggatgcctgtccccatgagtgccaagaacagacccggaaccctggacaaacccggcaagcagtccaaactgcaggatccccgccaatatcgtcaggctaatggaagtgctaagaaatctggtggggactttaagcctacttccccctccttacctgcttctaagattccagccctttctcccagctctgggaaaagcagttctctgccctcttctagtggtgacagctctaacctccctaatccacctgctactaaaccatcgattgcttctaaccctctcagcccccaaacaggaccacctgctcactctgcctccctcatcccttctgtctctaatggctctttgaagtttcagagcctcactcatacaggtaaaggtcaccatctttcattctcaccgcagagtcaaaatggccgagcaccccctcctttgtcattttcctcctcccctccttctcctgcctcctccgtctcactgaatcaaggtgccaagggcaccaggaccatccatactcccagcctcaccagctacaaggcacagaatggaagttcaagcaaagccaccccatccacagcaaaagaaacctcttaaaggtcaaatcctattaggcacaagtcggagttacatttaaaaaaaattaacagtctacaacaactgttttcacaagagaatgtaacatattgctgtatcgtttgaggcttaatgctaaatatgtgctaaatactggattaatagatttcagtaaagctcgttcgttttgtttggttttctttttacctagttgctatagtgtctacagtctatactcaatacctataaaatgcagtaagcatgtgttacagaaagaggttctggtgggagagaaaggtgcgtgtgagacaggagaattgtcttaagcatataaaacatgtatgattccagaattttagtatgttttgtataaaactatttttcattacggagactagaagtgaacagagaattacacaagtgtgactatacaaattgtaaaacagatactataatatttccttttattttagtgttatttagctttattacagatttctatttttgtcaaaacttcatggttcctttcaagatcttttttgccaaaacattttgatactatagcattgtacatttgaaagtagtgttctagactataaaaccaatgaacttctacatgagccctacagacaggcatgtgtagaaggcaatttatcaaacctattgcactgccatgaaaagtgtgtataataatttgctagcccaagcaagctagttttctttgcttgcttcttttctttcttttttccttccttttttttttttttttcttttttaacatgttgagattctctagttgttttctttggcgtatctaaccccttcttttgttttctgagacctggtaacccacgctcttgcattgtggattttaaaatgtatactctgtacggttctgtaaaccgaaaaacttttgtaaatatataaatatacatagacataaaaatactgtatgtgacagcacatagagtagttttcccacaccaaagttaatttttatgcatgctttaaaagtatatatcgggaccggcagaaatggaagtatccatacatttttaaaaagcaacaagtttgcacagctagagtgtttttgtaaataaatgtatttgtataacacagtcatgtaatatacagaactataagcagagactttgcaaaactaaataaagggctgcatgcttattattttttgtaccttgtcactataactacttcctagtcaaagaacgaaatgtaactgttaccgagttaaatgtttttccgctttgagggatgtaaccacatccactcagaggacactacttttctgaaagctctggggtgactaatgatgagttcctaataaattaattgcaagtgtggtgccttggatgtggcctgttggctcgctttcttctctgtggcttatcaaggtgtagatgacagaaagcaaacctggatacagagtttccaccctcagttcctggaggggctcttattattttctctctttttaaaaaacttccagtagaagtaaagtggaaataaaatgtctttatcacttgg

SEQ ID NO: 459475 - DNA, 5560 bp, Homo sapiens
aagcgaccagattgcccagcgcctggagaatgggctgcagccagagagagcataggaggatgttgttctctgtacactgtctctaaaaatggtgctttttggctgggcacggtggctcatgcctgtaatcccagcactttggaaggctgcggcgggcagatcacttgcggtcaggagttcgagacctgcctgatgatcatggagaaaccccatctctactaaaaattcaaaattagccgggtgtggtggtgtggtgggcacctgtaatcccagctacttgggaggctgaggcagaagaatcgtttgaacccgggaggcagaggttgcagtgaactgagatcgtgccattgcactccagcctgggcaacaagagtgaaactccatctcaaaaaaaacaaacaagcaaaaaaatgatgccttttagcaaaatagtgactgactggcttttaataccacaataaaaagacattagcaaaagtggtgtgagagcatgatcatgagtcctgtagagaaagtaaccaaaagtgatacatttctatgtggttccctcccagacaaaatgccaggctccacccactagttcaccctccctgttagcaatggctggtacgtgttcaggtttagattggtgccagacactttattttattgtctcaccgagtctccatgaccaacctacgagctatgagatattactaccccttttttggatagacacagaggtgaatagcttgcccatggacacacatctactaagtggtaaaactggaaatcgaacccaggcagtctttccccagaggccagttcatcaccatgcagtgctgatgttgggacctaatggtggttctgcttgtggcctgtgttgaaatgttttatctttattcagagaaaacagaaggcatgatgtggctttaagcaggtggtgacatggtcagattgcatttcccctcaatttacatggataatggacagttgacaaagacatcatcacccccatgagatgataaaccagtccatgaaaccggaaaacaggaaaccattgaaatttgttaaatgatatttcagtggaactttggggataatatactaggcataatatcattattgtgatggaggctgattgagtgaattcactcgatggagctgctgttagaaaattgtcctgctccagggactcaagtgctcaaccagactcctgcgaagcctgaataaagctcccacctcctatattctctgggatgagaaacaagaatgttctcggaactgtttggaaattgtgagttctgtatacaggtagcctacctccaatctagagaaattcataaattgccaaaagccctggactcatccagaatcattatcattgccaacattaaagtcctatgttttaagcatctgtgatttcatggtacttggtacatggaaccatgtgaacgaaaaggacacagatcctctttgaactgatactgacgtatttcatagccaaatcaccacgtgttgagttcccattctacaccatgcggtatttcatgtaaccctcaagaatggccaaggaaagtggattccccatcattagaggtaaggaaatgaagaccaagggagtctaaataatgggcccaaagtctcacagtgggctagagagagagtatgggattagacccaaagtcttcttggctccaaagcaggtgccctgtgctgctccctctaaagatacatcagtgagagtttacgcctgttgtccatgatgcattgaccagagtagaaaaaggatcctttgtcttgcaggcagtctggttgccagttggctgccaaaattcagatgttggtggaagaagccacattatgtacagtctttgctccctttcctttctcattgaaataagtaaagattcagccgcagggctgtctacccaaagtgctccgaagacttcaaggcattcactcgcctccatttcaggcaggcagagcccactgaggttgatttttttgtgttcacagctgcagaaccaggagttgctgagggcaatgatgaagaaggccgagctggaaatcagtggcaaagtgatggaaacaatgaagagactggaggatcccgtgcagcgcacgatggcgcgtcctagtggagcaagagagacaaaaatatcttcatgaggaagagaagatcgtcaagaagttgtgcgagttggaagactttgttgaagacttgaagaaggactccacggcagccagccgattggttactctgaaagacgtggaagacggggctttcctcctgcgtcaagtgggagaggctgtagctaccctgaaaggagaatttccaaccttacaaaacaagatgcgagccatcctgcgcatagaagtggaggccgtgcggtttctgaaggaggagccacacaagctggacagtctcctgaagcgtgtgcgcagcatgacagacgtcctgaccatgctgcggagacatgtcactgatgggctcctgaaaggcacggacgcagcccaagccgcacagtacatggctatggaaaaggccacagccgcagaagtcctgaagagtcaggaggaggcagcccacacctccggccagcccttccacagcacaggtgcccctggcgatgcgaagtcggaagtggtgcctttgtccggcatgatggttcgccacgcgcagagctcccctgtggtcatccagccctcccagcactccgtggccctgctgaaccctgctcagaacttgcctcacgtggccagctccccagccgtcccccaggaagcaacctccactctgcagatgtcgcaggctccgcagtccccacagatacccatgaatgggtctgccatgcagagcttgttcattgaagaaatccacagtgtgagtgccaagaacagggcagtgtctatcgagaaagcagaaaagaaatgggaggaaaaaaggcaaaatctggatcactataatgggaaagagtttgagaagctcctagaagaagctcaggccaatatcatgaagtcaataccaaatctggagatgccgccagccacaggcccactgccaaggggagatgccccagtggacaaggtggaactttcagaagattctccaaattcggaacaggacttggaaaagctggggggaaagtcgccccctcctcctccgccacctcctcgtcgaagctacctgccaggatcgggactcaccaccacgaggtcaggcgatgtggtctacaccggcagaaaggagaacatcaccgctaaggcaagcagtgaagatgctggaccaagcccacagaccagagctacaaaatatccagcagaggagcctgcttcagcctggaccccatccccaccgcctgtcaccacctcctcctcaaaggatgaggaggaagaagaagaagaaggagacaaaataatggcagaactccagggctccagcggggccccacagacgagcaggatgcctgtccccatgagtgccaagaacagacccggaaccctggacaaacccggcaagcagtccaaactgcaggatccccgccaatatcgtcaggctaatggaagtgctaagaaatctggtggggactttaagcctacttccccctccttacctgcttctaagattccagccctttctcccagctctgggaaaagcagttctctgccctcttctagtggtgacagctctaacctccctaatccacctgctactaaaccatcgattgcttctaaccctctcagcccccaaacaggaccacctgctcactctgcctccctcatcccttctgtctctaatggctctttgaagtttcagagcctcactcatacaggtaaaggtcaccatctttcattctcaccgcagagtcaaaatggccgagcaccccctcctttgtcattttcctcctcccctccttctcctgcctcctccgtctcactgaatcaaggtgccaagggcaccaggaccatccatactcccagcctcaccagctacaaggcacagaatggaagttcaagcaaagccaccccatccacagcaaaagaaacctcttaaaggtcaaatcctattaggcacaagtcggagttacatttaaaaaaaattaacagtctacaacaactgttttcacaagagaatgtaacatattgctgtatcgtttgaggcttaatgctaaatatgtgctaaatactggattaatagatttcagtaaagctcgttcgttttgtttggttttctttttacctagttgctatagtgtctacagtctatactcaatacctataaaatgcagtaagcatgtgttacagaaagaggttctggtgggagagaaaggtgcgtgtgagacaggagaattgtcttaagcatataaaacatgtatgattccagaattttagtatgttttgtataaaactatttttcattacggagactagaagtgaacagagaattacacaagtgtgactatacaaattgtaaaacagatactataatatttccttttattttagtgttatttagctttattacagatttctatttttgtcaaaacttcatggttcctttcaagatcttttttgccaaaacattttgatactatagcattgtacatttgaaagtagtgttctagactataaaaccaatgaacttctacatgagccctacagacaggcatgtgtagaaggcaatttatcaaacctattgcactgccatgaaaagtgtgtataataatttgctagcccaagcaagctagttttctttgcttgcttcttttctttcttttttccttccttttttttttttttttcttttttaacatgttgagattctctagttgttttctttggcgtatctaaccccttcttttgttttctgagacctggtaacccacgctcttgcattgtggattttaaaatgtatactctgtacggttctgtaaaccgaaaaacttttgtaaatatataaatatacatagacataaaaatactgtatgtgacagcacatagagtagttttcccacaccaaagttaatttttatgcatgctttaaaagtatatatcgggaccggcagaaatggaagtatccatacatttttaaaaagcaacaagtttgcacagctagagtgtttttgtaaataaatgtatttgtataacacagtcatgtaatatacagaactataagcagagactttgcaaaactaaataaagggctgcatgcttattattttttgtaccttgtcactataactacttcctagtcaaagaacgaaatgtaactgttaccgagttaaatgtttttccgctttgagggatgtaaccacatccactcagaggacactacttttctgaaagctctggggtgactaatgatgagttcctaataaattaattgcaagtgtggtgccttggatgtggcctgttggctcgctttcttctctgtggcttatcaaggtgtagatgacagaaagcaaacctggatacagagtttccaccctcagttcctggaggggctcttattattttctctctttttaaaaaacttccagtagaagtaaagtggaaataaaatgtctttatcacttgg

SEQ ID NO: 459476 - DNA, 4941 bp, Homo sapiens
catggaagaaacatttctcgttagttcagcattggttttagttatgctgatttccgggacaggaaaaatgccttcctactcagaattaactttcatagagtagaaacaaaacctctgaatgtccgtgaaatagttttaacaagagtggatactgctcctttaaaccacatattttgactaaaagcttccttctgtaaaaaacccaaggcttgcatttagtcaccatgaagacaggcaaagctgaaagcattggagagaggggtggtttcgaggtctctgcaagtctagaaagtttcttctagaaaagaaaggctcacggaaaatgtaagatgcagagagaacttgtttatgcaagaggagatggccctggggcccctcgccccggatctactgctcatccaccccatgcgattccaaattccccaccgtctactccagtgccccattccatgcccccctccccgtccagaattccttatgggggcacccgctccatggttgttcctggcaatgccaccatccccagggacagaatctccagcctgccagtctccagacccatctctccaagcccaagcgccattttagaaagaagagatgtcaagcctgatgaagacatgagtggcaaaaacattgcaatgtacagaaatgagggtttctatgctgatccttacctttatcacgagggacggatgagcatagcctcatcccatggtggacacccactggatgtccccgaccacatcattgcatatcaccgcaccgccatccggtcagcgagtgcttattgtaacccctcaatgcaagcggaaatgcatatggaacaatcactgtacagacagaaatcaaggaaatatccggatagccatttgcctacactgggctccaaaacaccccctgcctctcctcacagagtcagtgacctgaggatgatagacatgcacgctcactataatgcccacggcccccctcacaccatgcagccagaccgggcctctccgagccgccaggcctttaaaaaggagccaggcaccttggtgtatatagaaaagccacggagcgctgcaggattatccagccttgtagacctcggccctcctctaatggagaagcaagtttttgcctacagcacggcgacaatacccaaagacagagagaccagcgagaaaatgatgaaaaccacagccaacaggaaccacacagatagtgcaggaacgccccatgtgtctggtgggaagatgctcagtgctctggagtccacggtgcctcccagccagcctccacctgtgggcacctcagccatccacatgagcctgcttgagatgaggcggagcgtggcggaactcaggctccagctccagcagatgcggcagctccagctgcagaaccaggagttgctgagggcaatgatgaagaaggccgagctggaaatcagtggcaaagtgatggaaacaatgaagagactggaggatcccgtgcagcgcacgatggcgcgtcctagtggagcaagagagacaaaaatatcttcatgaggaagagaagatcgtcaagaagttgtgcgagttggaagactttgttgaagacttgaagaaggactccacggcagccagccgattggttactctgaaagacgtggaagacggggctttcctcctgcgtcaagtgggagaggctgtagctaccctgaaaggagaatttccaaccttacaaaacaagatgcgagccatcctgcgcatagaagtggaggccgtgcggtttctgaaggaggagccacacaagctggacagtctcctgaagcgtgtgcgcagcatgacagacgtcctgaccatgctgcggagacatgtcactgatgggctcctgaaaggcacggacgcagcccaagccgcacagtacatggctatggaaaaggccacagccgcagaagtcctgaagagtcaggaggaggcagcccacacctccggccagcccttccacagcacaggtgcccctggcgatgcgaagtcggaagtggtgcctttgtccggcatgatggttcgccacgcgcagagctcccctgtggtcatccagccctcccagcactccgtggccctgctgaaccctgctcagaacttgcctcacgtggccagctccccagccgtcccccaggaagcaacctccactctgcagatgtcgcaggctccgcagtccccacagatacccatgaatgggtctgccatgcagagcttgttcattgaagaaatccacagtgtgagtgccaagaacagggcagtgtctatcgagaaagcagaaaagaaatgggaggaaaaaaggcaaaatctggatcactataatgggaaagagtttgagaagctcctagaagaagctcaggccaatatcatgaagtcaataccaaatctggagatgccgccagccacaggcccactgccaaggggagatgccccagtggacaaggtggaactttcagaagattctccaaattcggaacaggacttggaaaagctggggggaaagtcgccccctcctcctccgccacctcctcgtcgaagctacctgccaggatcgggactcaccaccacgaggtcaggcgatgtggtctacaccggcagaaaggagaacatcaccgctaaggcaagcagtgaagatgctggaccaagcccacagaccagagctacaaaatatccagcagaggagcctgcttcagcctggaccccatccccaccgcctgtcaccacctcctcctcaaaggatgaggaggaagaagaagaagaaggagacaaaataatggcagaactccagggctccagcggggccccacagacgagcaggatgcctgtccccatgagtgccaagaacagacccggaaccctggacaaacccggcaagcagtccaaactgcaggatccccgccaatatcgtcaggctaatggaagtgctaagaaatctggtggggactttaagcctacttccccctccttacctgcttctaagattccagccctttctcccagctctgggaaaagcagttctctgccctcttctagtggtgacagctctaacctccctaatccacctgctactaaaccatcgattgcttctaaccctctcagcccccaaacaggaccacctgctcactctgcctccctcatcccttctgtctctaatggctctttgaagtttcagagcctcactcatacaggtaaaggtcaccatctttcattctcaccgcagagtcaaaatggccgagcaccccctcctttgtcattttcctcctcccctccttctcctgcctcctccgtctcactgaatcaaggtgccaagggcaccaggaccatccatactcccagcctcaccagctacaaggcacagaatggaagttcaagcaaagccaccccatccacagcaaaagaaacctcttaaaggtcaaatcctattaggcacaagtcggagttacatttaaaaaaaattaacagtctacaacaactgttttcacaagagaatgtaacatattgctgtatcgtttgaggcttaatgctaaatatgtgctaaatactggattaatagatttcagtaaagctcgttcgttttgtttggttttctttttacctagttgctatagtgtctacagtctatactcaatacctataaaatgcagtaagcatgtgttacagaaagaggttctggtgggagagaaaggtgcgtgtgagacaggagaattgtcttaagcatataaaacatgtatgattccagaattttagtatgttttgtataaaactatttttcattacggagactagaagtgaacagagaattacacaagtgtgactatacaaattgtaaaacagatactataatatttccttttattttagtgttatttagctttattacagatttctatttttgtcaaaacttcatggttcctttcaagatcttttttgccaaaacattttgatactatagcattgtacatttgaaagtagtgttctagactataaaaccaatgaacttctacatgagccctacagacaggcatgtgtagaaggcaatttatcaaacctattgcactgccatgaaaagtgtgtataataatttgctagcccaagcaagctagttttctttgcttgcttcttttctttcttttttccttccttttttttttttttttcttttttaacatgttgagattctctagttgttttctttggcgtatctaaccccttcttttgttttctgagacctggtaacccacgctcttgcattgtggattttaaaatgtatactctgtacggttctgtaaaccgaaaaacttttgtaaatatataaatatacatagacataaaaatactgtatgtgacagcacatagagtagttttcccacaccaaagttaatttttatgcatgctttaaaagtatatatcgggaccggcagaaatggaagtatccatacatttttaaaaagcaacaagtttgcacagctagagtgtttttgtaaataaatgtatttgtataacacagtcatgtaatatacagaactataagcagagactttgcaaaactaaataaagggctgcatgcttattattttttgtaccttgtcactataactacttcctagtcaaagaacgaaatgtaactgttaccgagttaaatgtttttccgctttgagggatgtaaccacatccactcagaggacactacttttctgaaagctctggggtgactaatgatgagttcctaataaattaattgcaagtgtggtgccttggatgtggcctgttggctcgctttcttctctgtggcttatcaaggtgtagatgacagaaagcaaacctggatacagagtttccaccctcagttcctggaggggctcttattattttctctctttttaaaaaacttccagtagaagtaaagtggaaataaaatgtctttatcacttgg

SEQ ID NO: 459477 - DNA, 5492 bp, Homo sapiens
ctgggtaatacgaaatggtctttattggttgtgaacactcgagctgagaaacattttaggatctttgtgtcttttgtgatgattttgtttctgaagaggaagctgtctaaaatattcaagtgtgcaaccaaggatttagatgaagccagcaaacaaaggaatcatgtaatcaggacctgagcgaatgtgcttactcacggcgttagttacacaggtgatttccttaagaaaaaatgcagagagaacttgtttatgcaagaggagatggccctggggcccctcgccccggatctactgctcatccaccccatgcgattccaaattccccaccgtctactccagtgccccattccatgcccccctccccgtccagaattccttatgggggcacccgctccatggttgttcctggcaatgccaccatccccagggacagaatctccagcctgccagtctccagacccatctctccaagcccaagcgccattttagaaagaagagatgtcaagcctgatgaagacatgagtggcaaaaacattgcaatgtacagaaatgagggtttctatgctgatccttacctttatcacgagggacggatgagcatagcctcatcccatggtggacacccactggatgtccccgaccacatcattgcatatcaccgcaccgccatccggtcagcgagtgcttattgtaacccctcaatgcaagcggaaatgcatatggaacaatcactgtacagacagaaatcaaggaaatatccggatagccatttgcctacactgggctccaaaacaccccctgcctctcctcacagagtcagtgacctgaggatgatagacatgcacgctcactataatgcccacggcccccctcacaccatgcagccagaccgggcctctccgagccgccaggcctttaaaaaggagccaggcaccttggtgtatatagaaaagccacggagcgctgcaggattatccagccttgtagacctcggccctcctctaatggagaagcaagtttttgcctacagcacggcgacaatacccaaagacagagagaccagagagaggatgcaagccatggagaaacagattgccagtttaactggccttgttcagtctgcgctttttaaagggcccattacaagttatagcaaagatgcgtctaggtaaaaaagaagaaagccaatgaaaaaaataattcaatctgtttctcttttaatcattaagataattcattcattcaaatctgttttcttgtaatcatttcaaggctgaaaatattcacatctctatggatcatgggcgttatttttttgttttggggggtttggttgctttttttctttcctccttctggtaattcttggtcgaaagtaacactttggcccaagaaggtaaatgggcttcccagtgcatgtggcttcatggaccactcaccgtgcagtgcctgcaaccaccacccttgcgtgtccacgtcgccatcatctgaaagtcacaagtgagcctggctgcattccacccccagtgtcaggtgcacacctgggaagccttttccatcctggccaattgtgatgctgatgctaaaataccttcattgcttaatcccatcactgccaattgcttcaaatagtggatggaatgggctttaaaaaaaaaaaaaaaggcattttggaaactgcatagctgactctctttttcttttattcagcgagaaaatgatgaaaaccacagccaacaggaaccacacagatagtgcaggaacgccccatgtgtctggtgggaagatgctcagtgctctggagtccacggtgcctcccagccagcctccacctgtgggcacctcagccatccacatgagcctgcttgagatgaggcggagcgtggcggaactcaggctccagctccagcagatgcggcagctccagctgcagaaccaggagttgctgagggcaatgatgaagaaggccgagctggaaatcagtggcaaagtgatggaaacaatgaagagactggaggatcccgtgcagcgcacgatggcgcgtcctagtggagcaagagagacaaaaatatcttcatgaggaagagaagatcgtcaagaagttgtgcgagttggaagactttgttgaagacttgaagaaggactccacggcagccagccgattggttactctgaaagacgtggaagacggggctttcctcctgcgtcaagtgggagaggctgtagctaccctgaaaggagaatttccaaccttacaaaacaagatgcgagccatcctgcgcatagaagtggaggccgtgcggtttctgaaggaggagccacacaagctggacagtctcctgaagcgtgtgcgcagcatgacagacgtcctgaccatgctgcggagacatgtcactgatgggctcctgaaaggcacggacgcagcccaagccgcacagtacatggctatggaaaaggccacagccgcagaagtcctgaagagtcaggaggaggcagcccacacctccggccagcccttccacagcacaggtgcccctggcgatgcgaagtcggaagtggtgcctttgtccggcatgatggttcgccacgcgcagagctcccctgtggtcatccagccctcccagcactccgtggccctgctgaaccctgctcagaacttgcctcacgtggccagctccccagccgtcccccaggaagcaacctccactctgcagatgtcgcaggctccgcagtccccacagatacccatgaatgggtctgccatgcagagcttgttcattgaagaaatccacagtgtgagtgccaagaacagggcagtgtctatcgagaaagcagaaaagaaatgggaggaaaaaaggcaaaatctggatcactataatgggaaagagtttgagaagctcctagaagaagctcaggccaatatcatgaagtcaataccaaatctggagatgccgccagccacaggcccactgccaaggggagatgccccagtggacaaggtggaactttcagaagattctccaaattcggaacaggacttggaaaagctggggggaaagtcgccccctcctcctccgccacctcctcgtcgaagctacctgccaggatcgggactcaccaccacgaggtcaggcgatgtggtctacaccggcagaaaggagaacatcaccgctaaggcaagcagtgaagatgctggaccaagcccacagaccagagctacaaaatatccagcagaggagcctgcttcagcctggaccccatccccaccgcctgtcaccacctcctcctcaaaggatgaggaggaagaagaagaagaaggagacaaaataatggcagaactccagggctccagcggggccccacagacgagcaggatgcctgtccccatgagtgccaagaacagacccggaaccctggacaaacccggcaagcagtccaaactgcaggatccccgccaatatcgtcaggctaatggaagtgctaagaaatctggtggggactttaagcctacttccccctccttacctgcttctaagattccagccctttctcccagctctgggaaaagcagttctctgccctcttctagtggtgacagctctaacctccctaatccacctgctactaaaccatcgattgcttctaaccctctcagcccccaaacaggaccacctgctcactctgcctccctcatcccttctgtctctaatggctctttgaagtttcagagcctcactcatacaggtaaaggtcaccatctttcattctcaccgcagagtcaaaatggccgagcaccccctcctttgtcattttcctcctcccctccttctcctgcctcctccgtctcactgaatcaaggtgccaagggcaccaggaccatccatactcccagcctcaccagctacaaggcacagaatggaagttcaagcaaagccaccccatccacagcaaaagaaacctcttaaaggtcaaatcctattaggcacaagtcggagttacatttaaaaaaaattaacagtctacaacaactgttttcacaagagaatgtaacatattgctgtatcgtttgaggcttaatgctaaatatgtgctaaatactggattaatagatttcagtaaagctcgttcgttttgtttggttttctttttacctagttgctatagtgtctacagtctatactcaatacctataaaatgcagtaagcatgtgttacagaaagaggttctggtgggagagaaaggtgcgtgtgagacaggagaattgtcttaagcatataaaacatgtatgattccagaattttagtatgttttgtataaaactatttttcattacggagactagaagtgaacagagaattacacaagtgtgactatacaaattgtaaaacagatactataatatttccttttattttagtgttatttagctttattacagatttctatttttgtcaaaacttcatggttcctttcaagatcttttttgccaaaacattttgatactatagcattgtacatttgaaagtagtgttctagactataaaaccaatgaacttctacatgagccctacagacaggcatgtgtagaaggcaatttatcaaacctattgcactgccatgaaaagtgtgtataataatttgctagcccaagcaagctagttttctttgcttgcttcttttctttcttttttccttccttttttttttttttttcttttttaacatgttgagattctctagttgttttctttggcgtatctaaccccttcttttgttttctgagacctggtaacccacgctcttgcattgtggattttaaaatgtatactctgtacggttctgtaaaccgaaaaacttttgtaaatatataaatatacatagacataaaaatactgtatgtgacagcacatagagtagttttcccacaccaaagttaatttttatgcatgctttaaaagtatatatcgggaccggcagaaatggaagtatccatacatttttaaaaagcaacaagtttgcacagctagagtgtttttgtaaataaatgtatttgtataacacagtcatgtaatatacagaactataagcagagactttgcaaaactaaataaagggctgcatgcttattattttttgtaccttgtcactataactacttcctagtcaaagaacgaaatgtaactgttaccgagttaaatgtttttccgctttgagggatgtaaccacatccactcagaggacactacttttctgaaagctctggggtgactaatgatgagttcctaataaattaattgcaagtgtggtgccttggatgtggcctgttggctcgctttcttctctgtggcttatcaaggtgtagatgacagaaagcaaacctggatacagagtttccaccctcagttcctggaggggctcttattattttctctctttttaaaaaacttccagtagaagtaaagtggaaataaaatgtctttatcacttgg

SEQ ID NO: 459478 - DNA, 4546 bp, Homo sapiens
tgggtgaacttccacggccttctaggtggtaccttttataaccctcaggtggtgcattcacccggacaaactggtttgaaagtccataaagctttaacaaacaattctcttgttttacagagagaggatgcaagccatggagaaacagattgccagtttaactggccttgttcagtctgcgctttttaaagggcccattacaagttatagcaaagatgcgtctaggtaaaaaagaagaaagccaatgaaaaaaataattcaatctgtttctcttttaatcattaagataattcattcattcaaatctgttttcttgtaatcatttcaaggctgaaaatattcacatctctatggatcatgggcgttatttttttgttttggggggtttggttgctttttttctttcctccttctggtaattcttggtcgaaagtaacactttggcccaagaaggtaaatgggcttcccagtgcatgtggcttcatggaccactcaccgtgcagtgcctgcaaccaccacccttgcgtgtccacgtcgccatcatctgaaagtcacaagtgagcctggctgcattccacccccagtgtcaggtgcacacctgggaagccttttccatcctggccaattgtgatgctgatgctaaaataccttcattgcttaatcccatcactgccaattgcttcaaatagtggatggaatgggctttaaaaaaaaaaaaaaaggcattttggaaactgcatagctgactctctttttcttttattcagcgagaaaatgatgaaaaccacagccaacaggaaccacacagatagtgcaggaacgccccatgtgtctggtgggaagatgctcagtgctctggagtccacggtgcctcccagccagcctccacctgtgggcacctcagccatccacatgagcctgcttgagatgaggcggagcgtggcggaactcaggctccagctccagcagatgcggcagctccagctgcagaaccaggagttgctgagggcaatgatgaagaaggccgagctggaaatcagtggcaaagtgatggaaacaatgaagagactggaggatcccgtgcagcgcacgatggcgcgtcctagtggagcaagagagacaaaaatatcttcatgaggaagagaagatcgtcaagaagttgtgcgagttggaagactttgttgaagacttgaagaaggactccacggcagccagccgattggttactctgaaagacgtggaagacggggctttcctcctgcgtcaagtgggagaggctgtagctaccctgaaaggagaatttccaaccttacaaaacaagatgcgagccatcctgcgcatagaagtggaggccgtgcggtttctgaaggaggagccacacaagctggacagtctcctgaagcgtgtgcgcagcatgacagacgtcctgaccatgctgcggagacatgtcactgatgggctcctgaaaggcacggacgcagcccaagccgcacagtacatggctatggaaaaggccacagccgcagaagtcctgaagagtcaggaggaggcagcccacacctccggccagcccttccacagcacaggtgcccctggcgatgcgaagtcggaagtggtgcctttgtccggcatgatggttcgccacgcgcagagctcccctgtggtcatccagccctcccagcactccgtggccctgctgaaccctgctcagaacttgcctcacgtggccagctccccagccgtcccccaggaagcaacctccactctgcagatgtcgcaggctccgcagtccccacagatacccatgaatgggtctgccatgcagagcttgttcattgaagaaatccacagtgtgagtgccaagaacagggcagtgtctatcgagaaagcagaaaagaaatgggaggaaaaaaggcaaaatctggatcactataatgggaaagagtttgagaagctcctagaagaagctcaggccaatatcatgaagtcaataccaaatctggagatgccgccagccacaggcccactgccaaggggagatgccccagtggacaaggtggaactttcagaagattctccaaattcggaacaggacttggaaaagctggggggaaagtcgccccctcctcctccgccacctcctcgtcgaagctacctgccaggatcgggactcaccaccacgaggtcaggcgatgtggtctacaccggcagaaaggagaacatcaccgctaaggcaagcagtgaagatgctggaccaagcccacagaccagagctacaaaatatccagcagaggagcctgcttcagcctggaccccatccccaccgcctgtcaccacctcctcctcaaaggatgaggaggaagaagaagaagaaggagacaaaataatggcagaactccagggctccagcggggccccacagacgagcaggatgcctgtccccatgagtgccaagaacagacccggaaccctggacaaacccggcaagcagtccaaactgcaggatccccgccaatatcgtcaggctaatggaagtgctaagaaatctggtggggactttaagcctacttccccctccttacctgcttctaagattccagccctttctcccagctctgggaaaagcagttctctgccctcttctagtggtgacagctctaacctccctaatccacctgctactaaaccatcgattgcttctaaccctctcagcccccaaacaggaccacctgctcactctgcctccctcatcccttctgtctctaatggctctttgaagtttcagagcctcactcatacaggtaaaggtcaccatctttcattctcaccgcagagtcaaaatggccgagcaccccctcctttgtcattttcctcctcccctccttctcctgcctcctccgtctcactgaatcaaggtgccaagggcaccaggaccatccatactcccagcctcaccagctacaaggcacagaatggaagttcaagcaaagccaccccatccacagcaaaagaaacctcttaaaggtcaaatcctattaggcacaagtcggagttacatttaaaaaaaattaacagtctacaacaactgttttcacaagagaatgtaacatattgctgtatcgtttgaggcttaatgctaaatatgtgctaaatactggattaatagatttcagtaaagctcgttcgttttgtttggttttctttttacctagttgctatagtgtctacagtctatactcaatacctataaaatgcagtaagcatgtgttacagaaagaggttctggtgggagagaaaggtgcgtgtgagacaggagaattgtcttaagcatataaaacatgtatgattccagaattttagtatgttttgtataaaactatttttcattacggagactagaagtgaacagagaattacacaagtgtgactatacaaattgtaaaacagatactataatatttccttttattttagtgttatttagctttattacagatttctatttttgtcaaaacttcatggttcctttcaagatcttttttgccaaaacattttgatactatagcattgtacatttgaaagtagtgttctagactataaaaccaatgaacttctacatgagccctacagacaggcatgtgtagaaggcaatttatcaaacctattgcactgccatgaaaagtgtgtataataatttgctagcccaagcaagctagttttctttgcttgcttcttttctttcttttttccttccttttttttttttttttcttttttaacatgttgagattctctagttgttttctttggcgtatctaaccccttcttttgttttctgagacctggtaacccacgctcttgcattgtggattttaaaatgtatactctgtacggttctgtaaaccgaaaaacttttgtaaatatataaatatacatagacataaaaatactgtatgtgacagcacatagagtagttttcccacaccaaagttaatttttatgcatgctttaaaagtatatatcgggaccggcagaaatggaagtatccatacatttttaaaaagcaacaagtttgcacagctagagtgtttttgtaaataaatgtatttgtataacacagtcatgtaatatacagaactataagcagagactttgcaaaactaaataaagggctgcatgcttattattttttgtaccttgtcactataactacttcctagtcaaagaacgaaatgtaactgttaccgagttaaatgtttttccgctttgagggatgtaaccacatccactcagaggacactacttttctgaaagctctggggtgactaatgatgagttcctaataaattaattgcaagtgtggtgccttggatgtggcctgttggctcgctttcttctctgtggcttatcaaggtgtagatgacagaaagcaaacctggatacagagtttccaccctcagttcctggaggggctcttattattttctctctttttaaaaaacttccagtagaagtaaagtggaaataaaatgtctttatcacttgg

SEQ ID NO: 459479 - DNA, 4743 bp, Homo sapiens
agtttcccgtgggtgtgttcacagaacactgggcccctttccatagttcacagacgtggacaatgagcagatgaggctttctccctctggtcctgaagtagcatcatttcatctgaaatggccacaagcaattttggtttatttttcataacagaatcaaagacatcaccaaaaactccatcccacttcttgcaggggaggaatttgttattttcccttggatcctgttgaacacatgtggcatcctgcctgaacccctcccgcagctgccatgcgatccagagctccatccacttgcccacctaagtggaaagggccttcgagggccatcagtttgcagacgacactgtgcattcctttttctctttcggacgctggctccacaatccgggctccaggaggtggaatcgctgttcacttactgccccctagtggtccgcatttctgaaagttctttatccctgtttcctttgagatttttctccgtagatttataggtgtttaggatggggttagtaatgtggccaaggaggtggttgttttctcaagggtgagacctcgtctccgatctccgtctcttggagctagcattcccctctatccacagacaccacgtctgtcgtcatttttattttctgcaatcatttcttctcttggtagcttggagaagagttcatccttgttgatgagacaatcagtataaaccagaggttctcatttaggggcaattttgctcccccttccccagggacattggacaatgtctgggtctggagacattctggtttgtcacaagctggggtaggcaaggtttctactggcatccagtagatgaaggccaggggcgctgctaaacatcgtaccgtgcagtttccccacaccacagcgaagaattacacagcccaaaatgtcaaatgctgaagttgaaaagcctgatattaaccactgtgggcttcttgttttactgcaccgcaggtcggtctccctctctctctctttctctctttctccctctctctcctaccccaccctcccacctatccctccttctgtccctctgttggcatcagcaccactgaataaaaagactcggtcctctgttagccaggcacaatcgtccctttggccaatgtagaacattccctggaaaaccctccttgtacctgcctcacaccactgcaaaatgttcccagccactgttaaaagatgagcgacccccctccaccaccaccacacgaaaggcaggggggaggagctggggctctacacaaaatcagaggctgagacgggcactcggcccctcctcttcctctgtgaggcctcgtgttcagctctatgtgctggtgtccttgctcccgcagcgagttggaagactttgttgaagacttgaagaaggactccacggcagccagccgattggttactctgaaagacgtggaagacggggctttcctcctgcgtcaagtgggagaggctgtagctaccctgaaaggagaatttccaaccttacaaaacaagatgcgagccatcctgcgcatagaagtggaggccgtgcggtttctgaaggaggagccacacaagctggacagtctcctgaagcgtgtgcgcagcatgacagacgtcctgaccatgctgcggagacatgtcactgatgggctcctgaaaggcacggacgcagcccaagccgcacagtacatggctatggaaaaggccacagccgcagaagtcctgaagagtcaggaggaggcagcccacacctccggccagcccttccacagcacaggtgcccctggcgatgcgaagtcggaagtggtgcctttgtccggcatgatggttcgccacgcgcagagctcccctgtggtcatccagccctcccagcactccgtggccctgctgaaccctgctcagaacttgcctcacgtggccagctccccagccgtcccccaggaagcaacctccactctgcagatgtcgcaggctccgcagtccccacagatacccatgaatgggtctgccatgcagagcttgttcattgaagaaatccacagtgtgagtgccaagaacagggcagtgtctatcgagaaagcagaaaagaaatgggaggaaaaaaggcaaaatctggatcactataatgggaaagagtttgagaagctcctagaagaagctcaggccaatatcatgaagtcaataccaaatctggagatgccgccagccacaggcccactgccaaggggagatgccccagtggacaaggtggaactttcagaagattctccaaattcggaacaggacttggaaaagctggggggaaagtcgccccctcctcctccgccacctcctcgtcgaagctacctgccaggatcgggactcaccaccacgaggtcaggcgatgtggtctacaccggcagaaaggagaacatcaccgctaaggcaagcagtgaagatgctggaccaagcccacagaccagagctacaaaatatccagcagaggagcctgcttcagcctggaccccatccccaccgcctgtcaccacctcctcctcaaaggatgaggaggaagaagaagaagaaggagacaaaataatggcagaactccagggctccagcggggccccacagacgagcaggatgcctgtccccatgagtgccaagaacagacccggaaccctggacaaacccggcaagcagtccaaactgcaggatccccgccaatatcgtcaggctaatggaagtgctaagaaatctggtggggactttaagcctacttccccctccttacctgcttctaagattccagccctttctcccagctctgggaaaagcagttctctgccctcttctagtggtgacagctctaacctccctaatccacctgctactaaaccatcgattgcttctaaccctctcagcccccaaacaggaccacctgctcactctgcctccctcatcccttctgtctctaatggctctttgaagtttcagagcctcactcatacaggtaaaggtcaccatctttcattctcaccgcagagtcaaaatggccgagcaccccctcctttgtcattttcctcctcccctccttctcctgcctcctccgtctcactgaatcaaggtgccaagggcaccaggaccatccatactcccagcctcaccagctacaaggcacagaatggaagttcaagcaaagccaccccatccacagcaaaagaaacctcttaaaggtcaaatcctattaggcacaagtcggagttacatttaaaaaaaattaacagtctacaacaactgttttcacaagagaatgtaacatattgctgtatcgtttgaggcttaatgctaaatatgtgctaaatactggattaatagatttcagtaaagctcgttcgttttgtttggttttctttttacctagttgctatagtgtctacagtctatactcaatacctataaaatgcagtaagcatgtgttacagaaagaggttctggtgggagagaaaggtgcgtgtgagacaggagaattgtcttaagcatataaaacatgtatgattccagaattttagtatgttttgtataaaactatttttcattacggagactagaagtgaacagagaattacacaagtgtgactatacaaattgtaaaacagatactataatatttccttttattttagtgttatttagctttattacagatttctatttttgtcaaaacttcatggttcctttcaagatcttttttgccaaaacattttgatactatagcattgtacatttgaaagtagtgttctagactataaaaccaatgaacttctacatgagccctacagacaggcatgtgtagaaggcaatttatcaaacctattgcactgccatgaaaagtgtgtataataatttgctagcccaagcaagctagttttctttgcttgcttcttttctttcttttttccttccttttttttttttttttcttttttaacatgttgagattctctagttgttttctttggcgtatctaaccccttcttttgttttctgagacctggtaacccacgctcttgcattgtggattttaaaatgtatactctgtacggttctgtaaaccgaaaaacttttgtaaatatataaatatacatagacataaaaatactgtatgtgacagcacatagagtagttttcccacaccaaagttaatttttatgcatgctttaaaagtatatatcgggaccggcagaaatggaagtatccatacatttttaaaaagcaacaagtttgcacagctagagtgtttttgtaaataaatgtatttgtataacacagtcatgtaatatacagaactataagcagagactttgcaaaactaaataaagggctgcatgcttattattttttgtaccttgtcactataactacttcctagtcaaagaacgaaatgtaactgttaccgagttaaatgtttttccgctttgagggatgtaaccacatccactcagaggacactacttttctgaaagctctggggtgactaatgatgagttcctaataaattaattgcaagtgtggtgccttggatgtggcctgttggctcgctttcttctctgtggcttatcaaggtgtagatgacagaaagcaaacctggatacagagtttccaccctcagttcctggaggggctcttattattttctctctttttaaaaaacttccagtagaagtaaagtggaaataaaatgtctttatcacttgg

SEQ ID NO: 459480 - DNA, 3573 bp, Homo sapiens
tcatgccactgcactccagcctggatgacagagtgagaccctgtcagccagtcaaattaaaaagtaataataataaccctaatggtcaattggctttatcccaaatacacagacaggaaacaggcctagaggagctttacccttgcccaaggtgagtttctccaatgctcctctgtgctcttaacccactgccacctgaagatgtgtgagccaccctgtggcttgtgaactctgcacttctctgtccagtatcggagtgcgggatgagggttgtcgttctggctttttctcctccaattcacctgctggtttgggcctgcaggagaatttccaaccttacaaaacaagatgcgagccatcctgcgcatagaagtggaggccgtgcggtttctgaaggaggagccacacaagctggacagtctcctgaagcgtgtgcgcagcatgacagacgtcctgaccatgctgcggagacatgtcactgatgggctcctgaaaggcacggacgcagcccaagccgcacagtacatggctatggaaaaggccacagccgcagaagtcctgaagagtcaggaggaggcagcccacacctccggccagcccttccacagcacaggtgcccctggcgatgcgaagtcggaagtggtgcctttgtccggcatgatggttcgccacgcgcagagctcccctgtggtcatccagccctcccagcactccgtggccctgctgaaccctgctcagaacttgcctcacgtggccagctccccagccgtcccccaggaagcaacctccactctgcagatgtcgcaggctccgcagtccccacagatacccatgaatgggtctgccatgcagagcttgttcattgaagaaatccacagtgtgagtgccaagaacagggcagtgtctatcgagaaagcagaaaagaaatgggaggaaaaaaggcaaaatctggatcactataatgggaaagagtttgagaagctcctagaagaagctcaggccaatatcatgaagtcaataccaaatctggagatgccgccagccacaggcccactgccaaggggagatgccccagtggacaaggtggaactttcagaagattctccaaattcggaacaggacttggaaaagctggggggaaagtcgccccctcctcctccgccacctcctcgtcgaagctacctgccaggatcgggactcaccaccacgaggtcaggcgatgtggtctacaccggcagaaaggagaacatcaccgctaaggcaagcagtgaagatgctggaccaagcccacagaccagagctacaaaatatccagcagaggagcctgcttcagcctggaccccatccccaccgcctgtcaccacctcctcctcaaaggatgaggaggaagaagaagaagaaggagacaaaataatggcagaactccagggctccagcggggccccacagacgagcaggatgcctgtccccatgagtgccaagaacagacccggaaccctggacaaacccggcaagcagtccaaactgcaggatccccgccaatatcgtcaggctaatggaagtgctaagaaatctggtggggactttaagcctacttccccctccttacctgcttctaagattccagccctttctcccagctctgggaaaagcagttctctgccctcttctagtggtgacagctctaacctccctaatccacctgctactaaaccatcgattgcttctaaccctctcagcccccaaacaggaccacctgctcactctgcctccctcatcccttctgtctctaatggctctttgaagtttcagagcctcactcatacaggtaaaggtcaccatctttcattctcaccgcagagtcaaaatggccgagcaccccctcctttgtcattttcctcctcccctccttctcctgcctcctccgtctcactgaatcaaggtgccaagggcaccaggaccatccatactcccagcctcaccagctacaaggcacagaatggaagttcaagcaaagccaccccatccacagcaaaagaaacctcttaaaggtcaaatcctattaggcacaagtcggagttacatttaaaaaaaattaacagtctacaacaactgttttcacaagagaatgtaacatattgctgtatcgtttgaggcttaatgctaaatatgtgctaaatactggattaatagatttcagtaaagctcgttcgttttgtttggttttctttttacctagttgctatagtgtctacagtctatactcaatacctataaaatgcagtaagcatgtgttacagaaagaggttctggtgggagagaaaggtgcgtgtgagacaggagaattgtcttaagcatataaaacatgtatgattccagaattttagtatgttttgtataaaactatttttcattacggagactagaagtgaacagagaattacacaagtgtgactatacaaattgtaaaacagatactataatatttccttttattttagtgttatttagctttattacagatttctatttttgtcaaaacttcatggttcctttcaagatcttttttgccaaaacattttgatactatagcattgtacatttgaaagtagtgttctagactataaaaccaatgaacttctacatgagccctacagacaggcatgtgtagaaggcaatttatcaaacctattgcactgccatgaaaagtgtgtataataatttgctagcccaagcaagctagttttctttgcttgcttcttttctttcttttttccttccttttttttttttttttcttttttaacatgttgagattctctagttgttttctttggcgtatctaaccccttcttttgttttctgagacctggtaacccacgctcttgcattgtggattttaaaatgtatactctgtacggttctgtaaaccgaaaaacttttgtaaatatataaatatacatagacataaaaatactgtatgtgacagcacatagagtagttttcccacaccaaagttaatttttatgcatgctttaaaagtatatatcgggaccggcagaaatggaagtatccatacatttttaaaaagcaacaagtttgcacagctagagtgtttttgtaaataaatgtatttgtataacacagtcatgtaatatacagaactataagcagagactttgcaaaactaaataaagggctgcatgcttattattttttgtaccttgtcactataactacttcctagtcaaagaacgaaatgtaactgttaccgagttaaatgtttttccgctttgagggatgtaaccacatccactcagaggacactacttttctgaaagctctggggtgactaatgatgagttcctaataaattaattgcaagtgtggtgccttggatgtggcctgttggctcgctttcttctctgtggcttatcaaggtgtagatgacagaaagcaaacctggatacagagtttccaccctcagttcctggaggggctcttattattttctctctttttaaaaaacttccagtagaagtaaagtggaaataaaatgtctttatcacttgg

SEQ ID NO: 459481 - DNA, 6311 bp, Homo sapiens
catggaagaaacatttctcgttagttcagcattggttttagttatgctgatttccgggacaggaaaaatgccttcctactcagaattaactttcatagagtagaaacaaaacctctgaatgtccgtgaaatagttttaacaagagtggatactgctcctttaaaccacatattttgactaaaagcttccttctgtaaaaaacccaaggcttgcatttagtcaccatgaagacaggcaaagctgaaagcattggagagaggggtggtttcgaggtctctgcaagtctagaaagtttcttctagaaaagaaaggctcacggaaaatgtaagatgcagagagaacttgtttatgcaagaggagatggccctggggcccctcgccccggatctactgctcatccaccccatgcgattccaaattccccaccgtctactccagtgccccattccatgcccccctccccgtccagaattccttatgggggcacccgctccatggttgttcctggcaatgccaccatccccagggacagaatctccagcctgccagtctccagacccatctctccaagcccaagcgccattttagaaagaagagatgtcaagcctgatgaagacatgagtggcaaaaacattgcaatgtacagaaatgagggtttctatgctgatccttacctttatcacgagggacggatgagcatagcctcatcccatggtggacacccactggatgtccccgaccacatcattgcatatcaccgcaccgccatccggtcagcgagtgcttattgtaacccctcaatgcaagcggaaatgcatatggaacaatcactgtacagacagaaatcaaggaaatatccggatagccatttgcctacactgggctccaaaacaccccctgcctctcctcacagagtcagtgacctgaggatgatagacatgcacgctcactataatgcccacggcccccctcacaccatgcagccagaccgggcctctccgagccgccaggcctttaaaaaggagccaggcaccttggtgtatatagaaaagccacggagcgctgcaggattatccagccttgtagacctcggccctcctctaatggagaagcaagtttttgcctacagcacggcgacaatacccaaagacagagagaccagagagaggatgcaagccatggagaaacagattgccagtttaactggccttgttcagtctgcgctttttaaagggcccattacaagttatagcaaagatgcgtctaggtaaaaaagaagaaagccaatgaaaaaaataattcaatctgtttctcttttaatcattaagataattcattcattcaaatctgttttcttgtaatcatttcaaggctgaaaatattcacatctctatggatcatgggcgttatttttttgttttggggggtttggttgctttttttctttcctccttctggtaattcttggtcgaaagtaacactttggcccaagaaggtaaatgggcttcccagtgcatgtggcttcatggaccactcaccgtgcagtgcctgcaaccaccacccttgcgtgtccacgtcgccatcatctgaaagtcacaagtgagcctggctgcattccacccccagtgtcaggtgcacacctgggaagccttttccatcctggccaattgtgatgctgatgctaaaataccttcattgcttaatcccatcactgccaattgcttcaaatagtggatggaatgggctttaaaaaaaaaaaaaaaggcattttggaaactgcatagctgactctctttttcttttattcagcgagaaaatgatgaaaaccacagccaacaggaaccacacagatagtgcaggaacgccccatgtgtctggtgggaagatgctcagtgctctggagtccacggtgcctcccagccagcctccacctgtgggcacctcagccatccacatgagcctgcttgagatgaggcggagcgtggcggaactcaggctccagctccagcagatgcggcagctccagctgcagaaccaggagttgctgagggcaatgatgaagaaggccgagctggaaatcagtggcaaagtgatggaaacaatgaagagactggaggatcccgtgcagcgcacgatggcgcgtcctagtggagcaagagagacaaaaatatcttcatgaggaagagaagatcgtcaagaagttgtgcgagttggaagactttgttgaagacttgaagaaggactccacggcagccagccgattggttactctgaaagacgtggaagacggggctttcctcctgcgtcaagtgggagaggctgtagctaccctgaaaggagaatttccaaccttacaaaacaagatgcgagccatcctgcgcatagaagtggaggccgtgcggtttctgaaggaggagccacacaagctggacagtctcctgaagcgtgtgcgcagcatgacagacgtcctgaccatgctgcggagacatgtcactgatgggctcctgaaaggcacggacgcagcccaagccgcacagtacatggctatggaaaaggccacagccgcagaagtcctgaagagtcaggaggaggcagcccacacctccggccagcccttccacagcacaggtgcccctggcgatgcgaagtcggaagtggtgcctttgtccggcatgatggttcgccacgcgcagagctcccctgtggtcatccagccctcccagcactccgtggccctgctgaaccctgctcagaacttgcctcacgtggccagctccccagccgtcccccaggaagcaacctccactctgcagatgtcgcaggctccgcagtccccacagatacccatgaatgggtctgccatgcagagcttgttcattgaagaaatccacagtgtgagtgccaagaacagggcagtgtctatcgagaaagcagaaaagaaatgggaggaaaaaaggcaaaatctggatcactataatgggaaagagtttgagaagctcctagaagaagctcaggccaatatcatgaagtcaataccaaatctggagatgccgccagccacaggcccactgccaaggggagatgccccagtggacaaggtggaactttcagaagattctccaaattcggaacaggacttggaaaagctggggggaaagtcgccccctcctcctccgccacctcctcgtcgaagctacctgccaggatcgggactcaccaccacgaggtcaggcgatgtggtctacaccggcagaaaggagaacatcaccgctaaggcaagcagtgaagatgctggaccaagcccacagaccagagctacaaaatatccagcagaggagcctgcttcagcctggaccccatccccaccgcctgtcaccacctcctcctcaaaggatgaggaggaagaagaagaagaaggagacaaaataatggcagaactccagggctccagcggggccccacagacgagcaggatgcctgtccccatgagtgccaagaacagacccggaaccctggacaaacccggcaagcagtccaaactgcaggatccccgccaatatcgtcaggtagttttaccttaaacccacttttggatggacgctatttcagttaagcaagtcactgacttagtttataccaaatattgtgctttctttgtaagataacggtttacatagacatcctggatctgggggcatgaagaaagtctaaataaacctttgttacacttttttaccacgcttttgcatgcttgcaataaaacatcttttactttgtgactccaaactccaaattttaactgttaacacacggtgccagaccaggtggcttttctttggtgaatgtagtgtttcatctgaacacctcgggaagcagagacaaaccaacctgtggttgaactgcccttaacgtcaccactactaacgtctatgttgactgtattgtgttagaagcacattaacactccgtcacaatgcccgacccccaccccagtaattatccagacgcatggcccacctggcacacaggaaatggtagagctggaatgatgggactcctctcacaaatgtattcttcctttcctcctttcccgtccatcctttgctatgtacatggggggtttctaccaggtccagtagagcacaacaagacttagctcaggccttgaactgtgtttggttggttttctttgattgaattattctcagaagggctgtgttgccaggccctgtgggttgatcatgtgaccgcctttctgacaaaatgtctcccgccatctttatttgcaggctaatggaagtgctaagaaatctggtggggactttaagcctacttccccctccttacctgcttctaagattccagccctttctcccagctctgggaaaagcagttctctgccctcttctagtggtgacagctctaacctccctaatccacctgctactaaaccatcgattgcttctaaccctctcagcccccaaacaggaccacctgctcactctgcctccctcatcccttctgtctctaatggctctttgaagtttcagagcctcactcatacaggtaaaggtcaccatctttcattctcaccgcagagtcaaaatggccgagcaccccctcctttgtcattttcctcctcccctccttctcctgcctcctccgtctcactgaatcaaggtgccaagggcaccaggaccatccatactcccagcctcaccagctacaaggcacagaatggaagttcaagcaaagccaccccatccacagcaaaagaaacctcttaaaggtcaaatcctattaggcacaagtcggagttacatttaaaaaaaattaacagtctacaacaactgttttcacaagagaatgtaacatattgctgtatcgtttgaggcttaatgctaaatatgtgctaaatactggattaatagatttcagtaaagctcgttcgttttgtttggttttctttttacctagttgctatagtgtctacagtctatactcaatacctataaaatgcagtaagcatgtgttacagaaagaggttctggtgggagagaaaggtgcgtgtgagacaggagaattgtcttaagcatataaaacatgtatgattccagaattttagtatgttttgtataaaactatttttcattacggagactagaagtgaacagagaattacacaagtgtgactatacaaattgtaaaacagatactataatatttccttttattttagtgttatttagctttattacagatttctatttttgtcaaaacttcatggttcctttcaagatcttttttgccaaaacattttgatactatagcattgtacatttgaaagtagtgttctagactataaaaccaatgaacttctacatgagccctacagacaggcatgtgtagaaggcaatttatcaaacctattgcactgccatgaaaagtgtgtataataatttgctagcccaagcaagctagttttctttgcttgcttcttttctttcttttttccttccttttttttttttttttcttttttaacatgttgagattctctagttgttttctttggcgtatctaaccccttcttttgttttctgagacctggtaacccacgctcttgcattgtggattttaaaatgtatactctgtacggttctgtaaaccgaaaaacttttgtaaatatataaatatacatagacataaaaatactgtatgtgacagcacatagagtagttttcccacaccaaagttaatttttatgcatgctttaaaagtatatatcgggaccggcagaaatggaagtatccatacatttttaaaaagcaacaagtttgcacagctagagtgtttttgtaaataaatgtatttgtataacacagtcatgtaatatacagaactataagcagagactttgcaaaactaaataaagggctgcatgcttattattttttgtaccttgtcactataactacttcctagtcaaagaacgaaatgtaactgttaccgagttaaatgtttttccgctttgagggatgtaaccacatccactcagaggacactacttttctgaaagctctggggtgactaatgatgagttcctaataaattaattgcaagtgtggtgccttggatgtggcctgttggctcgctttcttctctgtggcttatcaaggtgtagatgacagaaagcaaacctggatacagagtttccaccctcagttcctggaggggctcttattattttctctctttttaaaaaacttccagtagaagtaaagtggaaataaaatgtctttatcacttgg

SEQ ID NO: 459482 - DNA, 4818 bp, Homo sapiens
ccctttattttcttcaccactcccctacaaaattttaaattcttgaaatcttttgctaattgagattttcatcttgtgcaaacacagggcatttttggcagttggagaacaaagcaatccaaggtaaacagctgtaggctttggattggtgtgtaagaaatatgcgtggcccgcatgtcttagaaatgtaattaaaggaacgatttagttatagtccacttttttggggggatgtggttttgtggagtaacatgtcctacactattctaccagaatttggaatttttccatgaagatgtacggaaatctgatgttgaatatgaaaatggcccccaaatggaattccaaaaggttaccacaggggctgtaagacctagtgaccctcctaagtgggaaagaggaatggagaatagtatttctgatgcatcaagaacatcagaatataaaactgagatcataatgaaggaaaattccatatccaatatgagtttactcagagacagtagaaactattcccaggaaactgtgcctaaggccagtttcggtttctctggcattagtccattagaagatgaaataaacaaagggtctaaaatctcaggcctgcaatactctatacctgacaccgagaaccagacgctgaattacggaaagacaaaggagatggaaaagcaaaatacggataagtgtcacgtttcctctcacactagactaacagaatcaagcgtgcatgattttaaaacagaagatcaagaggttatcacgacagattttggccaagttgttctaagacccaaggaggcaaggcatgctaacgtgaaccctaatgaggatggagaatcaagttcaagttctcccactgaagaaaatgcagccactgacaatattgccttcatgattaccgaaaccactgtccaggttctttccagtggggaggtgcatgatattgttagccaaaagggagaagacatacagacggttaatatcgatgccagaaaagagatgaccccccgacaagaagggactgacaatgaggatccagtcgtgtgcctggacaagaaaccagtgatcatcattttcgatgagcccatggacatccggtctgcctataagagactttcaactatctttgaggaatgtgatgaggaattagagagaatgatgatggaggaaaagatagaggaggaggaagaggaggaaaatggggattctgtagtccagaataataacacttcccagatgtctcataagaaggtggccccaggcaatcttagaaccggacaacaggtggaaacaaagtcacagccacactccctggccacagagaccagaaacccaggaggacaggaaatgaacagaacggagctgaacaagttcagccacgtggattctccaaattcggaatgcaagggtgaggacgcgaccgatgaccagtttgaaagccccaagaaaaagtttaaattcaaattccctaagaagcaactcgccgctctcactcaagccattcgcaccggaactaaaacagggaagaagactttgcaagtggtagtctatgaagaagaggaagaggatggcaccctgaaacagcacaaagaagccaagcgcttcgaaatcgctaggtctcaacctgaagacacccctgaaaacacagtgaggaggcaagagcagcccagcatcgagagtacatctccgatttcaagaactgatgaaattagaaaaaacacctacagaacattggatagcctggagcagaccattaaacagctcgaaaatacaatcagtgaaatgagtcccaaagccctagttgatacctcatgttcttccaacagagattctgttgcaagttcatcccacatagcccaagaggcctctccccgacccttgctagttccggatgaaggtcccactgccctagagccccctacgtcgataccttcagcttcacgtaagggctccagcggggccccacagacgagcaggatgcctgtccccatgagtgccaagaacagacccggaaccctggacaaacccggcaagcagtccaaactgcaggatccccgccaatatcgtcaggtagttttaccttaaacccacttttggatggacgctatttcagttaagcaagtcactgacttagtttataccaaatattgtgctttctttgtaagataacggtttacatagacatcctggatctgggggcatgaagaaagtctaaataaacctttgttacacttttttaccacgcttttgcatgcttgcaataaaacatcttttactttgtgactccaaactccaaattttaactgttaacacacggtgccagaccaggtggcttttctttggtgaatgtagtgtttcatctgaacacctcgggaagcagagacaaaccaacctgtggttgaactgcccttaacgtcaccactactaacgtctatgttgactgtattgtgttagaagcacattaacactccgtcacaatgcccgacccccaccccagtaattatccagacgcatggcccacctggcacacaggaaatggtagagctggaatgatgggactcctctcacaaatgtattcttcctttcctcctttcccgtccatcctttgctatgtacatggggggtttctaccaggtccagtagagcacaacaagacttagctcaggccttgaactgtgtttggttggttttctttgattgaattattctcagaagggctgtgttgccaggccctgtgggttgatcatgtgaccgcctttctgacaaaatgtctcccgccatctttatttgcaggctaatggaagtgctaagaaatctggtggggactttaagcctacttccccctccttacctgcttctaagattccagccctttctcccagctctgggaaaagcagttctctgccctcttctagtggtgacagctctaacctccctaatccacctgctactaaaccatcgattgcttctaaccctctcagcccccaaacaggaccacctgctcactctgcctccctcatcccttctgtctctaatggctctttgaagtttcagagcctcactcatacaggtaaaggtcaccatctttcattctcaccgcagagtcaaaatggccgagcaccccctcctttgtcattttcctcctcccctccttctcctgcctcctccgtctcactgaatcaaggtgccaagggcaccaggaccatccatactcccagcctcaccagctacaaggcacagaatggaagttcaagcaaagccaccccatccacagcaaaagaaacctcttaaaggtcaaatcctattaggcacaagtcggagttacatttaaaaaaaattaacagtctacaacaactgttttcacaagagaatgtaacatattgctgtatcgtttgaggcttaatgctaaatatgtgctaaatactggattaatagatttcagtaaagctcgttcgttttgtttggttttctttttacctagttgctatagtgtctacagtctatactcaatacctataaaatgcagtaagcatgtgttacagaaagaggttctggtgggagagaaaggtgcgtgtgagacaggagaattgtcttaagcatataaaacatgtatgattccagaattttagtatgttttgtataaaactatttttcattacggagactagaagtgaacagagaattacacaagtgtgactatacaaattgtaaaacagatactataatatttccttttattttagtgttatttagctttattacagatttctatttttgtcaaaacttcatggttcctttcaagatcttttttgccaaaacattttgatactatagcattgtacatttgaaagtagtgttctagactataaaaccaatgaacttctacatgagccctacagacaggcatgtgtagaaggcaatttatcaaacctattgcactgccatgaaaagtgtgtataataatttgctagcccaagcaagctagttttctttgcttgcttcttttctttcttttttccttccttttttttttttttttcttttttaacatgttgagattctctagttgttttctttggcgtatctaaccccttcttttgttttctgagacctggtaacccacgctcttgcattgtggattttaaaatgtatactctgtacggttctgtaaaccgaaaaacttttgtaaatatataaatatacatagacataaaaatactgtatgtgacagcacatagagtagttttcccacaccaaagttaatttttatgcatgctttaaaagtatatatcgggaccggcagaaatggaagtatccatacatttttaaaaagcaacaagtttgcacagctagagtgtttttgtaaataaatgtatttgtataacacagtcatgtaatatacagaactataagcagagactttgcaaaactaaataaagggctgcatgcttattattttttgtaccttgtcactataactacttcctagtcaaagaacgaaatgtaactgttaccgagttaaatgtttttccgctttgagggatgtaaccacatccactcagaggacactacttttctgaaagctctggggtgactaatgatgagttcctaataaattaattgcaagtgtggtgccttggatgtggcctgttggctcgctttcttctctgtggcttatcaaggtgtagatgacagaaagcaaacctggatacagagtttccaccctcagttcctggaggggctcttattattttctctctttttaaaaaacttccagtagaagtaaagtggaaataaaatgtctttatcacttgg

SEQ ID NO: 459483 - DNA, 6025 bp, Homo sapiens
catggaagaaacatttctcgttagttcagcattggttttagttatgctgatttccgggacaggaaaaatgccttcctactcagaattaactttcatagagtagaaacaaaacctctgaatgtccgtgaaatagttttaacaagagtggatactgctcctttaaaccacatattttgactaaaagcttccttctgtaaaaaacccaaggcttgcatttagtcaccatgaagacaggcaaagctgaaagcattggagagaggggtggtttcgaggtctctgcaagtctagaaagtttcttctagaaaagaaaggctcacggaaaatgtaagatgcagagagaacttgtttatgcaagaggagatggccctggggcccctcgccccggatctactgctcatccaccccatgcgattccaaattccccaccgtctactccagtgccccattccatgcccccctccccgtccagaattccttatgggggcacccgctccatggttgttcctggcaatgccaccatccccagggacagaatctccagcctgccagtctccagacccatctctccaagcccaagcgccattttagaaagaagagatgtcaagcctgatgaagacatgagtggcaaaaacattgcaatgtacagaaatgagggtttctatgctgatccttacctttatcacgagggacggatgagcatagcctcatcccatggtggacacccactggatgtccccgaccacatcattgcatatcaccgcaccgccatccggtcagcgagtgcttattgtaacccctcaatgcaagcggaaatgcatatggaacaatcactgtacagacagaaatcaaggaaatatccggatagccatttgcctacactgggctccaaaacaccccctgcctctcctcacagagtcagtgacctgaggatgatagacatgcacgctcactataatgcccacggcccccctcacaccatgcagccagaccgggcctctccgagccgccaggcctttaaaaaggagccaggcaccttggtgtatatagaaaagccacggagcgctgcaggattatccagccttgtagacctcggccctcctctaatggagaagcaagtttttgcctacagcacggcgacaatacccaaagacagagagaccagagagaggatgcaagccatggagaaacagattgccagtttaactggccttgttcagtctgcgctttttaaagggcccattacaagttatagcaaagatgcgtctaggtaaaaaagaagaaagccaatgaaaaaaataattcaatctgtttctcttttaatcattaagataattcattcattcaaatctgttttcttgtaatcatttcaaggctgaaaatattcacatctctatggatcatgggcgttatttttttgttttggggggtttggttgctttttttctttcctccttctggtaattcttggtcgaaagtaacactttggcccaagaaggtaaatgggcttcccagtgcatgtggcttcatggaccactcaccgtgcagtgcctgcaaccaccacccttgcgtgtccacgtcgccatcatctgaaagtcacaagtgagcctggctgcattccacccccagtgtcaggtgcacacctgggaagccttttccatcctggccaattgtgatgctgatgctaaaataccttcattgcttaatcccatcactgccaattgcttcaaatagtggatggaatgggctttaaaaaaaaaaaaaaaggcattttggaaactgcatagctgactctctttttcttttattcagcgagaaaatgatgaaaaccacagccaacaggaaccacacagatagtgcaggaacgccccatgtgtctggtgggaagatgctcagtgctctggagtccacggtgcctcccagccagcctccacctgtgggcacctcagccatccacatgagcctgcttgagatgaggcggagcgtggcggaactcaggctccagctccagcagatgcggcagctccagctgcagaaccaggagttgctgagggcaatgatgaagaaggccgagctggaaatcagtggcaaagtgatggaaacaatgaagagactggaggatcccgtgcagcgcacgatggcgcgtcctagtggagcaagagagacaaaaatatcttcatgaggaagagaagatcgtcaagaagttgtgcgagttggaagactttgttgaagacttgaagaaggactccacggcagccagccgattggttactctgaaagacgtggaagacggggctttcctcctgcgtcaagtgggagaggctgtagctaccctgaaaggagaatttccaaccttacaaaacaagatgcgagccatcctgcgcatagaagtggaggccgtgcggtttctgaaggaggagccacacaagctggacagtctcctgaagcgtgtgcgcagcatgacagacgtcctgaccatgctgcggagacatgtcactgatgggctcctgaaaggcacggacgcagcccaagccgcacagtacatggctatggaaaaggccacagccgcagaagtcctgaagagtcaggaggaggcagcccacacctccggccagcccttccacagcacaggtgcccctggcgatgcgaagtcggaagtggtgcctttgtccggcatgatggttcgccacgcgcagagctcccctgtggtcatccagccctcccagcactccgtggccctgctgaaccctgctcagaacttgcctcacgtggccagctccccagccgtcccccaggaagcaacctccactctgcagatgtcgcaggctccgcagtccccacagatacccatgaatgggtctgccatgcagagcttgttcattgaagaaatccacagtgtgagtgccaagaacagggcagtgtctatcgagaaagcagaaaagaaatgggaggaaaaaaggcaaaatctggatcactataatgggaaagagtttgagaagctcctagaagaagctcaggccaatatcatgaagtcaataccaaatctggagatgccgccagccacaggcccactgccaaggggagatgccccagtggacaaggtggaactttcagaagattctccaaattcggaacaggacttggaaaagctggggggaaagtcgccccctcctcctccgccacctcctcgtcgaagctacctgccaggatcgggactcaccaccacgaggtcaggcgatgtggtctacaccggcagaaaggagaacatcaccgctaaggcaagcagtgaagatgctggaccaagcccacagaccagagctacaaaatatccagcagaggagcctgcttcagcctggaccccatccccaccgcctgtcaccacctcctcctcaaaggatgaggaggaagaagaagaagaaggagacaaaataatggcagaactccagggctccagcggggccccacagacgagcaggatgcctgtccccatgagtgccaagaacagacccggaaccctggacaaacccggcaagcagtccaaactgcaggatccccgccaatatcgtcaggtagttttaccttaaacccacttttggatggacgctatttcagttaagcaagtcactgacttagtttataccaaatattgtgctttctttgtaagataacggtttacatagacatcctggatctgggggcatgaagaaagtctaaataaacctttgttacacttttttaccacgcttttgcatgcttgcaataaaacatcttttactttgtgactccaaactccaaattttaactgttaacacacggtgccagaccaggtggcttttctttggtgaatgtagtgtttcatctgaacacctcgggaagcagagacaaaccaacctgtggttgaactgcccttaacgtcaccactactaacgtctatgttgactgtattgtgttagaagcacattaacactccgtcacaatgcccgacccccaccccagtaattatccagacgcatggcccacctggcacacaggaaatggtagagctggaatgatgggactcctctcacaaatgtattcttcctttcctcctttcccgtccatcctttgctatgtacatggggggtttctaccaggtccagtagagcacaacaagacttagctcaggccttgaactgtgtttggttggttttctttgattgaattattctcagaagggctgtgttgccaggccctgtgggttgatcatgtgaccgcctttctgacaaaatgtctcccgccatctttatttgcaggctaatggaagtgctaagaaatctggtggggactttaagcctacttccccctccttacctgcttctaagattccagccctttctcccagctctgggaaaagcagttctctgccctcttctagtggtgacagctctaacctccctaatccacctgctactaaaccatcgattgcttctaaccctctcagcccccaaacaggaccacctgctcactctgcctccctcatcccttctgtctctaatggctctttgaagtttcagagcctcactcatacaggtaaaggtcaccatctttcattctcaccgcagagtcaaaatggccgagcaccccctcctttgtcattttcctcctcccctccttctcctgcctcctccgtctcactgaatcaaggtgccaagggcaccaggaccatccatactcccagcctcaccagctacaaggcacagaatggaagttcaagcaaagccaccccatccacagcaaaagaaacctcttaaaggtcaaatcctattaggcacaagtcggagttacatttaaaaaaaattaacagtctacaacaactgttttcacaagagaatgtaacatattgctgtatcgtttgaggcttaatgctaaatatgtgctaaatactggattaatagatttcagtaaagctcgttcgttttgtttggttttctttttacctagttgctatagtgtctacagtctatactcaatacctataaaatgcagtaagcatgtgttacagaaagaggttctggtgggagagaaaggtgcgtgtgagacaggagaattgtcttaagcatataaaacatgtatgattccagaattttagtatgttttgtataaaactatttttcattacggagactagaagtgaacagagaattacacaagtgtgactatacaaattgtaaaacagatactataatatttccttttattttagtgttatttagctttattacagatttctatttttgtcaaaacttcatggttcctttcaagatcttttttgccaaaacattttgatactatagcattgtacatttgaaagtagtgttctagactataaaaccaatgaacttctacatgagccctacagacaggcatgtgtagaaggcaatttatcaaacctattgcactgccatgaaaagtgtgtataataatttgctagcccaagcaagctagttttctttgcttgcttcttttctttcttttttccttccttttttttttttttttcttttttaacatgttgagattctctagttgttttctttggcgtatctaaccccttcttttgttttctgagacctggtaacccacgctcttgcattgtggattttaaaatgtatactctgtacggttctgtaaaccgaaaaacttttgtaaatatataaatatacatagacataaaaatactgtatgtgacagcacatagagtagttttcccacaccaaagttaatttttatgcatgctttaaaagtatatatcgggaccggcagaaatggaagtatccatacatttttaaaaagcaacaagtttgcacagctagagtgtttttgtaaataaatgtatttgtataacacagtcatgtaatatacagaactataagcagagactttgcaaaactaaataaagggctgcatgcttattaaaaaaaaagtcgacgcggccgcgaatttagtagtagtagtcgacccgggaatttcgggaccgtaccttgcggcg

SEQ ID NO: 459484 - DNA, 4095 bp, Homo sapiens
ccctttattttcttcaccactcccctacaaaattttaaattcttgaaatcttttgctaattgagattttcatcttgtgcaaacacagggcatttttggcagttggagaacaaagcaatccaaggtaaacagctgtaggctttggattggtgtgtaagaaatatgcgtggcccgcatgtcttagaaatgtaattaaaggaacgatttagttatagtccacttttttggggggatgtggttttgtggagtaacatgtcctacactattctaccagaatttggaatttttccatgaagatgtacggaaatctgatgttgaatatgaaaatggcccccaaatggaattccaaaaggttaccacaggggctgtaagacctagtgaccctcctaagtgggaaagaggaatggagaatagtatttctgatgcatcaagaacatcagaatataaaactgagatcataatgaaggaaaattccatatccaatatgagtttactcagagacagtagaaactattcccaggaaactgtgcctaaggccagtttcggtttctctggcattagtccattagaagatgaaataaacaaagggtctaaaatctcaggcctgcaatactctatacctgacaccgagaaccagacgctgaattacggaaagacaaaggagatggaaaagcaaaatacggataagtgtcacgtttcctctcacactagactaacagaatcaagcgtgcatgattttaaaacagaagatcaagaggttatcacgacagattttggccaagttgttctaagacccaaggaggcaaggcatgctaacgtgaaccctaatgaggatggagaatcaagttcaagttctcccactgaagaaaatgcagccactgacaatattgccttcatgattaccgaaaccactgtccaggttctttccagtggggaggtgcatgatattgttagccaaaagggagaagacatacagacggttaatatcgatgccagaaaagagatgaccccccgacaagaagggactgacaatgaggatccagtcgtgtgcctggacaagaaaccagtgatcatcattttcgatgagcccatggacatccggtctgcctataagagactttcaactatctttgaggaatgtgatgaggaattagagagaatgatgatggaggaaaagatagaggaggaggaagaggaggaaaatggggattctgtagtccagaataataacacttcccagatgtctcataagaaggtggccccaggcaatcttagaaccggacaacaggtggaaacaaagtcacagccacactccctggccacagagaccagaaacccaggaggacaggaaatgaacagaacggagctgaacaagttcagccacgtggattctccaaattcggaatgcaagggtgaggacgcgaccgatgaccagtttgaaagccccaagaaaaagtttaaattcaaattccctaagaagcaactcgccgctctcactcaagccattcgcaccggaactaaaacagggaagaagactttgcaagtggtagtctatgaagaagaggaagaggatggcaccctgaaacagcacaaagaagccaagcgcttcgaaatcgctaggtctcaacctgaagacacccctgaaaacacagtgaggaggcaagagcagcccagcatcgagagtacatctccgatttcaagaactgatgaaattagaaaaaacacctacagaacattggatagcctggagcagaccattaaacagctcgaaaatacaatcagtgaaatgagtcccaaagccctagttgatacctcatgttcttccaacagagattctgttgcaagttcatcccacatagcccaagaggcctctccccgacccttgctagttccggatgaaggtcccactgccctagagccccctacgtcgataccttcagcttcacgtaagggctccagcggggccccacagacgagcaggatgcctgtccccatgagtgccaagaacagacccggaaccctggacaaacccggcaagcagtccaaactgcaggatccccgccaatatcgtcaggctaatggaagtgctaagaaatctggtggggactttaagcctacttccccctccttacctgcttctaagattccagccctttctcccagctctgggaaaagcagttctctgccctcttctagtggtgacagctctaacctccctaatccacctgctactaaaccatcgattgcttctaaccctctcagcccccaaacaggaccacctgctcactctgcctccctcatcccttctgtctctaatggctctttgaagtttcagagcctcactcatacaggtaaaggtcaccatctttcattctcaccgcagagtcaaaatggccgagcaccccctcctttgtcattttcctcctcccctccttctcctgcctcctccgtctcactgaatcaaggtgccaagggcaccaggaccatccatactcccagcctcaccagctacaaggcacagaatggaagttcaagcaaagccaccccatccacagcaaaagaaacctcttaaaggtcaaatcctattaggcacaagtcggagttacatttaaaaaaaattaacagtctacaacaactgttttcacaagagaatgtaacatattgctgtatcgtttgaggcttaatgctaaatatgtgctaaatactggattaatagatttcagtaaagctcgttcgttttgtttggttttctttttacctagttgctatagtgtctacagtctatactcaatacctataaaatgcagtaagcatgtgttacagaaagaggttctggtgggagagaaaggtgcgtgtgagacaggagaattgtcttaagcatataaaacatgtatgattccagaattttagtatgttttgtataaaactatttttcattacggagactagaagtgaacagagaattacacaagtgtgactatacaaattgtaaaacagatactataatatttccttttattttagtgttatttagctttattacagatttctatttttgtcaaaacttcatggttcctttcaagatcttttttgccaaaacattttgatactatagcattgtacatttgaaagtagtgttctagactataaaaccaatgaacttctacatgagccctacagacaggcatgtgtagaaggcaatttatcaaacctattgcactgccatgaaaagtgtgtataataatttgctagcccaagcaagctagttttctttgcttgcttcttttctttcttttttccttccttttttttttttttttcttttttaacatgttgagattctctagttgttttctttggcgtatctaaccccttcttttgttttctgagacctggtaacccacgctcttgcattgtggattttaaaatgtatactctgtacggttctgtaaaccgaaaaacttttgtaaatatataaatatacatagacataaaaatactgtatgtgacagcacatagagtagttttcccacaccaaagttaatttttatgcatgctttaaaagtatatatcgggaccggcagaaatggaagtatccatacatttttaaaaagcaacaagtttgcacagctagagtgtttttgtaaataaatgtatttgtataacacagtcatgtaatatacagaactataagcagagactttgcaaaactaaataaagggctgcatgcttattattttttgtaccttgtcactataactacttcctagtcaaagaacgaaatgtaactgttaccgagttaaatgtttttccgctttgagggatgtaaccacatccactcagaggacactacttttctgaaagctctggggtgactaatgatgagttcctaataaattaattgcaagtgtggtgccttggatgtggcctgttggctcgctttcttctctgtggcttatcaaggtgtagatgacagaaagcaaacctggatacagagtttccaccctcagttcctggaggggctcttattattttctctctttttaaaaaacttccagtagaagtaaagtggaaataaaatgtctttatcacttgg

SEQ ID NO: 459485 - DNA, 5608 bp, Homo sapiens
catggaagaaacatttctcgttagttcagcattggttttagttatgctgatttccgggacaggaaaaatgccttcctactcagaattaactttcatagagtagaaacaaaacctctgaatgtccgtgaaatagttttaacaagagtggatactgctcctttaaaccacatattttgactaaaagcttccttctgtaaaaaacccaaggcttgcatttagtcaccatgaagacaggcaaagctgaaagcattggagagaggggtggtttcgaggtctctgcaagtctagaaagtttcttctagaaaagaaaggctcacggaaaatgtaagatgcagagagaacttgtttatgcaagaggagatggccctggggcccctcgccccggatctactgctcatccaccccatgcgattccaaattccccaccgtctactccagtgccccattccatgcccccctccccgtccagaattccttatgggggcacccgctccatggttgttcctggcaatgccaccatccccagggacagaatctccagcctgccagtctccagacccatctctccaagcccaagcgccattttagaaagaagagatgtcaagcctgatgaagacatgagtggcaaaaacattgcaatgtacagaaatgagggtttctatgctgatccttacctttatcacgagggacggatgagcatagcctcatcccatggtggacacccactggatgtccccgaccacatcattgcatatcaccgcaccgccatccggtcagcgagtgcttattgtaacccctcaatgcaagcggaaatgcatatggaacaatcactgtacagacagaaatcaaggaaatatccggatagccatttgcctacactgggctccaaaacaccccctgcctctcctcacagagtcagtgacctgaggatgatagacatgcacgctcactataatgcccacggcccccctcacaccatgcagccagaccgggcctctccgagccgccaggcctttaaaaaggagccaggcaccttggtgtatatagaaaagccacggagcgctgcaggattatccagccttgtagacctcggccctcctctaatggagaagcaagtttttgcctacagcacggcgacaatacccaaagacagagagaccagagagaggatgcaagccatggagaaacagattgccagtttaactggccttgttcagtctgcgctttttaaagggcccattacaagttatagcaaagatgcgtctaggtaaaaaagaagaaagccaatgaaaaaaataattcaatctgtttctcttttaatcattaagataattcattcattcaaatctgttttcttgtaatcatttcaaggctgaaaatattcacatctctatggatcatgggcgttatttttttgttttggggggtttggttgctttttttctttcctccttctggtaattcttggtcgaaagtaacactttggcccaagaaggtaaatgggcttcccagtgcatgtggcttcatggaccactcaccgtgcagtgcctgcaaccaccacccttgcgtgtccacgtcgccatcatctgaaagtcacaagtgagcctggctgcattccacccccagtgtcaggtgcacacctgggaagccttttccatcctggccaattgtgatgctgatgctaaaataccttcattgcttaatcccatcactgccaattgcttcaaatagtggatggaatgggctttaaaaaaaaaaaaaaaggcattttggaaactgcatagctgactctctttttcttttattcagcgagaaaatgatgaaaaccacagccaacaggaaccacacagatagtgcaggaacgccccatgtgtctggtgggaagatgctcagtgctctggagtccacggtgcctcccagccagcctccacctgtgggcacctcagccatccacatgagcctgcttgagatgaggcggagcgtggcggaactcaggctccagctccagcagatgcggcagctccagctgcagaaccaggagttgctgagggcaatgatgaagaaggccgagctggaaatcagtggcaaagtgatggaaacaatgaagagactggaggatcccgtgcagcgcacgatggcgcgtcctagtggagcaagagagacaaaaatatcttcatgaggaagagaagatcgtcaagaagttgtgcgagttggaagactttgttgaagacttgaagaaggactccacggcagccagccgattggttactctgaaagacgtggaagacggggctttcctcctgcgtcaagtgggagaggctgtagctaccctgaaaggagaatttccaaccttacaaaacaagatgcgagccatcctgcgcatagaagtggaggccgtgcggtttctgaaggaggagccacacaagctggacagtctcctgaagcgtgtgcgcagcatgacagacgtcctgaccatgctgcggagacatgtcactgatgggctcctgaaaggcacggacgcagcccaagccgcacagtacatggctatggaaaaggccacagccgcagaagtcctgaagagtcaggaggaggcagcccacacctccggccagcccttccacagcacaggtgcccctggcgatgcgaagtcggaagtggtgcctttgtccggcatgatggttcgccacgcgcagagctcccctgtggtcatccagccctcccagcactccgtggccctgctgaaccctgctcagaacttgcctcacgtggccagctccccagccgtcccccaggaagcaacctccactctgcagatgtcgcaggctccgcagtccccacagatacccatgaatgggtctgccatgcagagcttgttcattgaagaaatccacagtgtgagtgccaagaacagggcagtgtctatcgagaaagcagaaaagaaatgggaggaaaaaaggcaaaatctggatcactataatgggaaagagtttgagaagctcctagaagaagctcaggccaatatcatgaagtcaataccaaatctggagatgccgccagccacaggcccactgccaaggggagatgccccagtggacaaggtggaactttcagaagattctccaaattcggaacaggacttggaaaagctggggggaaagtcgccccctcctcctccgccacctcctcgtcgaagctacctgccaggatcgggactcaccaccacgaggtcaggcgatgtggtctacaccggcagaaaggagaacatcaccgctaaggcaagcagtgaagatgctggaccaagcccacagaccagagctacaaaatatccagcagaggagcctgcttcagcctggaccccatccccaccgcctgtcaccacctcctcctcaaaggatgaggaggaagaagaagaagaaggagacaaaataatggcagaactccagggctccagcggggccccacagacgagcaggatgcctgtccccatgagtgccaagaacagacccggaaccctggacaaacccggcaagcagtccaaactgcaggatccccgccaatatcgtcaggtagttttaccttaaacccacttttggatggacgctatttcagttaagcaagtcactgacttagtttataccaaatattgtgctttctttgtaagataacggtttacatagacatcctggatctgggggcatgaagaaagtctaaataaacctttgttacacttttttaccacgcttttgcatgcttgcaataaaacatcttttactttgtgactccaaactccaaattttaactgttaacacacggtgccagaccaggtggcttttctttggtgaatgtagtgtttcatctgaacacctcgggaagcagagacaaaccaacctgtggttgaactgcccttaacgtcaccactactaacgtctatgttgactgtattgtgttagaagcacattaacactccgtcacaatgcccgacccccaccccagtaattatccagacgcatggcccacctggcacacaggaaatggtagagctggaatgatgggactcctctcacaaatgtattcttcctttcctcctttcccgtccatcctttgctatgtacatggggggtttctaccaggtccagtagagcacaacaagacttagctcaggccttgaactgtgtttggttggttttctttgattgaattattctcagaagggctgtgttgccaggccctgtgggttgatcatgtgaccgcctttctgacaaaatgtctcccgccatctttatttgcaggctaatggaagtgctaagaaatctggtggggactttaagcctacttccccctccttacctgcttctaagattccagccctttctcccagctctgggaaaagcagttctctgccctcttctagtggtgacagctctaacctccctaatccacctgctactaaaccatcgattgcttctaaccctctcagcccccaaacaggaccacctgctcactctgcctccctcatcccttctgtctctaatggctctttgaagtttcagagcctcactcatacaggtaaaggtcaccatctttcattctcaccgcagagtcaaaatggccgagcaccccctcctttgtcattttcctcctcccctccttctcctgcctcctccgtctcactgaatcaaggtgccaagggcaccaggaccatccatactcccagcctcaccagctacaaggcacagaatggaagttcaagcaaagccaccccatccacagcaaaagaaacctcttaaaggtcaaatcctattaggcacaagtcggagttacatttaaaaaaaattaacagtctacaacaactgttttcacaagagaatgtaacatattgctgtatcgtttgaggcttaatgctaaatatgtgctaaatactggattaatagatttcagtaaagctcgttcgttttgtttggttttctttttacctagttgctatagtgtctacagtctatactcaatacctataaaatgcagtaagcatgtgttacagaaagaggttctggtgggagagaaaggtgcgtgtgagacaggagaattgtcttaagcatataaaacatgtatgattccagaattttagtatgttttgtataaaactatttttcattacggagactagaagtgaacagagaattacacaagtgtgactatacaaattgtaaaacagatactataatatttccttttattttagtgttatttagctttattacagatttctatttttgtcaaaacttcatggttcctttcaagatcttttttgccaaaacattttgatactatagcattgtacatttgaaagtagtgttctagactataaaaccaatgaacttctacatgagccctacagacaggcatgtgtagaaggcaatttatcaaacctattgcactgccatgaaaagtgtgtataataatttgctagcccaagcaagctagttttctttgcttgcttcttttctttcttttttccttccttttttttttttttttcttttttaacatagacagggtctcactatgttgcccaggctggcctcaaactcctgggctgatgttatcctcc

SEQ ID NO: 459486 - DNA, 3283 bp, Homo sapiens
gaatttagaggattccctggaactttccggggagaagtgtagaaaaaataactattgagtactagggggagcacctgactgacaaaataatctgtacgacacccctgaaaacacagtgaggaggcaagagcagcccagcatcgagagtacatctccgatttcaagaactgatgaaattagaaaaaacacctacagaacattggatagcctggagcagaccattaaacagctcgaaaatacaatcagtgaaatgagtcccaaagccctagttgatacctcatgttcttccaacagagattctgttgcaagttcatcccacatagcccaagaggcctctccccgacccttgctagttccggatgaaggtcccactgccctagagccccctacgtcgataccttcagcttcacgtaagggctccagcggggccccacagacgagcaggatgcctgtccccatgagtgccaagaacagacccggaaccctggacaaacccggcaagcagtccaaactgcaggatccccgccaatatcgtcaggtagttttaccttaaacccacttttggatggacgctatttcagttaagcaagtcactgacttagtttataccaaatattgtgctttctttgtaagataacggtttacatagacatcctggatctgggggcatgaagaaagtctaaataaacctttgttacacttttttaccacgcttttgcatgcttgcaataaaacatcttttactttgtgactccaaactccaaattttaactgttaacacacggtgccagaccaggtggcttttctttggtgaatgtagtgtttcatctgaacacctcgggaagcagagacaaaccaacctgtggttgaactgcccttaacgtcaccactactaacgtctatgttgactgtattgtgttagaagcacattaacactccgtcacaatgcccgacccccaccccagtaattatccagacgcatggcccacctggcacacaggaaatggtagagctggaatgatgggactcctctcacaaatgtattcttcctttcctcctttcccgtccatcctttgctatgtacatggggggtttctaccaggtccagtagagcacaacaagacttagctcaggccttgaactgtgtttggttggttttctttgattgaattattctcagaagggctgtgttgccaggccctgtgggttgatcatgtgaccgcctttctgacaaaatgtctcccgccatctttatttgcaggctaatggaagtgctaagaaatctggtggggactttaagcctacttccccctccttacctgcttctaagattccagccctttctcccagctctgggaaaagcagttctctgccctcttctagtggtgacagctctaacctccctaatccacctgctactaaaccatcgattgcttctaaccctctcagcccccaaacaggaccacctgctcactctgcctccctcatcccttctgtctctaatggctctttgaagtttcagagcctcactcatacaggtaaaggtcaccatctttcattctcaccgcagagtcaaaatggccgagcaccccctcctttgtcattttcctcctcccctccttctcctgcctcctccgtctcactgaatcaaggtgccaagggcaccaggaccatccatactcccagcctcaccagctacaaggcacagaatggaagttcaagcaaagccaccccatccacagcaaaagaaacctcttaaaggtcaaatcctattaggcacaagtcggagttacatttaaaaaaaattaacagtctacaacaactgttttcacaagagaatgtaacatattgctgtatcgtttgaggcttaatgctaaatatgtgctaaatactggattaatagatttcagtaaagctcgttcgttttgtttggttttctttttacctagttgctatagtgtctacagtctatactcaatacctataaaatgcagtaagcatgtgttacagaaagaggttctggtgggagagaaaggtgcgtgtgagacaggagaattgtcttaagcatataaaacatgtatgattccagaattttagtatgttttgtataaaactatttttcattacggagactagaagtgaacagagaattacacaagtgtgactatacaaattgtaaaacagatactataatatttccttttattttagtgttatttagctttattacagatttctatttttgtcaaaacttcatggttcctttcaagatcttttttgccaaaacattttgatactatagcattgtacatttgaaagtagtgttctagactataaaaccaatgaacttctacatgagccctacagacaggcatgtgtagaaggcaatttatcaaacctattgcactgccatgaaaagtgtgtataataatttgctagcccaagcaagctagttttctttgcttgcttcttttctttcttttttccttccttttttttttttttttcttttttaacatgttgagattctctagttgttttctttggcgtatctaaccccttcttttgttttctgagacctggtaacccacgctcttgcattgtggattttaaaatgtatactctgtacggttctgtaaaccgaaaaacttttgtaaatatataaatatacatagacataaaaatactgtatgtgacagcacatagagtagttttcccacaccaaagttaatttttatgcatgctttaaaagtatatatcgggaccggcagaaatggaagtatccatacatttttaaaaagcaacaagtttgcacagctagagtgtttttgtaaataaatgtatttgtataacacagtcatgtaatatacagaactataagcagagactttgcaaaactaaataaagggctgcatgcttattattttttgtaccttgtcactataactacttcctagtcaaagaacgaaatgtaactgttaccgagttaaatgtttttccgctttgagggatgtaaccacatccactcagaggacactacttttctgaaagctctggggtgactaatgatgagttcctaataaattaattgcaagtgtggtgccttggatgtggcctgttggctcgctttcttctctgtggcttatcaaggtgtagatgacagaaagcaaacctggatacagagtttccaccctcagttcctggaggggctcttattattttctctctttttaaaaaacttccagtagaagtaaagtggaaataaaatgtctttatcacttgg

SEQ ID NO: 459487 - DNA, 3284 bp, Homo sapiens
tttctttcaggtggcttttttttttttgtctgttcgccatgaaacccttctttcatactttctccctcaccttccaaacaacaacaactaggtatctaacagctaatcagttctgtttttgcctctgttgctgactggtgttgggtaaacacgaggctgctgggtcagccatgtgctgttgaaagctgttgaaatggttgctctgatactcacattaaaatccgtttgatcagtagtgagcagttgattctgtttgattcttctgattaaccccagttggtgtctcctagatctgtcctgcatgtagggctgtggcttctcaccttgagcttctctgcacatcgtggggcagcctcacagatgacctactcatgcgcttctccttctcttccccctctcactggtccttcccacagggctccagcggggccccacagacgagcaggatgcctgtccccatgagtgccaagaacagacccggaaccctggacaaacccggcaagcagtccaaactgcaggatccccgccaatatcgtcaggtagttttaccttaaacccacttttggatggacgctatttcagttaagcaagtcactgacttagtttataccaaatattgtgctttctttgtaagataacggtttacatagacatcctggatctgggggcatgaagaaagtctaaataaacctttgttacacttttttaccacgcttttgcatgcttgcaataaaacatcttttactttgtgactccaaactccaaattttaactgttaacacacggtgccagaccaggtggcttttctttggtgaatgtagtgtttcatctgaacacctcgggaagcagagacaaaccaacctgtggttgaactgcccttaacgtcaccactactaacgtctatgttgactgtattgtgttagaagcacattaacactccgtcacaatgcccgacccccaccccagtaattatccagacgcatggcccacctggcacacaggaaatggtagagctggaatgatgggactcctctcacaaatgtattcttcctttcctcctttcccgtccatcctttgctatgtacatggggggtttctaccaggtccagtagagcacaacaagacttagctcaggccttgaactgtgtttggttggttttctttgattgaattattctcagaagggctgtgttgccaggccctgtgggttgatcatgtgaccgcctttctgacaaaatgtctcccgccatctttatttgcaggctaatggaagtgctaagaaatctggtggggactttaagcctacttccccctccttacctgcttctaagattccagccctttctcccagctctgggaaaagcagttctctgccctcttctagtggtgacagctctaacctccctaatccacctgctactaaaccatcgattgcttctaaccctctcagcccccaaacaggaccacctgctcactctgcctccctcatcccttctgtctctaatggctctttgaagtttcagagcctcactcatacaggtaaaggtcaccatctttcattctcaccgcagagtcaaaatggccgagcaccccctcctttgtcattttcctcctcccctccttctcctgcctcctccgtctcactgaatcaaggtgccaagggcaccaggaccatccatactcccagcctcaccagctacaaggcacagaatggaagttcaagcaaagccaccccatccacagcaaaagaaacctcttaaaggtcaaatcctattaggcacaagtcggagttacatttaaaaaaaattaacagtctacaacaactgttttcacaagagaatgtaacatattgctgtatcgtttgaggcttaatgctaaatatgtgctaaatactggattaatagatttcagtaaagctcgttcgttttgtttggttttctttttacctagttgctatagtgtctacagtctatactcaatacctataaaatgcagtaagcatgtgttacagaaagaggttctggtgggagagaaaggtgcgtgtgagacaggagaattgtcttaagcatataaaacatgtatgattccagaattttagtatgttttgtataaaactatttttcattacggagactagaagtgaacagagaattacacaagtgtgactatacaaattgtaaaacagatactataatatttccttttattttagtgttatttagctttattacagatttctatttttgtcaaaacttcatggttcctttcaagatcttttttgccaaaacattttgatactatagcattgtacatttgaaagtagtgttctagactataaaaccaatgaacttctacatgagccctacagacaggcatgtgtagaaggcaatttatcaaacctattgcactgccatgaaaagtgtgtataataatttgctagcccaagcaagctagttttctttgcttgcttcttttctttcttttttccttccttttttttttttttttcttttttaacatgttgagattctctagttgttttctttggcgtatctaaccccttcttttgttttctgagacctggtaacccacgctcttgcattgtggattttaaaatgtatactctgtacggttctgtaaaccgaaaaacttttgtaaatatataaatatacatagacataaaaatactgtatgtgacagcacatagagtagttttcccacaccaaagttaatttttatgcatgctttaaaagtatatatcgggaccggcagaaatggaagtatccatacatttttaaaaagcaacaagtttgcacagctagagtgtttttgtaaataaatgtatttgtataacacagtcatgtaatatacagaactataagcagagactttgcaaaactaaataaagggctgcatgcttattattttttgtaccttgtcactataactacttcctagtcaaagaacgaaatgtaactgttaccgagttaaatgtttttccgctttgagggatgtaaccacatccactcagaggacactacttttctgaaagctctggggtgactaatgatgagttcctaataaattaattgcaagtgtggtgccttggatgtggcctgttggctcgctttcttctctgtggcttatcaaggtgtagatgacagaaagcaaacctggatacagagtttccaccctcagttcctggaggggctcttattattttctctctttttaaaaaacttccagtagaagtaaagtggaaataaaatgtctttatcacttgg

SEQ ID NO: 459488 - DNA, 5196 bp, Homo sapiens
catggaagaaacatttctcgttagttcagcattggttttagttatgctgatttccgggacaggaaaaatgccttcctactcagaattaactttcatagagtagaaacaaaacctctgaatgtccgtgaaatagttttaacaagagtggatactgctcctttaaaccacatattttgactaaaagcttccttctgtaaaaaacccaaggcttgcatttagtcaccatgaagacaggcaaagctgaaagcattggagagaggggtggtttcgaggtctctgcaagtctagaaagtttcttctagaaaagaaaggctcacggaaaatgtaagatgcagagagaacttgtttatgcaagaggagatggccctggggcccctcgccccggatctactgctcatccaccccatgcgattccaaattccccaccgtctactccagtgccccattccatgcccccctccccgtccagaattccttatgggggcacccgctccatggttgttcctggcaatgccaccatccccagggacagaatctccagcctgccagtctccagacccatctctccaagcccaagcgccattttagaaagaagagatgtcaagcctgatgaagacatgagtggcaaaaacattgcaatgtacagaaatgagggtttctatgctgatccttacctttatcacgagggacggatgagcatagcctcatcccatggtggacacccactggatgtccccgaccacatcattgcatatcaccgcaccgccatccggtcagcgagtgcttattgtaacccctcaatgcaagcggaaatgcatatggaacaatcactgtacagacagaaatcaaggaaatatccggatagccatttgcctacactgggctccaaaacaccccctgcctctcctcacagagtcagtgacctgaggatgatagacatgcacgctcactataatgcccacggcccccctcacaccatgcagccagaccgggcctctccgagccgccaggcctttaaaaaggagccaggcaccttggtgtatatagaaaagccacggagcgctgcaggattatccagccttgtagacctcggccctcctctaatggagaagcaagtttttgcctacagcacggcgacaatacccaaagacagagagaccagagagaggatgcaagccatggagaaacagattgccagtttaactggccttgttcagtctgcgctttttaaagggcccattacaagttatagcaaagatgcgtctaggtaaaaaagaagaaagccaatgaaaaaaataattcaatctgtttctcttttaatcattaagataattcattcattcaaatctgttttcttgtaatcatttcaaggctgaaaatattcacatctctatggatcatgggcgttatttttttgttttggggggtttggttgctttttttctttcctccttctggtaattcttggtcgaaagtaacactttggcccaagaaggtaaatgggcttcccagtgcatgtggcttcatggaccactcaccgtgcagtgcctgcaaccaccacccttgcgtgtccacgtcgccatcatctgaaagtcacaagtgagcctggctgcattccacccccagtgtcaggtgcacacctgggaagccttttccatcctggccaattgtgatgctgatgctaaaataccttcattgcttaatcccatcactgccaattgcttcaaatagtggatggaatgggctttaaaaaaaaaaaaaaaggcattttggaaactgcatagctgactctctttttcttttattcagcgagaaaatgatgaaaaccacagccaacaggaaccacacagatagtgcaggaacgccccatgtgtctggtgggaagatgctcagtgctctggagtccacggtgcctcccagccagcctccacctgtgggcacctcagccatccacatgagcctgcttgagatgaggcggagcgtggcggaactcaggctccagctccagcagatgcggcagctccagctgcagaaccaggagttgctgagggcaatgatgaagaaggccgagctggaaatcagtggcaaagtgatggaaacaatgaagagactggaggatcccgtgcagcgcacgatggcgcgtcctagtggagcaagagagacaaaaatatcttcatgaggaagagaagatcgtcaagaagttgtgcgagttggaagactttgttgaagacttgaagaaggactccacggcagccagccgattggttactctgaaagacgtggaagacggggctttcctcctgcgtcaagtgggagaggctgtagctaccctgaaaggagaatttccaaccttacaaaacaagatgcgagccatcctgcgcatagaagtggaggccgtgcggtttctgaaggaggagccacacaagctggacagtctcctgaagcgtgtgcgcagcatgacagacgtcctgaccatgctgcggagacatgtcactgatgggctcctgaaaggcacggacgcagcccaagccgcacagtacatggctatggaaaaggccacagccgcagaagtcctgaagagtcaggaggaggcagcccacacctccggccagcccttccacagcacaggtgcccctggcgatgcgaagtcggaagtggtgcctttgtccggcatgatggttcgccacgcgcagagctcccctgtggtcatccagccctcccagcactccgtggccctgctgaaccctgctcagaacttgcctcacgtggccagctccccagccgtcccccaggaagcaacctccactctgcagatgtcgcaggctccgcagtccccacagatacccatgaatgggtctgccatgcagagcttgttcattgaagaaatccacagtgtgagtgccaagaacagggcagtgtctatcgagaaagcagaaaagaaatgggaggaaaaaaggcaaaatctggatcactataatgggaaagagtttgagaagctcctagaagaagctcaggccaatatcatgaagtcaataccaaatctggagatgccgccagccacaggcccactgccaaggggagatgccccagtggacaaggtggaactttcagaagattctccaaattcggaacaggacttggaaaagctggggggaaagtcgccccctcctcctccgccacctcctcgtcgaagctacctgccaggatcgggactcaccaccacgaggtcaggcgatgtggtctacaccggcagaaaggagaacatcaccgctaaggcaagcagtgaagatgctggaccaagcccacagaccagagctacaaaatatccagcagaggagcctgcttcagcctggaccccatccccaccgcctgtcaccacctcctcctcaaaggatgaggaggaagaagaagaagaaggagacaaaataatggcagaactccagggctccagcggggccccacagacgagcaggatgcctgtccccatgagtgccaagaacagacccggaaccctggacaaacccggcaagcagtccaaactgcaggatccccgccaatatcgtcaggtagttttaccttaaacccacttttggatggacgctatttcagttaagcaagtcactgacttagtttataccaaatattgtgctttctttgtaagataacggtttacatagacatcctggatctgggggcatgaagaaagtctaaataaacctttgttacacttttttaccacgcttttgcatgcttgcaataaaacatcttttactttgtgactccaaactccaaattttaactgttaacacacggtgccagaccaggtggcttttctttggtgaatgtagtgtttcatctgaacacctcgggaagcagagacaaaccaacctgtggttgaactgcccttaacgtcaccactactaacgtctatgttgactgtattgtgttagaagcacattaacactccgtcacaatgcccgacccccaccccagtaattatccagacgcatggcccacctggcacacaggaaatggtagagctggaatgatgggactcctctcacaaatgtattcttcctttcctcctttcccgtccatcctttgctatgtacatggggggtttctaccaggtccagtagagcacaacaagacttagctcaggccttgaactgtgtttggttggttttctttgattgaattattctcagaagggctgtgttgccaggccctgtgggttgatcatgtgaccgcctttctgacaaaatgtctcccgccatctttatttgcaggctaatggaagtgctaagaaatctggtggggactttaagcctacttccccctccttacctgcttctaagattccagccctttctcccagctctgggaaaagcagttctctgccctcttctagtggtgacagctctaacctccctaatccacctgctactaaaccatcgattgcttctaaccctctcagcccccaaacaggaccacctgctcactctgcctccctcatcccttctgtctctaatggctctttgaagtttcagagcctcactcatacaggtaaaggtcaccatctttcattctcaccgcagagtcaaaatggccgagcaccccctcctttgtcattttcctcctcccctccttctcctgcctcctccgtctcactgaatcaaggtgccaagggcaccaggaccatccatactcccagcctcaccagctacaaggcacagaatggaagttcaagcaaagccaccccatccacagcaaaagaaacctcttaaaggtcaaatcctattaggcacaagtcggagttacatttaaaaaaaattaacagtctacaacaactgttttcacaagagaatgtaacatattgctgtatcgtttgaggcttaatgctaaatatgtgctaaatactggattaatagatttcagtaaaggctctaaaaaaaaaaaaaaaaaaaaaaaaaaaaccagatgtgttggagccgcccatcgggccctatgaaaaacgccttttcctacgaacccaccttcggttggggcgaccgggggaccccaaagtagtgatcacgtgcacccagtgccgcataagcgtgtccccacaggagaccccgggcaagaccatgcggggggcttcctcacacaatataaacccccgggggaaacgcgacggtgctggacaactccgat

SEQ ID NO: 459489 - DNA, 2641 bp, Homo sapiens
catggaagaaacatttctcgttagttcagcattggttttagttatgctgatttccgggacaggaaaaatgccttcctactcagaattaactttcatagagtagaaacaaaacctctgaatgtccgtgaaatagttttaacaagagtggatactgctcctttaaaccacatattttgactaaaagcttccttctgtaaaaaacccaaggcttgcatttagtcaccatgaagacaggcaaagctgaaagcattggagagaggggtggtttcgaggtctctgcaagtctagaaagtttcttctagaaaagaaaggctcacggaaaatgtaagatgcagagagaacttgtttatgcaagaggagatggccctggggcccctcgccccggatctactgctcatccaccccatgcgattccaaattccccaccgtctactccagtgccccattccatgcccccctccccgtccagaattccttatgggggcacccgctccatggttgttcctggcaatgccaccatccccagggacagaatctccagcctgccagtctccagacccatctctccaagcccaagcgccattttagaaagaagagatgtcaagcctgatgaagacatgagtggcaaaaacattgcaatgtacagaaatgagggtttctatgctgatccttacctttatcacgagggacggatgagcatagcctcatcccatggtggacacccactggatgtccccgaccacatcattgcatatcaccgcaccgccatccggtcagcgagtgcttattgtaacccctcaatgcaagcggaaatgcatatggaacaatcactgtacagacagaaatcaaggaaatatccggatagccatttgcctacactgggctccaaaacaccccctgcctctcctcacagagtcagtgacctgaggatgatagacatgcacgctcactataatgcccacggcccccctcacaccatgcagccagaccgggcctctccgagccgccaggcctttaaaaaggagccaggcaccttggtgtatatagaaaagccacggagcgctgcaggattatccagccttgtagacctcggccctcctctaatggagaagcaagtttttgcctacagcacggcgacaatacccaaagacagagagaccagagagaggatgcaagccatggagaaacagattgccagtttaactggccttgttcagtctgcgctttttaaagggcccattacaagttatagcaaagatgcgtctaggtaaaaaagaagaaagccaatgaaaaaaataattcaatctgtttctcttttaatcattaagataattcattcattcaaatctgttttcttgtaatcatttcaaggctgaaaatattcacatctctatggatcatgggcgttatttttttgttttggggggtttggttgctttttttctttcctccttctggtaattcttggtcgaaagtaacactttggcccaagaaggtaaatgggcttcccagtgcatgtggcttcatggaccactcaccgtgcagtgcctgcaaccaccacccttgcgtgtccacgtcgccatcatctgaaagtcacaagtgagcctggctgcattccacccccagtgtcaggtgcacacctgggaagccttttccatcctggccaattgtgatgctgatgctaaaataccttcattgcttaatcccatcactgccaattgcttcaaatagtggatggaatgggctttaaaaaaaaaaaaaaaggcattttggaaactgcatagctgactctctttttcttttattcagcgagaaaatgatgaaaaccacagccaacaggaaccacacagatagtgcaggaacgccccatgtgtctggtgggaagatgctcagtgctctggagtccacggtgcctcccagccagcctccacctgtgggcacctcagccatccacatgagcctgcttgagatgaggcggagcgtggcggaactcaggctccagctccagcagatgcggcagctccagctgcagaaccaggagttgctgagggcaatgatgaagaaggccgagctggaaatcagtggcaaagtgatggaaacaatgaagagactggaggatcccgtgcagcgcacgatggcgcgtcctagtggagcaagagagacaaaaatatcttcatgaggaagagaagatcgtcaagaagttgtgcgagttggaagactttgttgaagacttgaagaaggactccacggcagccagccgattggttactctgaaagacgtggaagacggggctttcctcctgcgtcaagtgggagaggctgtagctaccctgaaaggagaatttccaaccttacaaaacaagatgcgagccatcctgcgcatagaagtggaggccgtgcggtttctgaaggaggagccacacaagctggacagtctcctgaagcgtgtgcgcagcatgacagacgtcctgaccatgctgcggagacatgtcactgatgggctcctgaaaggcacggacgcgccatcgtgcgcaggatggctcgcatcttgttttgtaaggttggaaattctcctttcagggtagctacagcctctcccacttgacgcaggaggaaagccccgtcttccacgtctttcaga

SEQ ID NO: 459490 - DNA, 2982 bp, Homo sapiens
catggaagaaacatttctcgttagttcagcattggttttagttatgctgatttccgggacaggaaaaatgccttcctactcagaattaactttcatagagtagaaacaaaacctctgaatgtccgtgaaatagttttaacaagagtggatactgctcctttaaaccacatattttgactaaaagcttccttctgtaaaaaacccaaggcttgcatttagtcaccatgaagacaggcaaagctgaaagcattggagagaggggtggtttcgaggtctctgcaagtctagaaagtttcttctagaaaagaaaggctcacggaaaatgtaagatgcagagagaacttgtttatgcaagaggagatggccctggggcccctcgccccggatctactgctcatccaccccatgcgattccaaattccccaccgtctactccagtgccccattccatgcccccctccccgtccagaattccttatgggggcacccgctccatggttgttcctggcaatgccaccatccccagggacagaatctccagcctgccagtctccagacccatctctccaagcccaagcgccattttagaaagaagagatgtcaagcctgatgaagacatgagtggcaaaaacattgcaatgtacagaaatgagggtttctatgctgatccttacctttatcacgagggacggatgagcatagcctcatcccatggtggacacccactggatgtccccgaccacatcattgcatatcaccgcaccgccatccggtcagcgagtgcttattgtaacccctcaatgcaagcggaaatgcatatggaacaatcactgtacagacagaaatcaaggaaatatccggatagccatttgcctacactgggctccaaaacaccccctgcctctcctcacagagtcagtgacctgaggatgatagacatgcacgctcactataatgcccacggcccccctcacaccatgcagccagaccgggcctctccgagccgccaggcctttaaaaaggagccaggcaccttggtgtatatagaaaagccacggagcgctgcaggattatccagccttgtagacctcggccctcctctaatggagaagcaagtttttgcctacagcacggcgacaatacccaaagacagagagaccagagagaggatgcaagccatggagaaacagattgccagtttaactggccttgttcagtctgcgctttttaaagggcccattacaagttatagcaaagatgcgtctaggtaaaaaagaagaaagccaatgaaaaaaataattcaatctgtttctcttttaatcattaagataattcattcattcaaatctgttttcttgtaatcatttcaaggctgaaaatattcacatctctatggatcatgggcgttatttttttgttttggggggtttggttgctttttttctttcctccttctggtaattcttggtcgaaagtaacactttggcccaagaaggtaaatgggcttcccagtgcatgtggcttcatggaccactcaccgtgcagtgcctgcaaccaccacccttgcgtgtccacgtcgccatcatctgaaagtcacaagtgagcctggctgcattccacccccagtgtcaggtgcacacctgggaagccttttccatcctggccaattgtgatgctgatgctaaaataccttcattgcttaatcccatcactgccaattgcttcaaatagtggatggaatgggctttaaaaaaaaaaaaaaaggcattttggaaactgcatagctgactctctttttcttttattcagcgagaaaatgatgaaaaccacagccaacaggaaccacacagatagtgcaggaacgccccatgtgtctggtgggaagatgctcagtgctctggagtccacggtgcctcccagccagcctccacctgtgggcacctcagccatccacatgagcctgcttgagatgaggcggagcgtggcggaactcaggctccagctccagcagatgcggcagctccagctgcagaaccaggagttgctgagggcaatgatgaagaaggccgagctggaaatcagtggcaaagtgatggaaacaatgaagagactggaggatcccgtgcagcgcacgatggcgcgtcctagtggagcaagagagacaaaaatatcttcatgaggaagagaagatcgtcaagaagttgtgcgagttggaagactttgttgaagacttgaagaaggactccacggcagccagccgattggttactctgaaagacgtggaagacggggctttcctcctgcgtcaagtgggagaggctgtagctaccctgaaaggagaatttccaaccttacaaaacaagatgcgagccatcctgcgcatagaagtggaggccgtgcggtttctgaaggaggagccacacaagctggacagtctcctgaagcgtgtgcgcagcatgacagacgtcctgaccatgctgcggaggtgaccgggccctcatcgtgctgggggtggcctgcggaggggtgcactgggaaaccgagagtggacgtttgggacttcagccttccaccatgctcccaggacacatccagtgtcctgaggaaaagccccaagtccttctcacccttgaacttttattgcaatatggcttgaggttctaattcttcaacacaggattgctaggtggagcccatcctagggtttaaaattaatagacacagtaaacattgttttaaaatcatctgaaaggccaggtgtggtggccactcaggaggtacaggcagaaggatcccttgagcccaggagtatgaggctgcagtgagctatgactgagccactgcactccagcctgggcaacagagaaagactccatttcttttaaaaaaatcatcggaaggtgggttttttaaaataacattttgaagttgaaaaattgattgaaatagtttattagcctccttcacttcaggggcatagat

SEQ ID NO: 459491 - DNA, 1493 bp, Homo sapiens
catggaagaaacatttctcgttagttcagcattggttttagttatgctgatttccgggacaggaaaaatgccttcctactcagaattaactttcatagagtagaaacaaaacctctgaatgtccgtgaaatagttttaacaagagtggatactgctcctttaaaccacatattttgactaaaagcttccttctgtaaaaaacccaaggcttgcatttagtcaccatgaagacaggcaaagctgaaagcattggagagaggggtggtttcgaggtctctgcaagtctagaaagtttcttctagaaaagaaaggctcacggaaaatgtaagatgcagagagaacttgtttatgcaagaggagatggccctggggcccctcgccccggatctactgctcatccaccccatgcgattccaaattccccaccgtctactccagtgccccattccatgcccccctccccgtccagaattccttatgggggcacccgctccatggttgttcctggcaatgccaccatccccagggacagaatctccagcctgccagtctccagacccatctctccaagcccaagcgccattttagaaagaagagatgtcaagcctgatgaagacatgagtggcaaaaacattgcaatgtacagaaatgagggtttctatgctgatccttacctttatcacgagggacggatgagcatagcctcatcccatggtggacacccactggatgtccccgaccacatcattgcatatcaccgcaccgccatccggtcagcgagtgcttattgtaacccctcaatgcaagcggaaatgcatatggaacaatcactgtacagacagaaatcaaggaaatatccggatagccatttgcctacactgggctccaaaacaccccctgcctctcctcacagagtcagtgacctgaggatgatagacatgcacgctcactataatgcccacggcccccctcacaccatgcagccagaccgggcctctccgagccgccaggcctttaaaaaggagccaggcaccttggtgtatatagaaaagccacggagcgctgcaggattatccagccttgtagacctcggccctcctctaatggagaagcaagtttttgcctacagcacggcgacaatacccaaagacagagagaccaggattgaagaaaagcagtaaagtggtacatctcaaggtagccctgaatgcacctctgctcttactgtcattcattttactccagcaccactgcggatagagtccctgtgggacgaatgaggacactgggcaactttcacctggggctgagcattcttccgaggaagtcattcatttcccaagagtgtgtgcaagtctgtgccccccatgtggcaggaagagtgaccaaccaccactcccattttttctgagatgctactgtgacttgggtcaataagcttgacattgctgatggatgttcactaacctgctttccttatttgaatttcttac

SEQ ID NO: 459492 - DNA, 718 bp, Homo sapiens
caatcactgtacagacagaaatcaaggaaatatccggatagccatttgcctacactgggctccaaaacaccccctgcctctcctcacagagtcagtgacctgaggatgatagacatgcacgctcactataatgcccacggcccccctcacaccatgcagccagaccgggcctctccgagccgccaggcctttaaaaaggagccaggcaccttggtgtatatagaaaagccacggagcgctgcaggattatccagccttgtagacctcggccctcctctaatggagaagcaagtttttgcctacagcacggcgacaatacccaaagacagagagaccaggtaaggtgcagtgagggtgaccgagggtggtacctgggcccatgtgtcactgtgggcagctctacaggggtcaaaccgacagaataaatgtctgagcacccatctctgcagcatgtcctgtggatgctgcaggagtcacagagtggtgtcaaagccaccattgtctgcaaatagtttctaaattggcaggggttacagtcattaagccatgttcaagaagacaggtgcagcaacaatagtaatcagtcccttgtgcctctggagcatggatctaagagcattatcatttgtataaatctgaataatttggaagaaaattgtcattagcagaagacagatgaaaagatcaaaaggtcataataattgatctgctactgctg

SEQ ID NO: 459493 - DNA, 431 bp, Homo sapiens
attcatatatatgcatattttttgtaatgagagaattaggcctttttagaattaccagtcatctgcattgggatgggatgcatagcttagactttcctttgtggccttctgagttctctgatgcacttttctcataggaacgccccatgtgtctggtgggaagatgctcagtgctctggagtccacggtgcctcccagccagcctccacctgtgggcacctcagccatccacatgagcctgcttgagatgaggcggagcgtggcggaactcaggctccagctccagcagatgcggcagctccaggtattcctcatgcacggcggcctctgtctcggttgccctgagctcttcctaccttccttttcctaggggctccgtgaagacctagagaatgtagaaccatagaaacagcatggcttcctctctcaca

SEQ ID NO: 459494 - DNA, 2061 bp, Homo sapiens
atcacgctgaggtccgcgcgcccccggagtctggggagcagggctccgccaatccgaggggagggcgaaggaagtaccatttatttagcgctgtgtgtgtgctcttatttccactggccttacaagaccgtgcactgtgtagatgaggaaactgagtcataataaatatgtgctgaaccgttcgggggtcacacggtgctgaaatggtttcgagtcaactcgctcggacggcactcggcctcagcctccggccctggaaccctctccagggacgggaccagcccttgttctgttccctaccggtaccacaggaatcttgacgaacggcccaaatgcctggccgctgtcagagtgacgccgcgatgagagtaaacgggccagcatcccgtgcaccagcggggtggaccagcgggagtctgcacacaggcccccgagcaggacgccctcgtgcgcaggcgcggggtgtacgtgggcggggcctcctcctccggccccgcccagcgaaggagcttcctcttccgaggaaaggcggggcctgggcgcccgcgggaaacccgggcccgttgcatccgctgggtgtagccgtggggatggcaggttcggggaggctggtcctacggccctggattcgggagctgattctggggtcagagacaccctccagtccacgagccgggcagctgcttgaggtactacaggacgccgaggccgcggtcgcgggcccatcccacgcccctgatacgtccgacgtcggggccacgctgcttgtgtctgacgggacccacagtgtccgatgcctggtgacgcgggaggccctggacacctcggactgggaggagaaggagttcggcttccgcgggacagagggccggctgctgctgctgcaggactgcggggttcatgtccaggtcgctgagggcggcgcgcccgcagagttctatctccaggtggaccgcttcagcctgctgcccacggagcagccccggctacgggtgcctggttgcaaccaagacttagatgttcagaaaaagctctatgactgccttgaggagcacctttcagagtccacctcgtccaatgcaggcctatcactgtcccagcttctggatgaaatgcgggaggaccaggagcatcagggggcactcgtgtgcctggctgaaagctgcctgacactggagggcccttgcacagcaccccctgtcacccactgggctgcctcacgatgcaaggccacgggagaagctgtgtacactgtccccagctcaatgctgtgcatctctgagaatgaccagctaattctgagctctctaggcccctgtcagaggacacagggccctgagctgcccccaccagacccggctctgcaggacctatctctgaccctcatagcctctcctccttcctcacccagttcctcaggaaccccggccttacccggccacatgtcatccgaggaaagtggtaccagcatcagccttctgcctgccctgtccttggctgctccagacccagggcagagaagcagctcccagccctcaccagccatctgctcagcccctgccaccctgacccccaggtccccacacgccagccgtacccccagctccccactccagagctgcactcccagtctctcaccccgtagccatgtccccagtccacaccaggctcttgtgaccaggccccagaaacctagcctggagttcaaggagtttgtagggttgccctgcaagaatcggccgccttttcccaggaccggagctaccaggggagcccaggagccctgctctgtctgggaacccccaaagaggcatcgtgatggttctgccttccagtatgagtatgagccaccctgcacgtccctctgtgctcgggtccaagctgtcaggcttcctccccagctcatggcctgggccttgcactttctgatggatgcacagccagggtctgagccaactccgatgtgagacgtcacgcaggacagataccgctccacactctgcttcctttgagttttttaataaaataatctcatgcggcaggagaggagaggatcaggga

SEQ ID NO: 459495 - DNA, 1222 bp, Homo sapiens
atcacgctgaggtccgcgcgcccccggagtctggggagcagggctccgccaatccgaggggagggcgaaggaagtaccatttatttagcgctgtgtgtgtgctcttatttccactggccttacaagaccgtgcactgtgtagatgaggaaactgagtcataataaatatgtgctgaaccgttcgggggtcacacggtgctgaaatggtttcgagtcaactcgctcggacggcactcggcctcagcctccggccctggaaccctctccagggacgggaccagcccttgttctgttccctaccggtaccacaggaatcttgacgaacggcccaaatgcctggccgctgtcagagtgacgccgcgatgagagtaaacgggccagcatcccgtgcaccagcggggtggaccagcgggagtctgcacacaggcccccgagcaggacgccctcgtgcgcaggcgcggggtgtacgtgggcggggcctcctcctccggccccgcccagcgaaggagcttcctcttccgaggaaaggcggggcctgggcgcccgcgggaaacccgggcccgttgcatccgctgggtgtagccgtggggatggcaggttcggggaggctggtcctacggccctggattcgggagctgattctggggtcagagacaccctccagtccacgagccgggcagctgcttgaggtactacaggacgccgaggccgcggtcgcgggcccatcccacgcccctgatacgtccgacgtcggggccacgctgcttgtgtctgacgggacccacagtgtccgatgcctggtgacgcgggaggccctggacacctcggactgggaggagaaggagttcggcttccgcgggacagagggccggctgctgctgctgcaggactgcggggttcatgtccaggtcgctgagggcggcgcgcccgcagagttctatctccaggtggaccgcttcagcctgctgcccacggagcagccccggctacgggtgcctggttggtaagtgatgcctccgccctccagcagctctccccaccccagcctggccggcgctggcagacgcctatggggtaggagggcttgggcccccattaactacccttctctttttcttagcaaccaagacttagatgttcagaaaaagctctatgactgccttgagtgagtctggggttgggctcgggggccacgtgttgtttggtgaggggatggtgtatc

SEQ ID NO: 459496 - DNA, 1298 bp, Homo sapiens
atcacgctgaggtccgcgcgcccccggagtctggggagcagggctccgccaatccgaggggagggcgaaggaagtaccatttatttagcgctgtgtgtgtgctcttatttccactggccttacaagaccgtgcactgtgtagatgaggaaactgagtcataataaatatgtgctgaaccgttcgggggtcacacggtgctgaaatggtttcgagtcaactcgctcggacggcactcggcctcagcctccggccctggaaccctctccagggacgggaccagcccttgttctgttccctaccggtaccacaggaatcttgacgaacggcccaaatgcctggccgctgtcagagtgacgccgcgatgagagtaaacgggccagcatcccgtgcaccagcggggtggaccagcgggagtctgcacacaggcccccgagcaggacgccctcgtgcgcaggcgcggggtgtacgtgggcggggcctcctcctccggccccgcccagcgaaggagcttcctcttccgaggaaaggcggggcctgggcgcccgcgggaaacccgggcccgttgcatccgctgggtgtagccgtggggatggcaggttcggggaggctggtcctacggccctggattcgggagctgattctggggtcagagacaccctccagtccacgagccgggcagctgcttgaggtgagcccccattcagggcccggagaccgaggcggaggcccggggtggtgggattgacgccgctcgccgccgtcaggtactacaggacgccgaggccgcggtcgcgggcccatcccacgcccctgatacgtccgacgtcggggccacgctgcttgtgtctgacgggacccacagtgtccgatgcctggtgacgcgggaggccctggacacctcggactgggaggagaaggagttcggcttccgcgggacagagggccggctgctgctgctgcaggactgcggggttcatgtccaggtcgctgagggcggcgcgcccgcagagttctatctccaggtggaccgcttcagcctgctgcccacggagcagccccggctacgggtgcctggttggtaagtgatgcctccgccctccagcagctctccccaccccagcctggccggcgctggcagacgcctatggggtaggagggcttgggcccccattaactacccttctctttttcttagcaaccaagacttagatgttcagaaaaagctctatgactgccttgagtgagtctggggttgggctcgggggccacgtgttgtttggtgaggggatggtgtatc

SEQ ID NO: 459497 - DNA, 2041 bp, Homo sapiens
atcacgctgaggtccgcgcgcccccggagtctggggagcagggctccgccaatccgaggggagggcgaaggaagtaccatttatttagcgctgtgtgtgtgctcttatttccactggccttacaagaccgtgcactgtgtagatgaggaaactgagtcataataaatatgtgctgaaccgttcgggggtcacacggtgctgaaatggtttcgagtcaactcgctcggacggcactcggcctcagcctccggccctggaaccctctccagggacgggaccagcccttgttctgttccctaccggtaccacaggaatcttgacgaacggcccaaatgcctggccgctgtcagagtgacgccgcgatgagagtaaacgggccagcatcccgtgcaccagcggggtggaccagcgggagtctgcacacaggcccccgagcaggacgccctcgtgcgcaggcgcggggtgtacgtgggcggggcctcctcctccggccccgcccagcgaaggagcttcctcttccgaggaaaggcggggcctgggcgcccgcgggaaacccgggcccgttgcatccgctgggtgtagccgtggggatggcaggttcggggaggctggtcctacggccctggattcgggagctgattctggggtcagagacaccctccagtccacgagccgggcagctgcttgaggtactacaggacgccgaggccgcggtcgcgggcccatcccacgcccctgatacgtccgacgtcggggccacgctgcttgtgtctgacgggacccacagtgtccgatgcctggtgacgcgggaggccctggacacctcggactgggaggagaaggagttcggcttccgcgggacagagggccggctgctgctgctgcaggactgcggggttcatgtccaggtcgctgagggcggcgcgcccgcagagttctatctccaggtggaccgcttcagcctgctgcccacggagcagccccggctacgggtgcctggttgcaaccaagacttagatgttcagaaaaagctctatgactgccttgaggagcacctttcagagtccacctcgtccaatgcaggcctatcactgtcccagcttctggatgaaatgcgggaggaccaggagcatcagggggcactcgtgtgcctggctgaaagctgcctgacactggagggcccttgcacagcaccccctgtcacccactgggctgcctcacgatgcaaggccacgggagaagctgtgtacactgtccccagctcaatgctgtgcatctctgagaatgaccagctaattctgagctctctaggcccctgtcagaggacacagggccctgagctgcccccaccagacccggctctgcaggacctatctctgaccctcatagcctctcctccttcctcacccagttcctcaggaaccccggccttacccggccacatgtcatccgaggaaagtggtaccagcatcagccttctgcctgccctgtccttggctgctccagacccagggcagagaagcagctcccagccctcaccagccatctgctcagcccctgccaccctgacccccaggtccccacacgccagccgtacccccagctccccactccagagctgcactcccagtctctcaccccgtagccatgtccccagtccacaccaggctcttgtgaccaggccccagaaacctagcctggagttcaaggagtttgtagggttgccctgcaagaatcggccgccttttcccaggaccggagctaccaggggagcccaggagccctgctctgtctgggaacccccaaagaggcatcgtgatggttctgccttccagtatgagtatgagccaccctgcacgtccctctgtgctcgggtccaagctgtcaggcttcctccccagctcatggcctgggccttgcactttctgatggatgcacagccagggtctgagccaactccgatgtgagacgtcacgcaggacagataccgctccacactctgcttcctttgagttttttaataaaataatctcatgcggca

SEQ ID NO: 459498 - DNA, 2394 bp, Homo sapiens
atcacgctgaggtccgcgcgcccccggagtctggggagcagggctccgccaatccgaggggagggcgaaggaagtaccatttatttagcgctgtgtgtgtgctcttatttccactggccttacaagaccgtgcactgtgtagatgaggaaactgagtcataataaatatgtgctgaaccgttcgggggtcacacggtgctgaaatggtttcgagtcaactcgctcggacggcactcggcctcagcctccggccctggaaccctctccagggacgggaccagcccttgttctgttccctaccggtaccacaggaatcttgacgaacggcccaaatgcctggccgctgtcagagtgacgccgcgatgagagtaaacgggccagcatcccgtgcaccagcggggtggaccagcgggagtctgcacacaggcccccgagcaggacgccctcgtgcgcaggcgcggggtgtacgtgggcggggcctcctcctccggccccgcccagcgaaggagcttcctcttccgaggaaaggcggggcctgggcgcccgcgggaaacccgggcccgttgcatccgctgggtgtagccgtggggatggcaggttcggggaggctggtcctacggccctggattcgggagctgattctggggtcagagacaccctccagtccacgagccgggcagctgcttgaggtactacaggacgccgaggccgcggtcgcgggcccatcccacgcccctgatacgtccgacgtcggggccacgctgcttgtgtctgacgggacccacagtgtccgatgcctggtgacgcgggaggccctggacacctcggactgggaggagaaggagttcggcttccgcgggacagagggccggctgctgctgctgcaggactgcggggttcatgtccaggtcgctgagggcggcgcgcccgcagagttctatctccaggtggaccgcttcagcctgctgcccacggagcagccccggctacgggtgcctggttgcaaccaagacttagatgttcagaaaaagctctatgactgccttgaggagcacctttcagagtccacctcgtccaatgcaggcctatcactgtcccagcttctggatgaaatgcgggaggaccaggagcatcagggggcactcgtgtgcctggctgaaagctgcctgacactggagggcccttgcacagcaccccctgtcacccactgggctgcctcacgatgcaaggccacgggagaagctgtgtacactgtccccagctcaatgctgtgcatctctgagaatgaccagctaattctgagctctctaggcccctgtcagaggacacagggccctgagctgcccccaccagacccggctctgcaggacctatctctgaccctcatagcctctcctccttcctcacccagttcctcaggaaccccggccttacccggccacatgtcatccgaggaaagtggtaccagcatcagccttctgcctgccctgtccttggctgctccagacccagggcagagaagcagctcccagccctcaccagccatctgctcagcccctgccaccctgacccccaggtccccacacgccagccgtacccccagctccccactccagagctgcactcccagtctctcaccccgtagccatgtccccagtccacaccaggctcttgtgaccaggccccagaaacctagcctggagttcaaggagtttgtagggttgccctgcaagaatcggccgccttttcccaggaccggagctaccaggggagcccaggagccctgctctgtctgggaacccccaaagaggcatcgtgatggttctgccttccagtatgagtatgagccaccctgcacgtccctctgtgctcgggtccaagctgtcaggcttcctccccagctcatggcctgggccttgcactttctgatggatgcacagccagggtctgagccaactccgatgtgagacgtcacgcaggacagataccgctccacactctgcttcctttgagttttttaataaaataatctcatgcggcaaaaaaaaaaaaaaaaaaaaaaaaaaaatttgggggccgcctggccccaaaaattttaagacacacttccgctgttgtggggcggcggcggccccccagtgtaggttatcgtcgacccacgtgggcccatacagctggttcccccagaggagaatccgcgggcacaggacactagcgtggtctggtgttttcctcccccatattaaaaaaacgccccggggggcaaaccacgaagcctgttccggataaccattatcccaaatagggactcccgggaggccactctgcggggatcttattccacagggtgtccccaagcgagactcggatttatcaatttagcccgcccgtgga

SEQ ID NO: 459499 - DNA, 2118 bp, Homo sapiens
atcacgctgaggtccgcgcgcccccggagtctggggagcagggctccgccaatccgaggggagggcgaaggaagtaccatttatttagcgctgtgtgtgtgctcttatttccactggccttacaagaccgtgcactgtgtagatgaggaaactgagtcataataaatatgtgctgaaccgttcgggggtcacacggtgctgaaatggtttcgagtcaactcgctcggacggcactcggcctcagcctccggccctggaaccctctccagggacgggaccagcccttgttctgttccctaccggtaccacaggaatcttgacgaacggcccaaatgcctggccgctgtcagagtgacgccgcgatgagagtaaacgggccagcatcccgtgcaccagcggggtggaccagcgggagtctgcacacaggcccccgagcaggacgccctcgtgcgcaggcgcggggtgtacgtgggcggggcctcctcctccggccccgcccagcgaaggagcttcctcttccgaggaaaggcggggcctgggcgcccgcgggaaacccgggcccgttgcatccgctgggtgtagccgtggggatggcaggttcggggaggctggtcctacggccctggattcgggagctgattctggggtcagagacaccctccagtccacgagccgggcagctgcttgaggtactacaggacgccgaggccgcggtcgcgggcccatcccacgcccctgatacgtccgacgtcggggccacgctgcttgtgtctgacgggacccacagtgtccgatgcctggtgacgcgggaggccctggacacctcggactgggaggagaaggagttcggcttccgcgggacagagggccggctgctgctgctgcaggactgcggggttcatgtccaggtcgctgagggcggcgcgcccgcagagttctatctccaggtggaccgcttcagcctgctgcccacggagcagccccggctacgggtgcctggttgcaaccaagacttagatgttcagaaaaagctctatgactgccttgaggagcacctttcagagtccacctcgtccaatgcaggcctatcactgtcccagcttctggatgaaatgcgggaggaccaggagcatcagggggcactcgtgtgcctggctgaaagctgcctgacactggagggcccttgcacagcaccccctgtcacccactgggctgcctcacgatgcaaggccacgggagaagctgtgtacactgtccccagctcaatgctgtgcatctctgagaatgaccagctaattctgagctctctaggcccctgtcagaggacacagggccctgagctgcccccaccagacccggctctgcaggacctatctctgaccctcatagcctctcctccttcctcacccagttcctcaggaaccccggccttacccggccacatgtcatccgaggaaagtggtaccagcatcagccttctgcctgccctgtccttggctgctccagacccagggcagagaagcagctcccagccctcaccagccatctgctcagcccctgccaccctgacccccaggtccccacacgccagccgtacccccagctccccactccagagctgcactcccagtctctcaccccgtagccatgtccccagtccacaccaggctcttgtgaccaggccccagaaacctagcctggagttcaaggagtttgtagggttgccctgcaagaatcggccgccttttcccaggaccggagctaccaggggagcccaggagccctgctctgtctgggaacccccaaagaggcatcgtgatggttctgccttccagtatgagtatgagccaccctgcacgtccctctgtgctcgggtccaagctgtcaggtgagtgcctgggtctgccccaactcttggtcactagtcccaggctccattgacctgcagcggtggtttctttccaggcttcctccccagctcatggcctgggccttgcactttctgatggatgcacagccagggtctgagccaactccgatgtgagacgtcacgcaggacagataccgctccacactctgcttcctttgagttttttaataaaataatctcatgcggca

SEQ ID NO: 459500 - DNA, 2250 bp, Homo sapiens
atcacgctgaggtccgcgcgcccccggagtctggggagcagggctccgccaatccgaggggagggcgaaggaagtaccatttatttagcgctgtgtgtgtgctcttatttccactggccttacaagaccgtgcactgtgtagatgaggaaactgagtcataataaatatgtgctgaaccgttcgggggtcacacggtgctgaaatggtttcgagtcaactcgctcggacggcactcggcctcagcctccggccctggaaccctctccagggacgggaccagcccttgttctgttccctaccggtaccacaggaatcttgacgaacggcccaaatgcctggccgctgtcagagtgacgccgcgatgagagtaaacgggccagcatcccgtgcaccagcggggtggaccagcgggagtctgcacacaggcccccgagcaggacgccctcgtgcgcaggcgcggggtgtacgtgggcggggcctcctcctccggccccgcccagcgaaggagcttcctcttccgaggaaaggcggggcctgggcgcccgcgggaaacccgggcccgttgcatccgctgggtgtagccgtggggatggcaggttcggggaggctggtcctacggccctggattcgggagctgattctggggtcagagacaccctccagtccacgagccgggcagctgcttgaggtactacaggacgccgaggccgcggtcgcgggcccatcccacgcccctgatacgtccgacgtcggggccacgctgcttgtgtctgacgggacccacagtgtccgatgcctggtgacgcgggaggccctggacacctcggactgggaggagaaggagttcggcttccgcgggacagagggccggctgctgctgctgcaggactgcggggttcatgtccaggtcgctgagggcggcgcgcccgcagagttctatctccaggtggaccgcttcagcctgctgcccacggagcagccccggctacgggtgcctggttgcaaccaagacttagatgttcagaaaaagctctatgactgccttgaggagcacctttcagagtccacctcgtccaatgcaggcctatcactgtcccagcttctggatgaaatgcgggaggaccaggagcatcagggggcactcgtgtgcctggctgaaagctgcctgacactggagggcccttgcacagcaccccctgtcacccactgggctgcctcacgatgcaaggccacgggagaagctgtgtacactgtccccagctcaatgctgtgcatctctgagaatgaccagctaattctgagctctctaggcccctgtcagaggacacagggccctgagctgcccccaccagacccggctctgcaggacctatctctgaccctcatagcctctcctccttcctcacccagttcctcaggaaccccggccttacccggccacatgtcatccgaggaaagtggtaccagcatcagccttctgcctgccctgtccttggctgctccagacccagggcagagaagcagctcccagccctcaccagccatctgctcagcccctgccaccctgacccccaggtccccacacgccagccgtacccccagctccccactccagagctgcactcccagtctctcaccccgtagccatgtccccagtccacaccaggctcttgtgaccaggccccagaaacctagcctggagttcaaggagtttgtagggttgccctgcaagaatcggccgccttttcccaggaccggagctaccaggggagcccaggagccctgctctgtctgggtgagcatagcccctctgcagctggagggtagaacaaggaaggcctgaggtagagctgggagggagcatgggtagccttggatggggttggggtccttgttagctcttccccagacaccatacccctttcaggaacccccaaagaggcatcgtgatggttctgccttccagtatgagtatgagccaccctgcacgtccctctgtgctcgggtccaagctgtcaggtgagtgcctgggtctgccccaactcttggtcactagtcccaggctccattgacctgcagcggtggtttctttccaggcttcctccccagctcatggcctgggccttgcactttctgatggatgcacagccagggtctgagccaactccgatgtgagacgtcacgcaggacagataccgctccacactctgcttcctttgagttttttaataaaataatctcatgcggca

SEQ ID NO: 459501 - DNA, 2193 bp, Homo sapiens
atcacgctgaggtccgcgcgcccccggagtctggggagcagggctccgccaatccgaggggagggcgaaggaagtaccatttatttagcgctgtgtgtgtgctcttatttccactggccttacaagaccgtgcactgtgtagatgaggaaactgagtcataataaatatgtgctgaaccgttcgggggtcacacggtgctgaaatggtttcgagtcaactcgctcggacggcactcggcctcagcctccggccctggaaccctctccagggacgggaccagcccttgttctgttccctaccggtaccacaggaatcttgacgaacggcccaaatgcctggccgctgtcagagtgacgccgcgatgagagtaaacgggccagcatcccgtgcaccagcggggtggaccagcgggagtctgcacacaggcccccgagcaggacgccctcgtgcgcaggcgcggggtgtacgtgggcggggcctcctcctccggccccgcccagcgaaggagcttcctcttccgaggaaaggcggggcctgggcgcccgcgggaaacccgggcccgttgcatccgctgggtgtagccgtggggatggcaggttcggggaggctggtcctacggccctggattcgggagctgattctggggtcagagacaccctccagtccacgagccgggcagctgcttgaggtactacaggacgccgaggccgcggtcgcgggcccatcccacgcccctgatacgtccgacgtcggggccacgctgcttgtgtctgacgggacccacagtgtccgatgcctggtgacgcgggaggccctggacacctcggactgggaggagaaggagttcggcttccgcgggacagagggccggctgctgctgctgcaggactgcggggttcatgtccaggtcgctgagggcggcgcgcccgcagagttctatctccaggtggaccgcttcagcctgctgcccacggagcagccccggctacgggtgcctggttgcaaccaagacttagatgttcagaaaaagctctatgactgccttgaggagcacctttcagagtccacctcgtccaatgcaggcctatcactgtcccagcttctggatgaaatgcgggaggaccaggagcatcagggggcactcgtgtgcctggctgaaagctgcctgacactggagggcccttgcacagcaccccctgtcacccactgggctgcctcacgatgcaaggccacgggagaagctgtgtacactgtccccagctcaatgctgtgcatctctgagaatgaccagctaattctgagctctctaggcccctgtcagaggacacagggccctgagctgcccccaccagacccggctctgcaggacctatctctgaccctcatagcctctcctccttcctcacccagttcctcaggaaccccggccttacccggccacatgtcatccgaggaaagtggtaccagcatcagccttctgcctgccctgtccttggctgctccagacccagggcagagaagcagctcccagccctcaccagccatctgctcagcccctgccaccctgacccccaggtccccacacgccagccgtacccccagctccccactccagagctgcactcccagtctctcaccccgtagccatgtccccagtccacaccaggctcttgtgaccaggccccagaaacctagcctggagttcaaggagtttgtagggttgccctgcaagaatcggccgccttttcccaggaccggagctaccaggggagcccaggagccctgctctgtctgggtgagcatagcccctctgcagctggagggtagaacaaggaaggcctgaggtagagctgggagggagcatgggtagccttggatggggttggggtccttgttagctcttccccagacaccatacccctttcaggaacccccaaagaggcatcgtgatggttctgccttccagtatgagtatgagccaccctgcacgtccctctgtgctcgggtccaagctgtcaggcttcctccccagctcatggcctgggccttgcactttctgatggatgcacagccagggtctgagccaactccgatgtgagacgtcacgcaggacagataccgctccacactctgcttcctttgagttttttaataaaataatctcatgcggcaggagaggagaggatcaggga

SEQ ID NO: 459502 - DNA, 2002 bp, Homo sapiens
atcacgctgaggtccgcgcgcccccggagtctggggagcagggctccgccaatccgaggggagggcgaaggaagtaccatttatttagcgctgtgtgtgtgctcttatttccactggccttacaagaccgtgcactgtgtagatgaggaaactgagtcataataaatatgtgctgaaccgttcgggggtcacacggtgctgaaatggtttcgagtcaactcgctcggacggcactcggcctcagcctccggccctggaaccctctccagggacgggaccagcccttgttctgttccctaccggtaccacaggaatcttgacgaacggcccaaatgcctggccgctgtcagagtgacgccgcgatgagagtaaacgggccagcatcccgtgcaccagcggggtggaccagcgggagtctgcacacaggcccccgagcaggacgccctcgtgcgcaggcgcggggtgtacgtgggcggggcctcctcctccggccccgcccagcgaaggagcttcctcttccgaggaaaggcggggcctgggcgcccgcgggaaacccgggcccgttgcatccgctgggtgtagccgtggggatggcaggttcggggaggctggtcctacggccctggattcgggagctgattctggggtcagagacaccctccagtccacgagccgggcagctgcttgaggtactacaggacgccgaggccgcggtcgcgggcccatcccacgcccctgatacgtccgacgtcggggccacgctgcttgtgtctgacgggacccacagtgtccgatgcctggtgacgcgggaggccctggacacctcggactgggaggagaaggagttcggcttccgcgggacagagggccggctgctgctgctgcaggactgcggggttcatgtccaggtcgctgagggcggcgcgcccgcagagttctatctccaggtggaccgcttcagcctgctgcccacggagcagccccggctacgggtgcctggttgcaaccaagacttagatgttcagaaaaagctctatgactgccttgaggagcacctttcagagtccacctcgtccaatgcaggcctatcactgtcccagcttctggatgaaatgcgggaggaccaggagcatcagggggcactcgtgtgcctggctgaaagctgcctgacactggagggcccttgcacagcaccccctgtcacccactgggctgcctcacgatgcaaggccacgggagaagctgtgtacactgtccccagctcaatgctgtgcatctctgagaatgaccagctaattctgagctctctaggcccctgtcagaggacacagggccctgagctgcccccaccagacccggctctgcaggacctatctctgaccctcatagcctctcctccttcctcacccagttcctcaggaaccccggccttacccggccacatgtcatccgaggaaagtggtaccagcatcagccttctgcctgccctgtccttggctgctccagacccagggcagagaagcagctcccagccctcaccagccatctgctcagcccctgccaccctgacccccaggtccccacacgccagccgtacccccagctccccactccagagctgcactcccagtctctcaccccgtagccatgtccccagtccacaccaggctcttgtgaccaggccccagaaacctagcctggagttcaaggagtttgtagggttgccctgcaagaatcggccgccttttcccaggaccggagctaccaggggagcccaggagccctgctctgtctggtatgagtatgagccaccctgcacgtccctctgtgctcgggtccaagctgtcaggcttcctccccagctcatggcctgggccttgcactttctgatggatgcacagccagggtctgagccaactccgatgtgagacgtcacgcaggacagataccgctccacactctgcttcctttgagttttttaataaaataatctcatgcggca

SEQ ID NO: 459503 - DNA, 2117 bp, Homo sapiens
atcacgctgaggtccgcgcgcccccggagtctggggagcagggctccgccaatccgaggggagggcgaaggaagtaccatttatttagcgctgtgtgtgtgctcttatttccactggccttacaagaccgtgcactgtgtagatgaggaaactgagtcataataaatatgtgctgaaccgttcgggggtcacacggtgctgaaatggtttcgagtcaactcgctcggacggcactcggcctcagcctccggccctggaaccctctccagggacgggaccagcccttgttctgttccctaccggtaccacaggaatcttgacgaacggcccaaatgcctggccgctgtcagagtgacgccgcgatgagagtaaacgggccagcatcccgtgcaccagcggggtggaccagcgggagtctgcacacaggcccccgagcaggacgccctcgtgcgcaggcgcggggtgtacgtgggcggggcctcctcctccggccccgcccagcgaaggagcttcctcttccgaggaaaggcggggcctgggcgcccgcgggaaacccgggcccgttgcatccgctgggtgtagccgtggggatggcaggttcggggaggctggtcctacggccctggattcgggagctgattctggggtcagagacaccctccagtccacgagccgggcagctgcttgaggtgagcccccattcagggcccggagaccgaggcggaggcccggggtggtgggattgacgccgctcgccgccgtcaggtactacaggacgccgaggccgcggtcgcgggcccatcccacgcccctgatacgtccgacgtcggggccacgctgcttgtgtctgacgggacccacagtgtccgatgcctggtgacgcgggaggccctggacacctcggactgggaggagaaggagttcggcttccgcgggacagagggccggctgctgctgctgcaggactgcggggttcatgtccaggtcgctgagggcggcgcgcccgcagagttctatctccaggtggaccgcttcagcctgctgcccacggagcagccccggctacgggtgcctggttgcaaccaagacttagatgttcagaaaaagctctatgactgccttgaggagcacctttcagagtccacctcgtccaatgcaggcctatcactgtcccagcttctggatgaaatgcgggaggaccaggagcatcagggggcactcgtgtgcctggctgaaagctgcctgacactggagggcccttgcacagcaccccctgtcacccactgggctgcctcacgatgcaaggccacgggagaagctgtgtacactgtccccagctcaatgctgtgcatctctgagaatgaccagctaattctgagctctctaggcccctgtcagaggacacagggccctgagctgcccccaccagacccggctctgcaggacctatctctgaccctcatagcctctcctccttcctcacccagttcctcaggaaccccggccttacccggccacatgtcatccgaggaaagtggtaccagcatcagccttctgcctgccctgtccttggctgctccagacccagggcagagaagcagctcccagccctcaccagccatctgctcagcccctgccaccctgacccccaggtccccacacgccagccgtacccccagctccccactccagagctgcactcccagtctctcaccccgtagccatgtccccagtccacaccaggctcttgtgaccaggccccagaaacctagcctggagttcaaggagtttgtagggttgccctgcaagaatcggccgccttttcccaggaccggagctaccaggggagcccaggagccctgctctgtctgggaacccccaaagaggcatcgtgatggttctgccttccagtatgagtatgagccaccctgcacgtccctctgtgctcgggtccaagctgtcaggcttcctccccagctcatggcctgggccttgcactttctgatggatgcacagccagggtctgagccaactccgatgtgagacgtcacgcaggacagataccgctccacactctgcttcctttgagttttttaataaaataatctcatgcggca

SEQ ID NO: 459504 - DNA, 1463 bp, Homo sapiens
actagttccagagtcgggagcgtgctgcccttcttggaattcgagagagactgattctgaaggtcagagacaccctccagataccacagagaccgagcagactgcattgaggtactacaggacgccgaggccgcggtcgcgggcccatcccacgcccctgatacgtccgacgtcggggccacgctgcttgtgtctgacgggacccacagtgtccgatgcctggtgacgcgggaggccctggacacctcggactgggaggagaaggagttcggcttccgcgggacagagggccggctgctgctgctgcaggactgcggggttcatgtccaggtcgctgagggcggcgcgcccgcagagttctatctccaggtggaccgcttcagcctgctgcccacggagcagccccggctacgggtgcctggttgcaaccaagacttagatgttcagaaaaagctctatgactgccttgaggagcacctttcagagtccacctcgtccaatgcaggcctatcactgtcccagcttctggatgaaatgcgggaggaccaggagcatcagggggcactcgtgtgcctggctgaaagctgcctgacactggagggcccttgcacagcaccccctgtcacccactgggctgcctcacgatgcaaggccacgggagaagctgtgtacactgtccccagctcaatgctgtgcatctctgagaatgaccagctaattctgagctctctaggcccctgtcagaggacacagggccctgagctgcccccaccagacccggctctgcaggacctatctctgaccctcatagcctctcctccttcctcacccagttcctcaggaaccccggccttacccggccacatgtcatccgaggaaagtggtaccagcatcagccttctgcctgccctgtccttggctgctccagacccagggcagagaagcagctcccagccctcaccagccatctgctcagcccctgccaccctgacccccaggtccccacacgccagccgtacccccagctccccactccagagctgcactcccagtctctcaccccgtagccatgtccccagtccacaccaggctcttgtgaccaggccccagaaacctagcctggagttcaaggagtttgtagggttgccctgcaagaatcggccgccttttcccaggaccggagctaccaggggagcccaggagccctgctctgtctgggaacccccaaagaggcatcgtgatggttctgccttccagtatgagtatgagccaccctgcacgtccctctgtgctcgggtccaagctgtcaggcttcctccccagctcatggcctgggccttgcactttctgatggatgcacagccagggtctgagccaactccgatgtgagacgtcacgcaggacagataccgctccacactctgcttcctttgagttttttaataaaataatctcatgcggca

SEQ ID NO: 459505 - DNA, 2015 bp, Homo sapiens
atcacgctgaggtccgcgcgcccccggagtctggggagcagggctccgccaatccgaggggagggcgaaggaagtaccatttatttagcgctgtgtgtgtgctcttatttccactggccttacaagaccgtgcactgtgtagatgaggaaactgagtcataataaatatgtgctgaaccgttcgggggtcacacggtgctgaaatggtttcgagtcaactcgctcggacggcactcggcctcagcctccggccctggaaccctctccagggacgggaccagcccttgttctgttccctaccggtaccacaggaatcttgacgaacggcccaaatgcctggccgctgtcagagtgacgccgcgatgagagtaaacgggccagcatcccgtgcaccagcggggtggaccagcgggagtctgcacacaggcccccgagcaggacgccctcgtgcgcaggcgcggggtgtacgtgggcggggcctcctcctccggccccgcccagcgaaggagcttcctcttccgaggaaaggcggggcctgggcgcccgcgggaaacccgggcccgttgcatccgctgggtgtagccgtggggatggcaggttcggggaggctggtcctacggccctggattcgggagctgattctggggtcagagacaccctccagtccacgagccgggcagctgcttgagggaggagaaggagttcggcttccgcgggacagagggccggctgctgctgctgcaggactgcggggttcatgtccaggtcgctgagggcggcgcgcccgcagagttctatctccaggtggaccgcttcagcctgctgcccacggagcagccccggctacgggtgcctggttggtaagtgatgcctccgccctccagcagctctccccaccccagcctggccggcgctggcagacgcctatggggtaggagggcttgggcccccattaactacccttctctttttcttagcaaccaagacttagatgttcagaaaaagctctatgactgccttgaggagcacctttcagagtccacctcgtccaatgcaggcctatcactgtcccagcttctggatgaaatgcgggaggaccaggagcatcagggggcactcgtgtgcctggctgaaagctgcctgacactggagggcccttgcacagcaccccctgtcacccactgggctgcctcacgatgcaaggccacgggagaagctgtgtacactgtccccagctcaatgctgtgcatctctgagaatgaccagctaattctgagctctctaggcccctgtcagaggacacagggccctgagctgcccccaccagacccggctctgcaggacctatctctgaccctcatagcctctcctccttcctcacccagttcctcaggaaccccggccttacccggccacatgtcatccgaggaaagtggtaccagcatcagccttctgcctgccctgtccttggctgctccagacccagggcagagaagcagctcccagccctcaccagccatctgctcagcccctgccaccctgacccccaggtccccacacgccagccgtacccccagctccccactccagagctgcactcccagtctctcaccccgtagccatgtccccagtccacaccaggctcttgtgaccaggccccagaaacctagcctggagttcaaggagtttgtagggttgccctgcaagaatcggccgccttttcccaggaccggagctaccaggggagcccaggagccctgctctgtctgggaacccccaaagaggcatcgtgatggttctgccttccagtatgagtatgagccaccctgcacgtccctctgtgctcgggtccaagctgtcaggcttcctccccagctcatggcctgggccttgcactttctgatggatgcacagccagggtctgagccaactccgatgtgagacgtcacgcaggacagataccgctccacactctgcttcctttgagttttttaataaaataatctcatgcggca

SEQ ID NO: 459506 - DNA, 1707 bp, Homo sapiens
atcacgctgaggtccgcgcgcccccggagtctggggagcagggctccgccaatccgaggggagggcgaaggaagtaccatttatttagcgctgtgtgtgtgctcttatttccactggccttacaagaccgtgcactgtgtagatgaggaaactgagtcataataaatatgtgctgaaccgttcgggggtcacacggtgctgaaatggtttcgagtcaactcgctcggacggcactcggcctcagcctccggccctggaaccctctccagggacgggaccagcccttgttctgttccctaccggtaccacaggaatcttgacgaacggcccaaatgcctggccgctgtcagagtgacgccgcgatgagagtaaacgggccagcatcccgtgcaccagcggggtggaccagcgggagtctgcacacaggcccccgagcaggacgccctcgtgcgcaggcgcggggtgtacgtgggcggggcctcctcctccggccccgcccagcgaaggagcttcctcttccgaggaaaggcggggcctgggcgcccgcgggaaacccgggcccgttgcatccgctgggtgtagccgtggggatggcaggttcggggaggctggtcctacggccctggattcgggagctgattctggggtcagagacaccctccagtccacgagccgggcagctgcttgaggtactacaggacgccgaggccgcggtcgcgggcccatcccacgcccctgatacgtccgacgtcggggccacgctgcttgtgtctgacgggacccacagtgtccgatgcctggtgacgcgggaggccctggacacctcggactgggaggagaaggagttcggcttccgcgggacagagggccggctgctgctgctgcaggactgcggggttcatgtccaggtcgctgagggcggcgcgcccgcagagttctatctccaggtggaccgcttcagcctgctgcccacggagcagccccggctacgggtgcctggttgcaaccaagacttagatgttcagaaaaagctctatgactgccttgaggagcacctttcagagtccacctcgtccaatgcaggcctatcactgtcccagcttctggatgaaatgcgggaggaccaggagcatcagggggcactcgtgtgcctggctgaaagctgcctgacactggagggcccttgcacagcaccccctgtcacccactgggctgcctcacgatgcaaggccacgggagaagctgtgtacactgtccccagctcaatgctgtgcatctctgagaatgaccagctaattctgagctctctaggcccctgtcagaggacacagggccctgagctgcccccaccagacccggctctgcaggacctatctctgaccctcatagcctctcctccttcctcacccagttcctcaggaccggagctaccaggggagcccaggagccctgctctgtctgggaacccccaaagaggcatcgtgatggttctgccttccagtatgagtatgagccaccctgcacgtccctctgtgctcgggtccaagctgtcaggcttcctccccagctcatggcctgggccttgcactttctgatggatgcacagccagggtctgagccaactccgatgtgagacgtcacgcaggacagataccgctccacactctgcttcctttgagttttttaataaaataatctcatgcggca

SEQ ID NO: 459507 - DNA, 400 bp, Homo sapiens
tcagggtgaggagttgggcaagggtcatatcccacaggacatgagagtaaacgggcctgtcctacagagttcatgtcccacagggagaagctgtgtacactgtccccagctcaatgctgtgcatctctgagaatgaccagctaattctgagctctctaggcccctgtcagaggacacagggtaagggggactggagaggttggggggatacctggggcccaggtccacagtgctgataagacttcctgaaccccccaggccctgagctgcccccaccagacccggctctgcaggacctatctctgaccctcatagcctctcctccttcctcacccagttcctcaggtgaggtgatgcacaggtcacaggcactcactgccgcctgtcagtcaggttcccg

SEQ ID NO: 459508 - DNA, 336 bp, Homo sapiens
  misc_feature (258)..(258): n is a, c, g, or t
tgacataaagtgccttttgacatcaactattcaatacctttgagactcacttagacaactggactcattgtaggttccacagaaaaacacggacaacattctagttgtcactccaaccagccacactaggagggcacagcctctggtaccctttctgttcctgaaggcatgtacagcggcttctacagcaagcttgcttacctcccaggattcacctcatggtttggacactgattcctgagagagccttgagacacncaaagtgaaaaaaatgtcaagcaggaatgaggcagctctaggatctatactgtagctaataaaatgtaaaaacacctg

SEQ ID NO: 459509 - DNA, 900 bp, Homo sapiens
  misc_feature (51)..(52): n is a, c, g, or t
ggtttattactactgaaggaagaacgtgagtaggttaggatttcggcacgnngagaggcttggggtcttgcgtttcgcccaccatctcctggggacagggtggagtcgatatccgggacgggggggaggttgcggtgcccctcagggctacctctcaagagtgctatcatttccgcaggccagatcagaaaagggagctcaggtaccttccagagagtgagacccagcgcccttgtctcgcacccagtaggctttcatccccgccatggcggagctgatccagaagaagctacagggagaagtggagaaatatcaacagctacagaaggacttaagtaaatccatgtcggggaggcagaaacttgaagcacaactaacagaaaataatatcgtgaaagaggaactggccctgctggatgggtccaacgtggtctttaaacttctgggtccggtgctagtcaaacaggagctgggggaggctcgggccacagtagggaagaggctggactatatcacagctgaaattaagcgatacgaatcccagcttcgggatcttgagcggcagtcagagcaacagagggagacccttgctcagctgcagcaggagttccagcgggcccaggcagcaaaggcaggggctcctggcaaggcctgaccccatggtggggggaggggaggggaggggagggaatgaggcagctctaggatctatactgtagctaataaaatgtaaaaacacctgaaaaaaaaaaaaaaaaaaaaaaaaaaaaaaaaaaaaatcgggggctttttttggggggggggaaaaaagggggtttaaaagtggggctcgggcataggggtttttcggaacccattttttttttacaaggtgggtaaaatgcgggggcccccaaaggg

SEQ ID NO: 459510 - DNA, 742 bp, Homo sapiens
  misc_feature (51)..(52): n is a, c, g, or t
ggtttattactactgaaggaagaacgtgagtaggttaggatttcggcacgnngagaggcttggggtcttgcgtttcgcccaccatctcctggggacagggtggagtcgatatccgggacgggggggaggttgcggtgcccctcagggctacctctcaagagtgctatcatttccgcaggccagatcagaaaagggagctcaggtaccttccagagagtgagacccagcgcccttgtctcgcacccagtaggctttcatccccgccatggcggagctgatccagaagaagctacagggagaagtggagaaatatcaacagctacagaaggacttaagtaaatccatgtcggggaggcagaaacttgaagcacaactaacagaaaataatatcgtgaaagaggaactggccctgctggatgggtccaacgtggtctttaaacttctgggtccggtgctagtcaaacaggagctgggggaggctcgggccacagtagggaagaggctggactatatcacagctgaaattaagcgatacgaatcccagcttcgggatcttgagcggcagtcagagcaacagagggagacccttgctcagctgcagcaggagttccagcgggcccaggcagcaaaggcaggggctcctggcaaggcctgaccccatggtggggggaggggaggggaggggagggaatgaggcagctctaggatctatactgtagctaataaaatgtaaaaacacctg

SEQ ID NO: 459511 - DNA, 1237 bp, Homo sapiens
  misc_feature (51)..(52): n is a, c, g, or t
ggtttattactactgaaggaagaacgtgagtaggttaggatttcggcacgnngagaggcttggggtcttgcgtttcgcccaccatctcctggggacagggtggagtcgatatccgggacgggggggaggttgcggtgcccctcagggctacctctcaagagtgctatcatttccgcaggccagatcagaaaagggagctcaggtaccttccagagagtgagacccagcgcccttgtctcgcacccagtaggctttcatccccgccatggcggagctgatccagaagaagctacagggagaagtggagaaatatcaacagctacagaaggacttaagtaaatccatgtcggggaggcagaaacttgaagcacaactaacagaaaataatatcgtgaaagaggaactggccctgctggatgggtccaacgtggtctttaaacttctgggtccggtgctagtcaaacaggagctgggggaggctcgggccacagtagggaagaggctggactatatcacagctgaaattaagcgatacgaatcccagcttcgggatcttgagcggcagtcagagcaacagagggagacccttgctcagctgcagcaggagttccagcgggcccaggcagcaaaggcaggggctcctggcaaggcctgaccccatggtggggggaggggaggggaggggagggaatgaggcagctctaggatctatactgtagctaataaaatgtaaaaacacctggctctgtttcctgaccaggcacttctgtcatatccccacagccccttccaccttaacacacaccacctgtattaccccctcaggttcaaactcttgcacttggaatctctttgtggcacagtgttctttcttgaaagtgaaatcctaaatgtcttcaaacctacttcttgcctgtatatacaacccttaactctccctcatcttggttggcatgattcttttggaagggcatttgcaacataccatattgctaggaatgtcggtttaattgaaaaagaatacacagttctctaacctgaggccccaggatgaaatgtggttaccctccttgccaacagccctggcatctctattagtacttttcagcctctgtcttcctagaatttgcttgaatgtagctttaaactgacttaaaatcccagcatgtaatgctttatggtattataagtcctcccaagtttatatgttgtccataaagttgttctgcccaattcc

SEQ ID NO: 459512 - DNA, 1163 bp, Homo sapiens
  misc_feature (51)..(52): n is a, c, g, or t
ggtttattactactgaaggaagaacgtgagtaggttaggatttcggcacgnngagaggcttggggtcttgcgtttcgcccaccatctcctggggacagggtggagtcgatatccgggacgggggggaggttgcggtgcccctcagggctacctctcaagagtgctatcatttccgcaggccagatcagaaaagggagctcaggtaccttccagagagtgagacccagcgcccttgtctcgcacccagtaggctttcatccccgccatggcggagctgatccagaagaagctacagggagaagtggagaaatatcaacagctacagaaggacttaagtaaatccatgtcggggaggcagaaacttgaagcacaactaacagaaaataatatcgtgaaagaggaactggccctgctggatgggtccaacgtggtctttaaacttctgggtccggtgctagtcaaacaggagctgggggaggctcgggccacagtagggaagaggctggactatatcacagctgaaattaagcgatacgaatccctgccgcagccccctccccttctgatgccttaaaagctgggccccaggccctgctggccagagccacagatgccaagctctgggagcttgactatggaccaaacagctctggcctagggattgggccaccctacccaggatctccaccctggggacagtagaaggggaaagccttcatcttggcgaaccggccccaccaccccctcctacccgggcctccgtgcagagatgggctttctctgccagtcccctgctgtctgtctgtgggagtcggacattgtgcccatctcccggagcctctgctgtcactcgcttgttgaagatgaattcttgaattctgcctgcccacccccggccagatccctggagctggcctccttccagcccagtgccagaaaccagcactccatgaagataaactctgggcccgcccaccagcaggacctgtcgacctgaggtgaccctgggccttgcccccagccaactgggccaccagcttccctcccttgactctgggggtccacatccactccaaggggactattcccccgaccccaccccagtctccccacacggacctttgctgaattaaagtttgtaagtaaatggttttaaagaaatc

SEQ ID NO: 459513 - DNA, 862 bp, Homo sapiens
ggtttattactactgaaggaagaacgtgagtaggccagatcagaaaagggagctcaggtaccttccagagagtgagacccagcgcccttgtctcgcacccagtaggctttcatccccgccatggcggagctgatccagaagaagctacagggagaagtggagaaatatcaacagctacagaaggacttaagtaaatccatgtcggggaggcagaaacttgaagcacaactaacagaaaataatatcgtgaaagaggaactggccctgctggatgggtccaacgtggtctttaaacttctgggtccggtgctagtcaaacaggagctgggggaggctcgggccacagtagggaagaggctggactatatcacagctgaaatgtgagtttttattccaccaccgtgtgctgcaccctgtgatgcaagtgaaccattggagtagaggtgttgaaccattgcagaacagctctccatagtggcccctagtcctccagttcctccaaccctttccttcccttttaaccccccttcttctccctcccctggatctcaagttttccacctatctctttcttgcgtttagcactctccatagtgagtcctactaatttctccctttctgcttgtctcccttgtctctccttagtaagcgatacgaatcccagcttcgggatcttgagcggcagtcagagcaacagagggagacccttgctcagctgcagcaggagttccagcgggcccaggcagcaaaggcaggggctcctggcaaggcctgaccccatggtggggggaggggaggggaggggagggaatgaggcagctctaggatctatactgtagctaataaaatgtaaaaacacctg

SEQ ID NO: 459514 - DNA, 1357 bp, Homo sapiens
ggtttattactactgaaggaagaacgtgagtaggccagatcagaaaagggagctcaggtaccttccagagagtgagacccagcgcccttgtctcgcacccagtaggctttcatccccgccatggcggagctgatccagaagaagctacagggagaagtggagaaatatcaacagctacagaaggacttaagtaaatccatgtcggggaggcagaaacttgaagcacaactaacagaaaataatatcgtgaaagaggaactggccctgctggatgggtccaacgtggtctttaaacttctgggtccggtgctagtcaaacaggagctgggggaggctcgggccacagtagggaagaggctggactatatcacagctgaaatgtgagtttttattccaccaccgtgtgctgcaccctgtgatgcaagtgaaccattggagtagaggtgttgaaccattgcagaacagctctccatagtggcccctagtcctccagttcctccaaccctttccttcccttttaaccccccttcttctccctcccctggatctcaagttttccacctatctctttcttgcgtttagcactctccatagtgagtcctactaatttctccctttctgcttgtctcccttgtctctccttagtaagcgatacgaatcccagcttcgggatcttgagcggcagtcagagcaacagagggagacccttgctcagctgcagcaggagttccagcgggcccaggcagcaaaggcaggggctcctggcaaggcctgaccccatggtggggggaggggaggggaggggagggaatgaggcagctctaggatctatactgtagctaataaaatgtaaaaacacctggctctgtttcctgaccaggcacttctgtcatatccccacagccccttccaccttaacacacaccacctgtattaccccctcaggttcaaactcttgcacttggaatctctttgtggcacagtgttctttcttgaaagtgaaatcctaaatgtcttcaaacctacttcttgcctgtatatacaacccttaactctccctcatcttggttggcatgattcttttggaagggcatttgcaacataccatattgctaggaatgtcggtttaattgaaaaagaatacacagttctctaacctgaggccccaggatgaaatgtggttaccctccttgccaacagccctggcatctctattagtacttttcagcctctgtcttcctagaatttgcttgaatgtagctttaaactgacttaaaatcccagcatgtaatgctttatggtattataagtcctcccaagtttatatgttgtccataaagttgttctgcccaattcc

SEQ ID NO: 459515 - DNA, 973 bp, Homo sapiens
  misc_feature (51)..(52): n is a, c, g, or t
ggtttattactactgaaggaagaacgtgagtaggttaggatttcggcacgnngagaggcttggggtcttgcgtttcgcccaccatctcctggggacagggtggagtcgatatccgggacgggggggaggttgcggtgcccctcagggctacctctcaagagtgctatcatttccgcaggccagatcagaaaagggagctcaggtaccttccagagagtgagacccagcgcccttgtctcgcacccagtaggctttcatccccgccatggcggagctgatccagaagaagctacagggagaagtggagaaatatcaacagctacagaaggacttaagtaaatccatgtcggggaggcagaaacttgaagcacaactaacagaaaataatatcgtgaaagagttaaacttctgggtccggtgctagtcaaacaggagctgggggaggctcgggccacagtagggaagaggctggactatatcacagctgaaatgtgagtttttattccaccaccgtgtgctgcaccctgtgatgcaagtgaaccattggagtagaggtgttgaaccattgcagaacagctctccatagtggcccctagtcctccagttcctccaaccctttccttcccttttaaccccccttcttctccctcccctggatctcaagttttccacctatctctttcttgcgtttagcactctccatagtgagtcctactaatttctccctttctgcttgtctcccttgtctctccttagtaagcgatacgaatcccagcttcgggatcttgagcggcagtcagagcaacagagggagacccttgctcagctgcagcaggagttccagcgggcccaggcagcaaaggcaggggctcctggcaaggcctgaccccatggtggggggaggggaggggaggggagggaatgaggcagctctaggatctatactgtagctaataaaatgtaaaaacacctg

SEQ ID NO: 459516 - DNA, 1094 bp, Homo sapiens
  misc_feature (51)..(52): n is a, c, g, or t
ggtttattactactgaaggaagaacgtgagtaggttaggatttcggcacgnngagaggcttggggtcttgcgtttcgcccaccatctcctggggacagggtggagtcgatatccgggacgggggggaggttgcggtgcccctcagggctacctctcaagagtgctatcatttccgcaggccagatcagaaaagggagctcaggtaccttccagagagtgagacccagcgcccttgtctcgcacccagtaggctttcatccccgccatggcggagctgatccagaagaagctacagggagaagtggagaaatatcaacagctacagaaggacttaagtaaatccatgtcggggaggcagaaacttgaagcacaactaacagaaaataatatcgtgaaagagaaagaggtgagggactgggatttgtggggcgaggagggacctgtactagccatggttctgatcacatatgtcccatccctccatcaggaactggccctgctggatgggtccaacgtggtctttaaacttctgggtccggtgctagtcaaacaggagctgggggaggctcgggccacagtagggaagaggctggactatatcacagctgaaatgtgagtttttattccaccaccgtgtgctgcaccctgtgatgcaagtgaaccattggagtagaggtgttgaaccattgcagaacagctctccatagtggcccctagtcctccagttcctccaaccctttccttcccttttaaccccccttcttctccctcccctggatctcaagttttccacctatctctttcttgcgtttagcactctccatagtgagtcctactaatttctccctttctgcttgtctcccttgtctctccttagtaagcgatacgaatcccagcttcgggatcttgagcggcagtcagagcaacagagggagacccttgctcagctgcagcaggagttccagcgggcccaggcagcaaaggcaggggctcctggcaaggcctgaccccatggtggggggaggggaggggaggggagggaatgaggcagctctaggatctatactgtagctaataaaatgtaaaaacacctg

SEQ ID NO: 459517 - DNA, 860 bp, Homo sapiens
ttttctgcttcctcagatccatatccacctgactaggattgtggggataggtggcacatttgatgtttctaaattgcctttcctctcatccccagacttaagtaaatccatgtcggggaggcagaaacttgaagcacaactaacagaaaataatatcgtgaaagagaaagaggtgagggactgggatttgtggggcgaggagggacctgtactagccatggttctgatcacatatgtcccatccctccatcaggaactggccctgctggatgggtccaacgtggtctttaaacttctgggtccggtgctagtcaaacaggagctgggggaggctcgggccacagtagggaagaggctggactatatcacagctgaaatgtgagtttttattccaccaccgtgtgctgcaccctgtgatgcaagtgaaccattggagtagaggtgttgaaccattgcagaacagctctccatagtggcccctagtcctccagttcctccaaccctttccttcccttttaaccccccttcttctccctcccctggatctcaagttttccacctatctctttcttgcgtttagcactctccatagtgagtcctactaatttctccctttctgcttgtctcccttgtctctccttagtaagcgatacgaatcccagcttcgggatcttgagcggcagtcagagcaacagagggagacccttgctcagctgcagcaggagttccagcgggcccaggcagcaaaggcaggggctcctggcaaggcctgaccccatggtggggggaggggaggggaggggagggaatgaggcagctctaggatctatactgtagctaataaaatgtaaaaacacctg

SEQ ID NO: 459518 - DNA, 893 bp, Homo sapiens
  misc_feature (51)..(52): n is a, c, g, or t
ggtttattactactgaaggaagaacgtgagtaggttaggatttcggcacgnngagaggcttggggtcttgcgtttcgcccaccatctcctggggacagggtggagtcgatatccgggacgggggggaggttgcggtgcccctcagggctacctctcaagagtgctatcatttccgcaggccagatcagaaaagggagctcaggtaccttccagagagtgagacccagcgcccttgtctcgcacccagtaggctttcatccccgccatggcggagctgatccagaagaagctacagggagaagtggagaaatatcaacagctacagaaggacttaagtaaatccatgtcggggaggcagaaacttgaagcacaactaacagaaaataatatcgtgaaagagaaaaaaaaaaaaaaaaaaaaaaaaaaaaaaaaaaaaaaaaaaaaaaaaaaaaaaaaaaaaaaaaaaaaaaacaaaaaaaaaaaaaaaaaaaaaataaaaaaaaaaaaaaaaaaaaaaaaaccttgtggcccccttggcccaaaggacttttaaactgggcaaactttttgaatgcgccccaatttgggcctaattgggccaattccccttatggggaggggtttaaaaattaatgggccgatgtttacaacaactgggcttggaaaacccttgggttcccccatctaaaccgcttgaaccaaatccccttttccacagtggccaattgccaaaggcgccgacttatgccctttcaaaaatttgccccctcaaatggataatggaatttaagggtaaaattttttaaaaaatccgcgaaaatttttgtaaaaccggctatttttaacccatgggcccaattggaaaaacccttttaactaaaaaatttcccccg

SEQ ID NO: 459519 - DNA, 415 bp, Homo sapiens
  misc_feature (51)..(52): n is a, c, g, or t
ggtttattactactgaaggaagaacgtgagtaggttaggatttcggcacgnngagaggcttggggtcttgcgtttcgcccaccatctcctggggacagggtggagtcgatatccgggacgggggggaggttgcggtgcccctcagggctacctctcaagagtgctatcatttccgcaggccagatcagaaaagggagctcaggtaccttccagagagtgagacccagcgcccttgtctcgcacccagtaggctttcatccccgccatggcggagctgatccagaagaagctacagggagaagtggagaaatatcaacagctacagaagggggtaagggaacagggtcggtatggtctcgcccaatgcacttacaacccaaagccattaccgagataaggtttgttgccccatctg

SEQ ID NO: 459520 - DNA, 486 bp, Homo sapiens
  misc_feature (51)..(52): n is a, c, g, or t
ggtttattactactgaaggaagaacgtgagtaggttaggatttcggcacgnngagaggcttggggtcttgcgtttcgcccaccatctcctggggacagggtggagtcgatatccgggacgggggggaggttgcggtgcccctcagggctacctctcaagagtgctatcatttccgcaggccagatcagaaaagggagctcaggtaccttccagagagtgagacccagcgcccttgtctcgcacccagtaggctttcatccccgccatggcggagctgatccagaagaagctacagggagaagtggagaaatatcaacagctacagaaggccctggcatctctattagtacttttcagcctctgtcttcctagaatttgcttgaatgtagctttaaactgacttaaaatcccagcatgtaatgctttatggtattataagtcctcccaagtttatatgttgtccataaagttgttctgcccaattcc

SEQ ID NO: 459521 - DNA, 417 bp, Homo sapiens
atctgagtggcaactgcctgaagcagtaggggaaggactggaggaagggagtgcaattgaagtgagtggtgacaacctgcaagtgataagggggtgggtatggtagatacatgagagaagagtacacaaggtttagtgattatgctgtgggaaggggaggaaccagaggtgattctgaagtttggaactgagcgactgagagaatgataaaaatagggaaatcaaaattggaagtcagtagggtatgggatagggtaggtcagtgagtagcgtagttgatggacatgaacaggaagagtagaacagtgtcaggaggctgaggccggagaatcacttgaacctgggaagcagaggttgcagtcagctgaggtggcgccagtggactctggcctgggggacagagcaagattctgtctc

SEQ ID NO: 459522 - DNA, 1872 bp, Homo sapiens
tgctctaataaagcgggaggggcggcggcgtggggggagcagatgccgctggctgccagcgggacgccggcgagcagagcgcagccgcgagggaggcgcgagggaggcgagccggagcccgagcactagcagcagccggagtcggcgtaaagcacccgggcgcagccggagccggtgccgcagctgcgatggccgtggccgtggggagaccgtctaatgaagagcttcgaaacttgtctttgtctggccatgtgggatttgacagcctccctgaccagctggtcaacaagtctacttctcaaggattctgtttcaacatcctttgtgttggtgagacaggcattggcaaatccacgttaatggacactttgttcaacaccaaatttgaaagtgacccagctactcacaatgaaccaggtgttcggttaaaagccagaagttatgagcttcaggaaagcaatgtacggctgaagttaaccattgttgacaccgtgggatttggagaccagataaataaagatgacagctataagccgatagtagaatatattgatgcccagttcgaggcctacctgcaagaggaattgaagattaaacgttctctcttcaactaccatgacacgaggatccatgcctgcctctactttattgcccctactggacattcactaaagtccctggatctggtcaccatgaaaaagctggacagtaaggtgaacatcattccaataattgcaaaagctgacaccattgccaagaatgaactgcacaaattcaagagtaagatcatgagtgaactggtcagcaatggggtccagatatatcagtttcccactgatgaagaaacggtggcagagattaacgcaacaatgagtgtccatctcccatttgcagtggttggcagcaccgaagaggtgaagattggcaacaagatggcaaaggccaggcagtacccctggggtgtggtgcaggttgagaatgaaaatcattgcgattttgtgaaacttcgagagatgctgatccgcgtgaacatggaggacttgcgagagcagactcacacccgccactatgaattgtaccgacgctgtaagcttgaagagatggggttcaaggacactgaccctgacagcaaacccttcagtcttcaggagacatatgaagcaaaaaggaatgaattcctgggagaactgcagaagaaagaagaagaaatgagacaaatgtttgttatgagagtgaaggagaaagaagctgaacttaaggaggcagagaaagagcttcacgagaagtttgaccttctaaagcggacacaccaagaagaaaagaagaaagtggaagacaagaagaaggagcttgaggaggaggtgaacaacttccagaagaagaaagcagcggctcagttactacagtcccaggcccagcaatctggggcccagcaaaccaagaaagacaaggataagaaaaatgcaagcttcacataaagcctggcaagccaaggatgttcccgcattcacctgcttttgcagtaatatcgtatctctgccatgtgtgttctttagttttattttattttattttatttttttacccttcctcaaacaccagtaactattattaactcgttttgctgaatgttgttgggtggtagaaaatgatagaacaagggaataaccgcgaatgctctgtgcagctggactctgtttccggaaagtaaatgatttgctttttatgcctgttctgaatggcagcacgaagcaggcctgttacttgtatgtcgctttggacagaggaaagtggggtaaaatgctacctgtacgtctgacatgaaaacttctcaccgcctcagcagctgaactaaaaacctgaatagccatg

SEQ ID NO: 459523 - DNA, 1193 bp, Homo sapiens
tgctctaataaagcgggaggggcggcggcgtggggggagcagatgccgctggctgccagcgggacgccggcgagcagagcgcagccgcgagggaggcgcgagggaggcgagccggagcccgagcactagcagcagccggagtcggcgtaaagcacccgggcgcagccggagccggtgccgcagctgcgatggccgtggccgtggggagaccgtctaatgaagagcttcgaaacttgtctttgtctggccatgtgggatttgacagcctccctgaccagctggtcaacaagtctacttctcaaggattctgtttcaacatcctttgtgttggtgagacaggcattggcaaatccacgttaatggacactttgttcaacaccaaatttgaaagtgacccagctactcacaatgaaccaggtgttcggttaaaagccagaagttatgagcttcaggaaagcaatgtacggctgaagttaaccattgttgacaccgtgggatttggagaccagataaataaagatgacagctataagccgatagtagaatatattgatgcccagttcgaggcctacctgcaagaggaattgaagattaaacgttctctcttcaactaccatgacacgaggatccatgcctgcctctactttattgcccctactggacattcactaaagtccctggatctggtcaccatgaaaaagctggacagtaaggtgaacatcattccaataattgcaaaagctgacaccattgccaagaatgaactgcacaaattcaagagtaagatcatgagtgaactggtcagcaatggggtccagatatatcagtttcccactgatgaagaaacggtggcagagattaacgcaacaatgagtgtccatctcccatttgcagtggttggcagcaccgaagaggtgaagattggcaacaagatggcaaaggccaggcagtacccctggggtgtggtgcaggttgagaatgaaaatcattgcgattttgtgaaacttcgagagatgctgatccgcgtgaacatggaggacttgcgagagcagactcacacccgccactatgaattgtaccgacgctgtaagcttgaagagatggggttcaaggacactgaccctgacagcaaacccttcagtcttcaggagacatatgaagcaaaaaggaatgaattcctgggagaactgcag

SEQ ID NO: 459524 - DNA, 3405 bp, Homo sapiens
  misc_feature (1323)..(1323): n is a, c, g, or t
  misc_feature (1418)..(1419): n is a, c, g, or t
  misc_feature (1587)..(1587): n is a, c, g, or t
  misc_feature (2614)..(2614): n is a, c, g, or t
  misc_feature (2689)..(2689): n is a, c, g, or t
  misc_feature (2997)..(2997): n is a, c, g, or t
gtgatttttatgaacgcctgtcttagtagcagcattgtagagtggctggagcactggactgactaggaacctgatgacttcagctgtagtccagctttgccaccacttcaagtcatttaaccagtctgctcctccgtttctccatctgtcaaatgggagctttagacaagatgatctcaaatttccttcccactctaacagttacgatttctacagcaaatcttgtgagaaggaaatgccagcccagtaccatttcataaaaagcagctcaaaggaaatagatctgtgcttgtttctaccaatcttggcagaaatacattagcttgtcccaattttgctttggtgattggatcctgcccttccctcctttctattttccctatacttttctaatcattaggtaaactggcagttgaggatacaatttccacatcacagagaggaactagtcaggtgataaatgattaaagtgacagtggttccctgtgtgattgtgatgtaatccctcctggtgagtctccatcctgccggttgatgctcaagtctgtttcactactcttttgtgtgtctcacagcccatagctcagctgtgagctgcaatgactctgcacatctttttttccctttgggaatgcataacatccatgaaagccacatgctttgcatatagtggaggcccagtgatggttgttggaattcaaagtagtaaaggctctagaattgttggaagaatctggaaagcagattcttcccaggaaataggcatgatggggtgtgaaaggaaggttgccacaagggaaaatggctagacttgtgcaaaagaatgaatggacaaaagatcaccaaggggttttggtcccattacgaagtgagtgtttaactagtagagccactgagatggaagatacaccttacttcttgggaagtagtgagttcccatcgccagtggtttgtagataacagaccctgtttcagtccacttggaagagatactgtagcaggaattcttaagcaggattgaacgtataataagcaagatctcttccacctctaaaattctctggttgtgggtattgagagctacataataataatagcacctgacatttttcacatttctggagcatttactatgcaccaggaactgttcaagactttccatttaatcctcacaacagttgcataggtaggtgctgttattattcctccctcatatatgaggagactgcagcacagcacctaagattgcatggctgtgggtagtggaggtagaattggaacccaggctttggctgtcaggctacactctcaccctgtgtactnccgcccgagcagagcagtgtaccatcagcctcggcatccatggatttcaccaaccatggaccaaagatatttggaaaaaaaaaatgcaacaatannaacaataatacaaaatatatatatatatgtgtatatatatagcatatatatatattttgtattattgtttttataatatatatagcatatatattatatatgctaaaatatatatatagcatatatatacacacacatatatatatatacacatatatatatatatanacacatatatatatatatatatatatacacatatatatatatatatggccaggcacagtggctcatacctgtaatcccagcactttggaaggccgaggagggaggatcacttgaggccaggggctcaagaccagcctggtcaacatagcaagaaaataaaaaataaattctacaaaaaaatttttttaaatagagtataataactatttatatagtgtttacattgtcttagatattataagtaatttagagatgatttaaagtatacaggaggatgtgcataggttatttgtaaatactataccattttatatcagagatttgagcacctgcagatttcagtgtccatggacagtcctggaaccggtaccctgtggatactgcaggaggtctgtacttttttataggaaggtcaaaatctcaaactgagatggcactcctttattctgctgtagaactgtaatttgggatgtcagtgtgggattcaggaagtatcatgaatgactgctatgtaatttttctttatattcctatccttctagataatttttcattattttctagtcatggaactatatctttgttaaacttattggaaataaaatacccaagaatttttgctctctttctctctttatcagattaatagaactgaatctctgacattccaaattaatcctgctctttaaagaaattttcttttaggctcttcattacaaactattcttgctgatcaaattccacgtaatgtctgaggaaaacagattccactggcagttgcttttgttacatttgagtggagaaatttccttggtcattacaccaaaatattgaccagaaaggtcctgttgctcctcaacttcaggggaaacaatagggttcaggtctgaaactcagacttgtttgagaaagataatgtgctttctttccttcttagggtgtgagatgaactagaacatttcaatatcttgagcgtccaacaaaatgctacttgggcaatctgagccaatgattatgccaagttctntgtaggagaggaattggcttgaaaactttatcttctttctcagtgtatctatggtggaagaacactggatcaagnaactctaaataataattcttggagcagctatttcaaatcttattcttacatgctaatagaaaaaagataggattattatttcctccctcactcagaatgcagtgataactaccaaataaaccaatgtgaaagagtcagttgtcttggacaccatctctacttcagataaatctgggtgcatagcttgagccagtaatttgggctaaagtgtgtttcggacttagaaatttgtgcaatagtcaactgtctaaagcagtgttgttcaaatagaactataatgtgagacacacaagtattttaaaattttntagtagctaccttaaaaaagtaaaaagaaatgtgaaattaattttaaggacttaacccaatatgttgcaaaatataatttcaacatgtattcaatataaaaattattagatattttaggctgggcacggtgactcacgccagcactttcggagtaatcccagcactttcggaggccaaggcgggcggatcacaaggtcaggagatcgagaccatcctggctaacacggtgaaaccccgtttctactaaaaatacaaaaattagctgggcatggtggccggtgcctgtagtcccagctatttgggacgctgaggcaggagaatggcgtgaacccggagggcagagcttgcagtgagccgagatcgcgccactgcactccagcctgggcaacagagcgagactccatctc

SEQ ID NO: 459525 - DNA, 477 bp, Homo sapiens
gatggctgcaattttttttctttggagtgttctattgatacaatgtttttatttttcagctgaccatctgcctcttgagagagagagaagtgggcatccttcctttaaattcaggaaccactgttgttttatttgactttttctgttacttgcatcccttatataagttgttttggatttgggactatgttttgggggagaaaaactccagttagttctgttttttgtattggttattcagcttacttttggtatcaaaattatgccagttttaagctcacttgagtgaagtttaagtcacaagattctgtttaacatgctttccttgttttggaaacaaccaaaaacttcccttttttgttacgggattttgacctacaaatcctaatcatgtttaaaatgtgccggtgttgggtagatgacttttctgcctctggggttcaatttatatttaaagataccttaaaataaaaaaat

SEQ ID NO: 459526 - DNA, 469 bp, Homo sapiens
tttaaactttataatcatgactaataaaaaatactgatgaattgaactgatgtctgagagacattgacacattctctgatttttcttttgtggttatgtggtgagacaggcattggcaaatccacgttaatggacactttgttcaacaccaaatttgaaagtgacccagctactcacaatgaaccaggtgttcggttaaaagccagaagttatgagcttcaggaaagcaatgtacggctgaagttaaccattgttgacaccgtgggatttggagaccagataaataaagatgacaggtacatcttgggattttggggggacatgaatggatgaggagatagcaggatccatcccaggtaaatttaaaggccaaatgttttggggattttttagttgtggggcttggtcctctattgcctaaaaggtgtgatattcttgtcctctgagaatttttctgagaatattcttc

SEQ ID NO: 459527 - DNA, 5581 bp, Homo sapiens
tgctctaataaagcgggaggggcggcggcgtggggggagcagatgccgctggctgccagcgggacgccggcgagcagagcgcagccgcgagggaggcgcgagggaggcgagccggagcccgagcactagcagcagccggagtcggcgtaaagcacccgggcgcagccggagccggtgccgcagctgcgatggccgtggccgtggggagaccgtctaatgaagagcttcgaaacttgtctttgtctggccatgtgggatttgacagcctccctgaccagctggtcaacaagtctacttctcaaggattctgtttcaacatcctttgtgttggtgagacaggcattggcaaatccacgttaatggacactttgttcaacaccaaatttgaaagtgacccagctactcacaatgaaccaggtgttcggttaaaagccagaagttatgagcttcaggaaagcaatgtacggctgaagttaaccattgttgacaccgtgggatttggagaccagataaataaagatgacagctataagccgatagtagaatatattgatgcccagttcgaggcctacctgcaagaggaattgaagattaaacgttctctcttcaactaccatgacacgaggatccatgcctgcctctactttattgcccctactggacattcactaaagtccctggatctggtcaccatgaaaaagctggacagtaaggtgaacatcattccaataattgcaaaagctgacaccattgccaagaatgaactgcacaaattcaagagtaagatcatgagtgaactggtcagcaatggggtccagatatatcagtttcccactgatgaagaaacggtggcagagattaacgcaacaatgagtgtccatctcccatttgcagtggttggcagcaccgaagaggtgaagattggcaacaagatggcaaaggccaggcagtacccctggggtgtggtgcaggttgagaatgaaaatcattgcgattttgtgaaacttcgagagatgctgatccgcgtgaacatggaggacttgcgagagcagactcacacccgccactatgaattgtaccgacgctgtaagcttgaagagatggggttcaaggacactgaccctgacagcaaacccttcagtcttcaggagacatatgaagcaaaaaggaatgaattcctgggagaactgcagaagaaagaagaagaaatgagacaaatgtttgttatgagagtgaaggagaaagaagctgaacttaaggaggcagagaaagagcttcacgagaagtttgaccttctaaagcggacacaccaagaagaaaagaagaaagtggaagacaagaagaaggagcttgaggaggaggtgaacaacttccagaagaagaaagcagcggctcagttactacagtcccaggcccagcaatctggggcccagcaaaccaagaaagacaaggataagaaaaatgcaagcttcacataaagcctggcaagccaaggatgttcccgcattcacctgcttttgcagtaatatcgtatctctgccatgtgtgttctttagttttattttattttattttatttttttacccttcctcaaacaccagtaactattattaactcgttttgctgaatgttgttgggtggtagaaaatgatagaacaagggaataaccgcgaatgctctgtgcagctggactctgtttccggaaagtaaatgatttgctttttatgcctgttctgaatggcagcacgaagcaggcctgttacttgtatgtcgctttggacagaggaaagtggggtaaaatgctacctgtacgtctgacatgaaaacttctcaccgcctcagcagctgaactaaaaacctgaatagccatgacaagagtttgcattttcttgatgattcatctccatgagtgcacaatccctgaactcactgtcttttctccacacttgtcctaagccaaggtagatttgtacgtagacagactggtgagcaagcattatattttatttttacccttgcatgacattttcattttaatcaataacattatttggcctgagcttgtgggtctgttcagactgtctcctctcatggtttgaaactgcatctgaatgcctgccttcaatcctggccaagttggagtagactggtatgagaaaactatgattagttcacatttactggtgcatccttgatcctctcacagatagaggtcttaaaggttggatcatgtaacattgcttagtagaagaatcttcttctaaggatgatgggctttctacagcctgcttaccactaacagtaaggaatctttcataaacacacctcagtttgttcccagtgggcttagagggaggacctgatgactgattccaggatacttgtacttctaataacatttttcatgaatcatgagaaaatttccacagatacttcccttagaaaatttgctataaactctgtatcattggtagcacaaatttgagcgaggccttgtcaattttaaggtggaaataggaaggaccacaacatgacccgtaagtcaagaaggtagacatttcatatccagcttccttgcttagtctcctttcagtatttggcaataaaagaaagaagaaatagaacagctgaagtctcaaatcattgtctggaattttcctcaccttggctagctccacctgctctttgtctaaggcccttgcctcatcagggattagaactggcccatatgccagaacctgtactaaatgcctaatttgtatggaagagtgcatatttaatctcttttctatactgctcctttctgatgcttatcctttcatctgtgtgattgttttttcccctctactaacaagatcctcccagctttctctctacatgtagaaaggataacatttctcatgaacccactgcccctctgcattttcctcactggttagagattaagtaaataggatagaatatgctgcgtctcccctgacacacactttcttttttgaatgagcaagtctccattttgatttcagcaaagattttttctccttttctttgtcctcaaccatacttagaggaaagaaggaatggtcttccatgaactgattatgcttaattaagcaaagtaaggaaattagtttcatggaagcctaaacaaagctggaatagaaactacacactagacacagcagtagtcatagtcttcacaggtttaggagctactggaccaacattcttgtttttgcttttgtttttttaaataattctagtctggagctaactgtggagcagccaaatagtagctggcatgttgattcaaaccatgggctgaatttgctcataggctgtgcatcagacaaaagcttgaatatttgtgttgtatgcttgttccaaccaccgcttgtgtgagcatttttgtggcttgtacagaaagtacacttttaaattgtctcttgcatcactaaaatttttttaaaatgagcataacaacgaaaggcatccagctgactttttgattccaagattattgattggattgacttttttgcattaaatttttcccagcaaaataaatcatatggcgagtcagggaataaaaagtcaaaagaaacaaatagaagcttttttttttaaaaaatgtattgcttctgaacttttttctgccactgctccctagccctgtttagtttgttattgctgcttttcttttttctttctgtatctatgcctttttttcacagtagtccttggctctgcacggaataaatgataccctcaaatctaattggatgtgctttcgcctttgcatgtaagtacggtagtaagaaacctttgagatctttctgacttttcaaaattagagaaagcaaatgggatggatagattttttttttcttttcaaggggggcaggaaggtaatggtttgagtagcctttgtttaaaaaaaagactaaatatatttaaaaggccacatttatatttttttcacaagaaccacataataaattccacttcttgacctgaatttggaaatccgaaattactaatccaggccaggtgtggtggctcatgcctgtaatcccagcactttgagaggccgaggtgggcagatcacttgaggcctggagttcaagaccaccttggcgaacacggtgaaaccccgtctctacaaaaaatacaaaaattagccaggcgtggtggcacgtgcctgtagtcccagctacttgggaggctaagtcaggagaattgcttgaacttgggagatggaggttgcagtgagccaagattgcaccactgcattccaacctgggtgatgaagtgagactctccaaaaaaaaaaaagaaattattaatccctgcctgtgctctacatagcctcatgggcatcattggatagctcagagggcccttgattctggcaaggcaaataaagccagaatgagaaattaccatcttctactagagaaaaccaagagaaaaatttttatgctaggatgcctttatgaccacttaattttttaatcttagtttaatggtctctccctggtgctaactgctgacagtggccacctcttttttgggggttgaggggcctacataactagctggccttaccccatatcttttgttcaaacataataccatctttttgcttcttctgaactttagatctccataacacatgtactgtagaatgtgatggaaaagcattgatgagaatttattggcagttcagattgtgttttcccaacttaggctctttattaattggttaaggttttctccaaaaagggcatttcaacaatgggaattatttaatgtaacagtgggcacagattacttatcttccttctctgctttgtgactcaccagcagtaacacacacaatccacatcttgtgcacctcaaatgaacagacttggtttccttgctttcttgacatttccatgactgtttcacatacaaactattgggtgaggtttttcagctgttaccgacccacgtcctgctgtctctgtgtggtcctacaaaaactgtccattcccacccctttgctttgccatttgcaagagtctggaattgtcaggtctcagcttcgaaaagtcctggttccactgacaggacacattctttagtgggaattaagacctacaaagtctagtttgtatgtaggtatgaagggaattttttaaataaattgaaaagctgtgaacagcattagaactttgtctatttcttaattttaaaatatgctgatatgccttaaactgtagttgtagatccttgtcattttgctgtttgaaaataaccaatgtgttttctaaaactgtcgtgtaatctactttcattgttaatgcagaattgtcatatatgtaagctgcatgttagacatttgtcttttttaaactaaagtaattgtattgatgtgaagcatatcattttttcaaatatgaaagtgatcacttagcaacatgcttggtaatttggcatctgttaaggtaggagagtggtgaacagataatctatgcatatatcactagtgccaagacataaagcgggggaaaatatatttttacccaaacatta

SEQ ID NO: 459528 - DNA, 5864 bp, Homo sapiens
  misc_feature (5645)..(5646): n is a, c, g, or t
  misc_feature (5649)..(5650): n is a, c, g, or t
tgctctaataaagcgggaggggcggcggcgtggggggagcagatgccgctggctgccagcgggacgccggcgagcagagcgcagccgcgagggaggcgcgagggaggcgagccggagcccgagcactagcagcagccggagtcggcgtaaagcacccgggcgcagccggagccggtgccgcagctgcgatggccgtggccgtggggagaccgtctaatgaagagcttcgaaacttgtctttgtctggccatgtgggatttgacagcctccctgaccagctggtcaacaagtctacttctcaaggattctgtttcaacatcctttgtgttggtgagacaggcattggcaaatccacgttaatggacactttgttcaacaccaaatttgaaagtgacccagctactcacaatgaaccaggtgttcggttaaaagccagaagttatgagcttcaggaaagcaatgtacggctgaagttaaccattgttgacaccgtgggatttggagaccagataaataaagatgacagctataagccgatagtagaatatattgatgcccagttcgaggcctacctgcaagaggaattgaagattaaacgttctctcttcaactaccatgacacgaggatccatgcctgcctctactttattgcccctactggacattcactaaagtccctggatctggtcaccatgaaaaagctggacagtaaggtgaacatcattccaataattgcaaaagctgacaccattgccaagaatgaactgcacaaattcaagagtaagatcatgagtgaactggtcagcaatggggtccagatatatcagtttcccactgatgaagaaacggtggcagagattaacgcaacaatgagtgtccatctcccatttgcagtggttggcagcaccgaagaggtgaagattggcaacaagatggcaaaggccaggcagtacccctggggtgtggtgcaggttgagaatgaaaatcattgcgattttgtgaaacttcgagagatgctgatccgcgtgaacatggaggacttgcgagagcagactcacacccgccactatgaattgtaccgacgctgtaagcttgaagagatggggttcaaggacactgaccctgacagcaaacccttcagtcttcaggagacatatgaagcaaaaaggaatgaattcctgggagaactgcagaagaaagaagaagaaatgagacaaatgtttgttatgagagtgaaggagaaagaagctgaacttaaggaggcagagaaagagcttcacgagaagtttgaccttctaaagcggacacaccaagaagaaaagaagaaagtggaagacaagaagaaggagcttgaggaggaggtgaacaacttccagaagaagaaagcagcggctcagttactacagtcccaggcccagcaatctggggcccagcaaaccaagaaagacaaggataagaaaaatgcaagcttcacataaagcctggcaagccaaggatgttcccgcattcacctgcttttgcagtaatatcgtatctctgccatgtgtgttctttagttttattttattttattttatttttttacccttcctcaaacaccagtaactattattaactcgttttgctgaatgttgttgggtggtagaaaatgatagaacaagggaataaccgcgaatgctctgtgcagctggactctgtttccggaaagtaaatgatttgctttttatgcctgttctgaatggcagcacgaagcaggcctgttacttgtatgtcgctttggacagaggaaagtggggtaaaatgctacctgtacgtctgacatgaaaacttctcaccgcctcagcagctgaactaaaaacctgaatagccatgacaagagtttgcattttcttgatgattcatctccatgagtgcacaatccctgaactcactgtcttttctccacacttgtcctaagccaaggtagatttgtacgtagacagactggtgagcaagcattatattttatttttacccttgcatgacattttcattttaatcaataacattatttggcctgagcttgtgggtctgttcagactgtctcctctcatggtttgaaactgcatctgaatgcctgccttcaatcctggccaagttggagtagactggtatgagaaaactatgattagttcacatttactggtgcatccttgatcctctcacagatagaggtcttaaaggttggatcatgtaacattgcttagtagaagaatcttcttctaaggatgatgggctttctacagcctgcttaccactaacagtaaggaatctttcataaacacacctcagtttgttcccagtgggcttagagggaggacctgatgactgattccaggatacttgtacttctaataacatttttcatgaatcatgagaaaatttccacagatacttcccttagaaaatttgctataaactctgtatcattggtagcacaaatttgagcgaggccttgtcaattttaaggtggaaataggaaggaccacaacatgacccgtaagtcaagaaggtagacatttcatatccagcttccttgcttagtctcctttcagtatttggcaataaaagaaagaagaaatagaacagctgaagtctcaaatcattgtctggaattttcctcaccttggctagctccacctgctctttgtctaaggcccttgcctcatcagggattagaactggcccatatgccagaacctgtactaaatgcctaatttgtatggaagagtgcatatttaatctcttttctatactgctcctttctgatgcttatcctttcatctgtgtgattgttttttcccctctactaacaagatcctcccagctttctctctacatgtagaaaggataacatttctcatgaacccactgcccctctgcattttcctcactggttagagattaagtaaataggatagaatatgctgcgtctcccctgacacacactttcttttttgaatgagcaagtctccattttgatttcagcaaagattttttctccttttctttgtcctcaaccatacttagaggaaagaaggaatggtcttccatgaactgattatgcttaattaagcaaagtaaggaaattagtttcatggaagcctaaacaaagctggaatagaaactacacactagacacagcagtagtcatagtcttcacaggtttaggagctactggaccaacattcttgtttttgcttttgtttttttaaataattctagtctggagctaactgtggagcagccaaatagtagctggcatgttgattcaaaccatgggctgaatttgctcataggctgtgcatcagacaaaagcttgaatatttgtgttgtatgcttgttccaaccaccgcttgtgtgagcatttttgtggcttgtacagaaagtacacttttaaattgtctcttgcatcactaaaatttttttaaaatgagcataacaacgaaaggcatccagctgactttttgattccaagattattgattggattgacttttttgcattaaatttttcccagcaaaataaatcatatggcgagtcagggaataaaaagtcaaaagaaacaaatagaagcttttttttttaaaaaatgtattgcttctgaacttttttctgccactgctccctagccctgtttagtttgttattgctgcttttcttttttctttctgtatctatgcctttttttcacagtagtccttggctctgcacggaataaatgataccctcaaatctaattggatgtgctttcgcctttgcatgtaagtacggtagtaagaaacctttgagatctttctgacttttcaaaattagagaaagcaaatgggatggatagattttttttttcttttcaaggggggcaggaaggtaatggtttgagtagcctttgtttaaaaaaaagactaaatatatttaaaaggccacatttatatttttttcacaagaaccacataataaattccacttcttgacctgaatttggaaatccgaaattactaatccaggccaggtgtggtggctcatgcctgtaatcccagcactttgagaggccgaggtgggcagatcacttgaggcctggagttcaagaccaccttggcgaacacggtgaaaccccgtctctacaaaaaatacaaaaattagccaggcgtggtggcacgtgcctgtagtcccagctacttgggaggctaagtcaggagaattgcttgaacttgggagatggaggttgcagtgagccaagattgcaccactgcattccaacctgggtgatgaagtgagactctccaaaaaaaaaaaagaaattattaatccctgcctgtgctctacatagcctcatgggcatcattggatagctcagagggcccttgattctggcaaggcaaataaagccagaatgagaaattaccatcttctactagagaaaaccaagagaaaaatttttatgctaggatgcctttatgaccacttaattttttaatcttagtttaatggtctctccctggtgctaactgctgacagtggccacctcttttttgggggttgaggggcctacataactagctggccttaccccatatcttttgttcaaacataataccatctttttgcttcttctgaactttagatctccataacacatgtactgtagaatgtgatggaaaagcattgatgagaatttattggcagttcagattgtgttttcccaacttaggctctttattaattggttaaggttttctccaaaaagggcatttcaacaatgggaattatttaatgtaacagtgggcacagattacttatcttccttctctgctttgtgactcaccagcagtaacacacacaatccacatcttgtgcacctcaaatgaacagacttggtttccttgctttcttgacatttccatgactgtttcacatacaaactattgggtgaggtttttcagctgttaccgacccacgtcctgctgtctctgtgtggtcctacaaaaactgtccattcccacccctttgctttgccatttgcaagagtctggaattgtcaggtctcagcttcgaaaagtcctggttccactgacaggacacattctttagtgggaattaagacctacaaagtctagtttgtatgtaggtatgaagggaattttttaaataaattgaaaagctgtgaacagcattagaactttgtctatttcttaattttaaaatatgctgatatgccttaaactgtagttgtagatccttgtcattttgctgtttgaaaataaccaatgtgttttctaaaactgtcgtgtaatctactttcattgttaatgcagaattgtcatatatgtaagctgcatgttagacatttgtcttttttaaactaaagtaattgtattgatgtgaagcatatcattttttcaaatatgaaagtgatcacttagcaacatgcttggtaatttggcatctgttaaggtaggagagtggtgaacagataatctatgcatatatcactagtgccaagacataaagcgggggaaaatatatttttacccaaacattaaaaaaaaaaaaaaaaaaaaaaaaaaaaaaaaaaaaaaaaaaaaaaaaaaaaaaaaaaaataaannggnnaaaatttagggttgcggcccttttgccccttttttttttttttttaacaattttttgtgcggggcctaaatgggccttattgggaaaacccgccttttggggggtttattcacattccaacgcggcccgttttccaaggggaggtgaggaaaaaccgggggttccccaattaatattccttagagaaaatctcctttttgggagtgggatataa

SEQ ID NO: 459529 - DNA, 5866 bp, Homo sapiens
  misc_feature (5785)..(5785): n is a, c, g, or t
tgctctaataaagcgggaggggcggcggcgtggggggagcagatgccgctggctgccagcgggacgccggcgagcagagcgcagccgcgagggaggcgcgagggaggcgagccggagcccgagcactagcagcagccggagtcggcgtaaagcacccgggcgcagccggagccggtgccgcagctgcgatggccgtggccgtggggagaccgtctaatgaagagcttcgaaacttgtctttgtctggccatgtgggatttgacagcctccctgaccagctggtcaacaagtctacttctcaaggattctgtttcaacatcctttgtgttggtgagacaggcattggcaaatccacgttaatggacactttgttcaacaccaaatttgaaagtgacccagctactcacaatgaaccaggtgttcggttaaaagccagaagttatgagcttcaggaaagcaatgtacggctgaagttaaccattgttgacaccgtgggatttggagaccagataaataaagatgacagctataagccgatagtagaatatattgatgcccagttcgaggcctacctgcaagaggaattgaagattaaacgttctctcttcaactaccatgacacgaggatccatgcctgcctctactttattgcccctactggacattcactaaagtccctggatctggtcaccatgaaaaagctggacagtaaggtgaacatcattccaataattgcaaaagctgacaccattgccaagaatgaactgcacaaattcaagagtaagatcatgagtgaactggtcagcaatggggtccagatatatcagtttcccactgatgaagaaacggtggcagagattaacgcaacaatgagtgtccatctcccatttgcagtggttggcagcaccgaagaggtgaagattggcaacaagatggcaaaggccaggcagtacccctggggtgtggtgcaggttgagaatgaaaatcattgcgattttgtgaaacttcgagagatgctgatccgcgtgaacatggaggacttgcgagagcagactcacacccgccactatgaattgtaccgacgctgtaagcttgaagagatggggttcaaggacactgaccctgacagcaaacccttcagtcttcaggagacatatgaagcaaaaaggaatgaattcctgggagaactgcagaagaaagaagaagaaatgagacaaatgtttgttatgagagtgaaggagaaagaagctgaacttaaggaggcagagaaagagcttcacgagaagtttgaccttctaaagcggacacaccaagaagaaaagaagaaagtggaagacaagaagaaggagcttgaggaggaggtgaacaacttccagaagaagaaagcagcggctcagttactacagtcccaggcccagcaatctggggcccagcaaaccaagaaagacaaggataagaaaaatgcaagcttcacataaagcctggcaagccaaggatgttcccgcattcacctgcttttgcagtaatatcgtatctctgccatgtgtgttctttagttttattttattttattttatttttttacccttcctcaaacaccagtaactattattaactcgttttgctgaatgttgttgggtggtagaaaatgatagaacaagggaataaccgcgaatgctctgtgcagctggactctgtttccggaaagtaaatgatttgctttttatgcctgttctgaatggcagcacgaagcaggcctgttacttgtatgtcgctttggacagaggaaagtggggtaaaatgctacctgtacgtctgacatgaaaacttctcaccgcctcagcagctgaactaaaaacctgaatagccatgacaagagtttgcattttcttgatgattcatctccatgagtgcacaatccctgaactcactgtcttttctccacacttgtcctaagccaaggtagatttgtacgtagacagactggtgagcaagcattatattttatttttacccttgcatgacattttcattttaatcaataacattatttggcctgagcttgtgggtctgttcagactgtctcctctcatggtttgaaactgcatctgaatgcctgccttcaatcctggccaagttggagtagactggtatgagaaaactatgattagttcacatttactggtgcatccttgatcctctcacagatagaggtcttaaaggttggatcatgtaacattgcttagtagaagaatcttcttctaaggatgatgggctttctacagcctgcttaccactaacagtaaggaatctttcataaacacacctcagtttgttcccagtgggcttagagggaggacctgatgactgattccaggatacttgtacttctaataacatttttcatgaatcatgagaaaatttccacagatacttcccttagaaaatttgctataaactctgtatcattggtagcacaaatttgagcgaggccttgtcaattttaaggtggaaataggaaggaccacaacatgacccgtaagtcaagaaggtagacatttcatatccagcttccttgcttagtctcctttcagtatttggcaataaaagaaagaagaaatagaacagctgaagtctcaaatcattgtctggaattttcctcaccttggctagctccacctgctctttgtctaaggcccttgcctcatcagggattagaactggcccatatgccagaacctgtactaaatgcctaatttgtatggaagagtgcatatttaatctcttttctatactgctcctttctgatgcttatcctttcatctgtgtgattgttttttcccctctactaacaagatcctcccagctttctctctacatgtagaaaggataacatttctcatgaacccactgcccctctgcattttcctcactggttagagattaagtaaataggatagaatatgctgcgtctcccctgacacacactttcttttttgaatgagcaagtctccattttgatttcagcaaagattttttctccttttctttgtcctcaaccatacttagaggaaagaaggaatggtcttccatgaactgattatgcttaattaagcaaagtaaggaaattagtttcatggaagcctaaacaaagctggaatagaaactacacactagacacagcagtagtcatagtcttcacaggtttaggagctactggaccaacattcttgtttttgcttttgtttttttaaataattctagtctggagctaactgtggagcagccaaatagtagctggcatgttgattcaaaccatgggctgaatttgctcataggctgtgcatcagacaaaagcttgaatatttgtgttgtatgcttgttccaaccaccgcttgtgtgagcatttttgtggcttgtacagaaagtacacttttaaattgtctcttgcatcactaaaatttttttaaaatgagcataacaacgaaaggcatccagctgactttttgattccaagattattgattggattgacttttttgcattaaatttttcccagcaaaataaatcatatggcgagtcagggaataaaaagtcaaaagaaacaaatagaagcttttttttttaaaaaatgtattgcttctgaacttttttctgccactgctccctagccctgtttagtttgttattgctgcttttcttttttctttctgtatctatgcctttttttcacagtagtccttggctctgcacggaataaatgataccctcaaatctaattggatgtgctttcgcctttgcatgtaagtacggtagtaagaaacctttgagatctttctgacttttcaaaattagagaaagcaaatgggatggatagattttttttttcttttcaaggggggcaggaaggtaatggtttgagtagcctttgtttaaaaaaaagactaaatatatttaaaaggccacatttatatttttttcacaagaaccacataataaattccacttcttgacctgaatttggaaatccgaaattactaatccaggccaggtgtggtggctcatgcctgtaatcccagcactttgagaggccgaggtgggcagatcacttgaggcctggagttcaagaccaccttggcgaacacggtgaaaccccgtctctacaaaaaatacaaaaattagccaggcgtggtggcacgtgcctgtagtcccagctacttgggaggctaagtcaggagaattgcttgaacttgggagatggaggttgcagtgagccaagattgcaccactgcattccaacctgggtgatgaagtgagactctccaaaaaaaaaaaagaaattattaatccctgcctgtgctctacatagcctcatgggcatcattggatagctcagagggcccttgattctggcaaggcaaataaagccagaatgagaaattaccatcttctactagagaaaaccaagagaaaaatttttatgctaggatgcctttatgaccacttaattttttaatcttagtttaatggtctctccctggtgctaactgctgacagtggccacctcttttttgggggttgaggggcctacataactagctggccttaccccatatcttttgttcaaacataataccatctttttgcttcttctgaactttagatctccataacacatgtactgtagaatgtgatggaaaagcattgatgagaatttattggcagttcagattgtgttttcccaacttaggctctttattaattggttaaggttttctccaaaaagggcatttcaacaatgggaattatttaatgtaacagtgggcacagattacttatcttccttctctgctttgtgactcaccagcagtaacacacacaatccacatcttgtgcacctcaaatgaacagacttggtttccttgctttcttgacatttccatgactgtttcacatacaaactattgggtgaggtttttcagctgttaccgacccacgtcctgctgtctctgtgtggtcctacaaaaactgtccattcccacccctttgctttgccatttgcaagagtctggaattgtcaggtctcagcttcgaaaagtcctggttccactgacaggacacattctttagtgggaattaagacctacaaagtctagtttgtatgtaggtatgaagggaattttttaaataaattgaaaagctgtgaacagcattagaactttgtctatttcttaattttaaaatatgctgatatgccttaaactgtagttgtagatccttgtcattttgctgtttgaaaataaccaatgtgttttctaaaactgtcgtgtaatctactttcattgttaatgcagaattgtcatatatgtaagctgcatgttagacatttgtcttttttaaactaaagtaattgtattgatgtgaagcatatcattttttcaaatatgaaagtgatcacttagcaacatgcttggtaatttggcatctgttaaggtaggagagtggtgaacagataatctatgcatatatcactagtgccaagacataaagcgggggaaaatatatttttacccaaacattaaaaaaaaaaaaaaaaaaaaaaaaggggggggcgaaaaattcccccggagggccccaggttgtcggttacccgctttcttggtcacagggggccccatatgggggggcgatttaattaaggctgaggcggggccgcgtcttttcaccacgtcgtgcccgggacacatgtgcatcctggcaccttggggagagacctttactcggnggggggccactattggccacgtttcctcggaatttaaggccgaggcattttactttcacgtgttcgcggttcacgcacgtt

SEQ ID NO: 459530 - DNA, 6614 bp, Homo sapiens
tgctctaataaagcgggaggggcggcggcgtggggggagcagatgccgctggctgccagcgggacgccggcgagcagagcgcagccgcgagggaggcgcgagggaggcgagccggagcccgagcactagcagcagccggagtcggcgtaaagcacccgggcgcagccggagccggtgccgcagctgcgatggccgtggccgtggggagaccgtctaatgaagagcttcgaaacttgtctttgtctggccatgtgggatttgacagcctccctgaccagctggtcaacaagtctacttctcaaggattctgtttcaacatcctttgtgttggtgagacaggcattggcaaatccacgttaatggacactttgttcaacaccaaatttgaaagtgacccagctactcacaatgaaccaggtgttcggttaaaagccagaagttatgagcttcaggaaagcaatgtacggctgaagttaaccattgttgacaccgtgggatttggagaccagataaataaagatgacagctataagccgatagtagaatatattgatgcccagttcgaggcctacctgcaagaggaattgaagattaaacgttctctcttcaactaccatgacacgaggatccatgcctgcctctactttattgcccctactggacattcactaaagtccctggatctggtcaccatgaaaaagctggacagtaaggtgaacatcattccaataattgcaaaagctgacaccattgccaagaatgaactgcacaaattcaagagtaagatcatgagtgaactggtcagcaatggggtccagatatatcagtttcccactgatgaagaaacggtggcagagattaacgcaacaatgagtgtccatctcccatttgcagtggttggcagcaccgaagaggtgaagattggcaacaagatggcaaaggccaggcagtacccctggggtgtggtgcaggttgagaatgaaaatcattgcgattttgtgaaacttcgagagatgctgatccgcgtgaacatggaggacttgcgagagcagactcacacccgccactatgaattgtaccgacgctgtaagcttgaagagatggggttcaaggacactgaccctgacagcaaacccttcagtcttcaggagacatatgaagcaaaaaggaatgaattcctgggagaactgcagaagaaagaagaagaaatgagacaaatgtttgttatgagagtgaaggagaaagaagctgaacttaaggaggcagagaaagagcttcacgagaagtttgaccttctaaagcggacacaccaagaagaaaagaagaaagtggaagacaagaagaaggagcttgaggaggaggtgaacaacttccagaagaagaaagcagcggctcagttactacagtcccaggcccagcaatctggggcccagcaaaccaagaaagacaaggataagaaaaatgcaagcttcacataaagcctggcaagccaaggatgttcccgcattcacctgcttttgcagtaatatcgtatctctgccatgtgtgttctttagttttattttattttattttatttttttacccttcctcaaacaccagtaactattattaactcgttttgctgaatgttgttgggtggtagaaaatgatagaacaagggaataaccgcgaatgctctgtgcagctggactctgtttccggaaagtaaatgatttgctttttatgcctgttctgaatggcagcacgaagcaggcctgttacttgtatgtcgctttggacagaggaaagtggggtaaaatgctacctgtacgtctgacatgaaaacttctcaccgcctcagcagctgaactaaaaacctgaatagccatgacaagagtttgcattttcttgatgattcatctccatgagtgcacaatccctgaactcactgtcttttctccacacttgtcctaagccaaggtagatttgtacgtagacagactggtgagcaagcattatattttatttttacccttgcatgacattttcattttaatcaataacattatttggcctgagcttgtgggtctgttcagactgtctcctctcatggtttgaaactgcatctgaatgcctgccttcaatcctggccaagttggagtagactggtatgagaaaactatgattagttcacatttactggtgcatccttgatcctctcacagatagaggtcttaaaggttggatcatgtaacattgcttagtagaagaatcttcttctaaggatgatgggctttctacagcctgcttaccactaacagtaaggaatctttcataaacacacctcagtttgttcccagtgggcttagagggaggacctgatgactgattccaggatacttgtacttctaataacatttttcatgaatcatgagaaaatttccacagatacttcccttagaaaatttgctataaactctgtatcattggtagcacaaatttgagcgaggccttgtcaattttaaggtggaaataggaaggaccacaacatgacccgtaagtcaagaaggtagacatttcatatccagcttccttgcttagtctcctttcagtatttggcaataaaagaaagaagaaatagaacagctgaagtctcaaatcattgtctggaattttcctcaccttggctagctccacctgctctttgtctaaggcccttgcctcatcagggattagaactggcccatatgccagaacctgtactaaatgcctaatttgtatggaagagtgcatatttaatctcttttctatactgctcctttctgatgcttatcctttcatctgtgtgattgttttttcccctctactaacaagatcctcccagctttctctctacatgtagaaaggataacatttctcatgaacccactgcccctctgcattttcctcactggttagagattaagtaaataggatagaatatgctgcgtctcccctgacacacactttcttttttgaatgagcaagtctccattttgatttcagcaaagattttttctccttttctttgtcctcaaccatacttagaggaaagaaggaatggtcttccatgaactgattatgcttaattaagcaaagtaaggaaattagtttcatggaagcctaaacaaagctggaatagaaactacacactagacacagcagtagtcatagtcttcacaggtttaggagctactggaccaacattcttgtttttgcttttgtttttttaaataattctagtctggagctaactgtggagcagccaaatagtagctggcatgttgattcaaaccatgggctgaatttgctcataggctgtgcatcagacaaaagcttgaatatttgtgttgtatgcttgttccaaccaccgcttgtgtgagcatttttgtggcttgtacagaaagtacacttttaaattgtctcttgcatcactaaaatttttttaaaatgagcataacaacgaaaggcatccagctgactttttgattccaagattattgattggattgacttttttgcattaaatttttcccagcaaaataaatcatatggcgagtcagggaataaaaagtcaaaagaaacaaatagaagcttttttttttaaaaaatgtattgcttctgaacttttttctgccactgctccctagccctgtttagtttgttattgctgcttttcttttttctttctgtatctatgcctttttttcacagtagtccttggctctgcacggaataaatgataccctcaaatctaattggatgtgctttcgcctttgcatgtaagtacggtagtaagaaacctttgagatctttctgacttttcaaaattagagaaagcaaatgggatggatagattttttttttcttttcaaggggggcaggaaggtaatggtttgagtagcctttgtttaaaaaaaagactaaatatatttaaaaggccacatttatatttttttcacaagaaccacataataaattccacttcttgacctgaatttggaaatccgaaattactaatccaggccaggtgtggtggctcatgcctgtaatcccagcactttgagaggccgaggtgggcagatcacttgaggcctggagttcaagaccaccttggcgaacacggtgaaaccccgtctctacaaaaaatacaaaaattagccaggcgtggtggcacgtgcctgtagtcccagctacttgggaggctaagtcaggagaattgcttgaacttgggagatggaggttgcagtgagccaagattgcaccactgcattccaacctgggtgatgaagtgagactctccaaaaaaaaaaaagaaattattaatccctgcctgtgctctacatagcctcatgggcatcattggatagctcagagggcccttgattctggcaaggcaaataaagccagaatgagaaattaccatcttctactagagaaaaccaagagaaaaatttttatgctaggatgcctttatgaccacttaattttttaatcttagtttaatggtctctccctggtgctaactgctgacagtggccacctcttttttgggggttgaggggcctacataactagctggccttaccccatatcttttgttcaaacataataccatctttttgcttcttctgaactttagatctccataacacatgtactgtagaatgtgatggaaaagcattgatgagaatttattggcagttcagattgtgttttcccaacttaggctctttattaattggttaaggttttctccaaaaagggcatttcaacaatgggaattatttaatgtaacagtgggcacagattacttatcttccttctctgctttgtgactcaccagcagtaacacacacaatccacatcttgtgcacctcaaatgaacagacttggtttccttgctttcttgacatttccatgactgtttcacatacaaactattgggtgaggtttttcagctgttaccgacccacgtcctgctgtctctgtgtggtcctacaaaaactgtccattcccacccctttgctttgccatttgcaagagtctggaattgtcaggtctcagcttcgaaaagtcctggttccactgacaggacacattctttagtgggaattaagacctacaaagtctagtttgtatgtaggtatgaagggaattttttaaataaattgaaaagctgtgaacagcattagaactttgtctatttcttaattttaaaatatgctgatatgccttaaactgtagttgtagatccttgtcattttgctgtttgaaaataaccaatgtgttttctaaaactgtcgtgtaatctactttcattgttaatgcagaattgtcatatatgtaagctgcatgttagacatttgtcttttttaaactaaagtaattgtattgatgtgaagcatatcattttttcaaatatgaaagtgatcacttagcaacatgcttggtaatttggcatctgttaaggtaggagagtggtgaacagataatctatgcatatatcactagtgccaagacataaagcgggggaaaatatatttttacccaaacattatttgtgtgcccttttttgtgagttctttttagtcactgcttggtttgcatatgtacacgtgcttactggataaaagaaatagggataagagtctcatgctttcctgcctcgtgtggtagacttcaaatggctgccgtctgggttacaccagtttctcaaagatacgtgccatgtggtgtcctgtacttcacatatcatgttatcaccctttttcccccatgcctgtccctgtccaccctgccaattcatgtgccttggtgcccagctgaggcatcgtcttcttcactggcctcctcttccctgctgctgctcaccctcccgtcgagctcgaggaagtcaccccattaactgacacactgctgttctttcacagcttgttgtagagaagctccttttcttttcttaagccattaagaatcaaatttgaatctgaacctttcttttttctcttctgtagcttcttctttatgtaaccatcctgttgacaagccctactctctcctaatggacatagagcattagaagagcaggagctgtctgttcacacgtgttggggaagagttacctcatttccaccatcgcctcctgttcttttaaagtctgggtcaaatattgcactgctgtttgtacttgtcaatgtctgcccatagtggatactgaagtgacttaccactaccaaaaatagtcatattcaataatattaattaaaaaggaaaaaggaaattgactgaaacagaaaacgtgggccaagacccaaggtcttgtgctgggatccccttgcttagaactatcatgttcttgaagctgctgatccaagaactgatggactgaagacagcgtgtaccctaacctgagggggccaccacacccagggcccacaaacttgatctcatggtaactcctgtcctttctgtcccatgagccacattctgaacagcctgatcaggatcctcaaccgtcaggtcataagatccgagcaacattttccttccttttgttagttttatgggttgttttggtgtttggggttttt

SEQ ID NO: 459531 - DNA, 5527 bp, Homo sapiens
tgctctaataaagcgggaggggcggcggcgtggggggagcagatgccgctggctgccagcgggacgccggcgagcagagcgcagccgcgagggaggcgcgagggaggcgagccggagcccgagcactagcagcagccggagtcggcgtaaagcacccgggcgcagccggagccggtgccgcagctgcgatggccgtggccgtggggagaccgtctaatgaagagcttcgaaacttgtctttgtctggccatgtgggatttgacagcctccctgaccagctggtcaacaagtctacttctcaaggattctgtttcaacatcctttgtgttggtgagacaggcattggcaaatccacgttaatggacactttgttcaacaccaaatttgaaagtgacccagctactcacaatgaaccaggtgttcggttaaaagccagaagttatgagcttcaggaaagcaatgtacggctgaagttaaccattgttgacaccgtgggatttggagaccagataaataaagatgacagctataagccgatagtagaatatattgatgcccagttcgaggcctacctgcaagaggaattgaagattaaacgttctctcttcaactaccatgacacgaggatccatgcctgcctctactttattgcccctactggacattcactaaagtccctggatctggtcaccatgaaaaagctggacagtaaggtgaacatcattccaataattgcaaaagctgacaccattgccaagaatgaactgcacaaattcaagagtaagatcatgagtgaactggtcagcaatggggtccagatatatcagtttcccactgatgaagaaacggtggcagagattaacgcaacaatgagtgtccatctcccatttgcagtggttggcagcaccgaagaggtgaagattggcaacaagatggcaaaggccaggcagtacccctggggtgtggtgcaggttgagaatgaaaatcattgcgattttgtgaaacttcgagagatgctgatccgcgtgaacatggaggacttgcgagagcagactcacacccgccactatgaattgtaccgacgctgtaagcttgaagagatggggttcaaggacactgaccctgacagcaaacccttcagtcttcaggagacatatgaagcaaaaaggaatgaattcctgggagaactgcagaagaaagaagaagaaatgagacaaatgtttgttatgagagtgaaggagaaagaagctgaacttaaggaggcagagaaagagcttcacgagaagtttgaccttctaaagcggacacaccaagaagaaaagaagaaagtggaagacaagaagaaggagcttgaggaggaggtgaacaacttccagaagaagaaagcagcggctcagttactacagtcccaggcccagcaatctggggcccagcaaaccaagaaagacaaggataagaaaaatgcaagcttcacataaagcctggcaagccaaggatgttcccgcattcacctgcttttgcagtaatatcgtatctctgccatgtgtgttctttagttttattttattttattttatttttttacccttcctcaaacaccagtaactattattaactcgttttgctgaatgttgttgggtggtagaaaatgatagaacaagggaataaccgcgaatgctctgtgcagctggactctgtttccggaaagtaaatgatttgctttttatgcctgttctgaatggcagcacgaagcaggcctgttacttgtatgtcgctttggacagaggaaagtggggtaaaatgctacctgtacgtctgacatgaaaacttctcaccgcctcagcagctgaactaaaaacctgaatagccatgacaagagtttgcattttcttgatgattcatctccatgagtgcacaatccctgaactcactgtcttttctccacacttgtcctaagccaaggtagatttgtacgtagacagactggtgagcaagcattatattttatttttacccttgcatgacattttcattttaatcaataacattatttggcctgagcttgtgggtctgttcagactgtctcctctcatggtttgaaactgcatctgaatgcctgccttcaatcctggccaagttggagtagactggtatgagaaaactatgattagttcacatttactggtgcatccttgatcctctcacagatagaggtcttaaaggttggatcatgtaacattgcttagtagaagaatcttcttctaaggatgatgggctttctacagcctgcttaccactaacagtaaggaatctttcataaacacacctcagtttgttcccagtgggcttagagggaggacctgatgactgattccaggatacttgtacttctaataacatttttcatgaatcatgagaaaatttccacagatacttcccttagaaaatttgctataaactctgtatcattggtagcacaaatttgagcgaggccttgtcaattttaaggtggaaataggaaggaccacaacatgacccgtaagtcaagaaggtagacatttcatatccagcttccttgcttagtctcctttcagtatttggcaataaaagaaagaagaaatagaacagctgaagtctcaaatcattgtctggaattttcctcaccttggctagctccacctgctctttgtctaaggcccttgcctcatcagggattagaactggcccatatgccagaacctgtactaaatgcctaatttgtatggaagagtgcatatttaatctcttttctatactgctcctttctgatgcttatcctttcatctgtgtgattgttttttcccctctactaacaagatcctcccagctttctctctacatgtagaaaggataacatttctcatgaacccactgcccctctgcattttcctcactggttagagattaagtaaataggatagaatatgctgcgtctcccctgacacacactttcttttttgaatgagcaagtctccattttgatttcagcaaagattttttctccttttctttgtcctcaaccatacttagaggaaagaaggaatggtcttccatgaactgattatgcttaattaagcaaagtaaggaaattagtttcatggaagcctaaacaaagctggaatagaaactacacactagacacagcagtagtcatagtcttcacaggtttaggagctactggaccaacattcttgtttttgcttttgtttttttaaataattctagtctggagctaactgtggagcagccaaatagtagctggcatgttgattcaaaccatgggctgaatttgctcataggctgtgcatcagacaaaagcttgaatatttgtgttgtatgcttgttccaaccaccgcttgtgtgagcatttttgtggcttgtacagaaagtacacttttaaattgtctcttgcatcactaaaatttttttaaaatgagcataacaacgaaaggcatccagctgactttttgattccaagattattgattggattgacttttttgcattaaatttttcccagcaaaataaatcatatggcgagtcagggaataaaaagtcaaaagaaacaaatagaagcttttttttttaaaaaatgtattgcttctgaacttttttctgccactgctccctagccctgtttagtttgttattgctgcttttcttttttctttctgtatctatgcctttttttcacagtagtccttggctctgcacggaataaatgataccctcaaatctaattggatgtgctttcgcctttgcatgtaagtacggtagtaagaaacctttgagatctttctgacttttcaaaattagagaaagcaaatgggatggatagattttttttttcttttcaaggggggcaggaaggtaatggtttgagtagcctttgtttaaaaaaaagactaaatatatttaaaaggccacatttatatttttttcacaagaaccacataataaattccacttcttgacctgaatttggaaatccgaaattactaatccaggccaggtgtggtggctcatgcctgtaatcccagcactttgagaggccgaggtgggcagatcacttgaggcctggagttcaagaccaccttggcgaacacggtgaaaccccgtctctacaaaaaatacaaaaattagccaggcgtggtggcacgtgcctgtagtcccagctacttgggaggctaagtcaggagaattgcttgaacttgggagatggaggttgcagtgagccaagattgcaccactgcattccaacctgggtgatgaagtgagactctccaaaaaaaaaaaagaaattattaatccctgcctgtgctctacatagcctcatgggcatcattggatagctcagagggcccttgattctggcaaggcaaataaagccagaatgagaaattaccatcttctactagagaaaaccaagagaaaaatttttatgctaggatgcctttatgaccacttaattttttaatcttagtttaatggtctctccctggtgctaactgctgacagtggccacctcttttttgggggttgaggggcctacataactagctggccttaccccatatcttttgttcaaacataataccatctttttgcttcttctgaactttagatctccataacacatgtactgtagaatgtgatggaaaagcattgatgagaatttattggcagttcagattgtgttttcccaacttaggctctttattaattggttaaggttttctccattatcttccttctctgctttgtgactcaccagcagtaacacacacaatccacatcttgtgcacctcaaatgaacagacttggtttccttgctttcttgacatttccatgactgtttcacatacaaactattgggtgaggtttttcagctgttaccgacccacgtcctgctgtctctgtgtggtcctacaaaaactgtccattcccacccctttgctttgccatttgcaagagtctggaattgtcaggtctcagcttcgaaaagtcctggttccactgacaggacacattctttagtgggaattaagacctacaaagtctagtttgtatgtaggtatgaagggaattttttaaataaattgaaaagctgtgaacagcattagaactttgtctatttcttaattttaaaatatgctgatatgccttaaactgtagttgtagatccttgtcattttgctgtttgaaaataaccaatgtgttttctaaaactgtcgtgtaatctactttcattgttaatgcagaattgtcatatatgtaagctgcatgttagacatttgtcttttttaaactaaagtaattgtattgatgtgaagcatatcattttttcaaatatgaaagtgatcacttagcaacatgcttggtaatttggcatctgttaaggtaggagagtggtgaacagataatctatgcatatatcactagtgccaagacataaagcgggggaaaatatatttttacccaaacatta

SEQ ID NO: 459532 - DNA, 5442 bp, Homo sapiens
tgctctaataaagcgggaggggcggcggcgtggggggagcagatgccgctggctgccagcgggacgccggcgagcagagcgcagccgcgagggaggcgcgagggaggcgagccggagcccgagcactagcagcagccggagtcggcgtaaagcacccgggcgcagccggagccggtgccgcagctgcgatggccgtggccgtggggagaccgtctaatgaagagcttcgaaacttgtctttgtctggccatgtgggatttgacagcctccctgaccagctggtcaacaagtctacttctcaaggattctgtttcaacatcctttgtgttggtgagacaggcattggcaaatccacgttaatggacactttgttcaacaccaaatttgaaagtgacccagctactcacaatgaaccaggtgttcggttaaaagccagaagttatgagcttcaggaaagcaatgtacggctgaagttaaccattgttgacaccgtgggatttggagaccagataaataaagatgacagctataagccgatagtagaatatattgatgcccagttcgaggcctacctgcaagaggaattgaagattaaacgttctctcttcaactaccatgacacgaggatccatgcctgcctctactttattgcccctactggacattcactaaagtccctggatctggtcaccatgaaaaagctggacagtaaggtgaacatcattccaataattgcaaaagctgacaccattgccaagaatgaactgcacaaattcaagagtaagatcatgagtgaactggtcagcaatggggtccagatatatcagtttcccactgatgaagaaacggtggcagagattaacgcaacaatgagtgtccatctcccatttgcagtggttggcagcaccgaagaggtgaagattggcaacaagatggcaaaggccaggcagtacccctggggtgtggtgcaggttgagaatgaaaatcattgcgattttgtgaaacttcgagagatgctgatccgcgtgaacatggaggacttgcgagagcagactcacacccgccactatgaattgtaccgacgctgtaagcttgaagagatggggttcaaggacactgaccctgacagcaaacccttcagtcttcaggagacatatgaagcaaaaaggaatgaattcctgggagaactgcagaagaaagaagaagaaatgagacaaatgtttgttatgagagtgaaggagaaagaagctgaacttaaggaggcagagaaagagcttcacgagaagtttgaccttctaaagcggacacaccaagaagaaaagaagaaagtggaagacaagaagaaggagcttgaggaggaggtgaacaacttccagaagaagaaagcagcggctcagttactacagtcccaggcccagcaatctggggcccagcaaaccaagaaagacaaggataagaaaaatgcaagcttcacataaagcctggcaagccaaggatgttcccgcattcacctgcttttgcagtaatatcgtatctctgccatgtgtgttctttagttttattttattttattttatttttttacccttcctcaaacaccagtaactattattaactcgttttgctgaatgttgttgggtggtagaaaatgatagaacaagggaataaccgcgaatgctctgtgcagctggactctgtttccggaaagtaaatgatttgctttttatgcctgttctgaatggcagcacgaagcaggcctgttacttgtatgtcgctttggacagaggaaagtggggtaaaatgctacctgtacgtctgacatgaaaacttctcaccgcctcagcagctgaactaaaaacctgaatagccatgacaagagtttgcattttcttgatgattcatctccatgagtgcacaatccctgaactcactgtcttttctccacacttgtcctaagccaaggtagatttgtacgtagacagactggtgagcaagcattatattttatttttacccttgcatgacattttcattttaatcaataacattatttggcctgagcttgtgggtctgttcagactgtctcctctcatggtttgaaactgcatctgaatgcctgccttcaatcctggccaagttggagtagactggtatgagaaaactatgattagttcacatttactggtgcatccttgatcctctcacagatagaggtcttaaaggttggatcatgtaacattgcttagtagaagaatcttcttctaaggatgatgggctttctacagcctgcttaccactaacagtaaggaatctttcataaacacacctcagtttgttcccagtgggcttagagggaggacctgatgactgattccaggatacttgtacttctaataacatttttcatgaatcatgagaaaatttccacagatacttcccttagaaaatttgctataaactctgtatcattggtagcacaaatttgagcgaggccttgtcaattttaaggtggaaataggaaggaccacaacatgacccgtaagtcaagaaggtagacatttcatatccagcttccttgcttagtctcctttcagtatttggcaataaaagaaagaagaaatagaacagctgaagtctcaaatcattgtctggaattttcctcaccttggctagctccacctgctctttgtctaaggcccttgcctcatcagggattagaactggcccatatgccagaacctgtactaaatgcctaatttgtatggaagagtgcatatttaatctcttttctatactgctcctttctgatgcttatcctttcatctgtgtgattgttttttcccctctactaacaagatcctcccagctttctctctacatgtagaaaggataacatttctcatgaacccactgcccctctgcattttcctcactggttagagattaagtaaataggatagaatatgctgcgtctcccctgacacacactttcttttttgaatgagcaagtctccattttgatttcagcaaagattttttctccttttctttgtcctcaaccatacttagaggaaagaaggaatggtcttccatgaactgattatgcttaattaagcaaagtaaggaaattagtttcatggaagcctaaacaaagctggaatagaaactacacactagacacagcagtagtcatagtcttcacaggtttaggagctactggaccaacattcttgtttttgcttttgtttttttaaataattctagtctggagctaactgtggagcagccaaatagtagctggcatgttgattcaaaccatgggctgaatttgctcataggctgtgcatcagacaaaagcttgaatatttgtgttgtatgcttgttccaaccaccgcttgtgtgagcatttttgtggcttgtacagaaagtacacttttaaattgtctcttgcatcactaaaatttttttaaaatgagcataacaacgaaaggcatccagctgactttttgattccaagattattgattggattgacttttttgcattaaatttttcccagcaaaataaatcatatggcgagtcagggaataaaaagtcaaaagaaacaaatagaagcttttttttttaaaaaatgtattgcttctgaacttttttctgccactgctccctagccctgtttagtttgttattgctgcttttcttttttctttctgtatctatgcctttttttcacagtagtccttggctctgcacggaataaatgataccctcaaatctaattggatgtgctttcgcctttgcatgtaagtacggtagtaagaaacctttgagatctttctgacttttcaaaattagagaaagcaaatgggatggatagattttttttttcttttcaaggggggcaggaaggtaatggtttgagtagcctttgtttaaaaaaaagactaaatatatttaaaaggccacatttatatttttttcacaagaaccacataataaattccacttcttgacctgaatttggaaatccgaaattactaatccaggccaggtgtggtggctcatgcctgtaatcccagcactttgagaggccgaggtgggcagatcacttgaggcctggagttcaagaccaccttggcgaacacggtgaaaccccgtctctacaaaaaatacaaaaattagccaggcgtggtggcacgtgcctgtagtcccagctacttgggaggctaagtcaggagaattgcttgaacttgggagatggaggttgcagtgagccaagattgcaccactgcattccaacctgggtgatgaagtgagactctccaaaaaaaaaaaagaaattattaatccctgcctgtgctctacatagcctcatgggcatcattggatagctcagagggcccttgattctggcaaggcaaataaagccagaatgagaaattaccatcttctactagagaaaaccaagagaaaaatttttatgctaggatgcctttatgaccacttaattttttaatcttagtttaatggtctctccctggtgctaactgctgacagtggccacctcttttttgggggttgaggggcctacataactagctggccttaccccatatcttttgttcaaacataataccatctttttgcttcttctgaactttagatctccataacacatgtactgtagaatgtgatggaaaagcattgatgagaatttattggcagttcagattgtgttttcccaacttaggctctttattaattggttaaggttttctccaaaaagggcatttcaacaatgggaattatttaatgtaacagtgggcacagattacttatcttccttctctgctttgtgactcaccagcagtaacacacacaatccacatcttgtgcacctcaaatgaacagacttggtttccttgctttcttgacatttccatgactgtttcacatacaaactattgggtgaggtttttcagctgttaccgacccacgtcctgctgtctctgtgtggtcctacaaaaactgtccattcccacccctttgctttgccatttgcaagagtctggaattgtcaggtctcagcttcgaaaagtcctggttccactgacaggacacattctttagtgggaattaagacctacaaagtctagtttgtatgtaggtatgaagggaattttttaaataaattgaaaagctgtgaacagcattagaactttgtctatttcttaattttaaaatatgctgatatgccttaaactgtagttgtagatccttgtcattttgctgtttgaaaataaccaatgtgttttttcccatcctcgtgttatccactctccatggtattatattttggccatttaggcaatctgtttgttggcccctagccgcagtcctcttcattttatcgttattcggagggcaacccgttttttcccc

SEQ ID NO: 459533 - DNA, 5464 bp, Homo sapiens
ggaagatcaagcgcatggcaggcatgaaggaatcgcagatcagcgcagccggagccggtgccgcagctgcgatggccgtggccgtggggagaccgtctaatgaagagcttcgaaacttgtctttgtctggccatgtgggatttgacagcctccctgaccagctggtcaacaagtctacttctcaaggattctgtttcaacatcctttgtgttggtgagacaggcattggcaaatccacgttaatggacactttgttcaacaccaaatttgaaagtgacccagctactcacaatgaaccaggtgttcggttaaaagccagaagttatgagcttcaggaaagcaatgtacggctgaagttaaccattgttgacaccgtgggatttggagaccagataaataaagatgacagctataagccgatagtagaatatattgatgcccagttcgaggcctacctgcaagaggaattgaagattaaacgttctctcttcaactaccatgacacgaggatccatgcctgcctctactttattgcccctactggacattcactaaagtccctggatctggtcaccatgaaaaagctggacagtaaggtgaacatcattccaataattgcaaaagctgacaccattgccaagaatgaactgcacaaattcaagagtaagatcatgagtgaactggtcagcaatggggtccagatatatcagtttcccactgatgaagaaacggtggcagagattaacgcaacaatgagtgtccatctcccatttgcagtggttggcagcaccgaagaggtgaagattggcaacaagatggcaaaggccaggcagtacccctggggtgtggtgcaggttgagaatgaaaatcattgcgattttgtgaaacttcgagagatgctgatccgcgtgaacatggaggacttgcgagagcagactcacacccgccactatgaattgtaccgacgctgtaagcttgaagagatggggttcaaggacactgaccctgacagcaaacccttcagtcttcaggagacatatgaagcaaaaaggaatgaattcctgggagaactgcagaagaaagaagaagaaatgagacaaatgtttgttatgagagtgaaggagaaagaagctgaacttaaggaggcagagaaagagcttcacgagaagtttgaccttctaaagcggacacaccaagaagaaaagaagaaagtggaagacaagaagaaggagcttgaggaggaggtgaacaacttccagaagaagaaagcagcggctcagttactacagtcccaggcccagcaatctggggcccagcaaaccaagaaagacaaggataagaaaaatgcaagcttcacataaagcctggcaagccaaggatgttcccgcattcacctgcttttgcagtaatatcgtatctctgccatgtgtgttctttagttttattttattttattttatttttttacccttcctcaaacaccagtaactattattaactcgttttgctgaatgttgttgggtggtagaaaatgatagaacaagggaataaccgcgaatgctctgtgcagctggactctgtttccggaaagtaaatgatttgctttttatgcctgttctgaatggcagcacgaagcaggcctgttacttgtatgtcgctttggacagaggaaagtggggtaaaatgctacctgtacgtctgacatgaaaacttctcaccgcctcagcagctgaactaaaaacctgaatagccatgacaagagtttgcattttcttgatgattcatctccatgagtgcacaatccctgaactcactgtcttttctccacacttgtcctaagccaaggtagatttgtacgtagacagactggtgagcaagcattatattttatttttacccttgcatgacattttcattttaatcaataacattatttggcctgagcttgtgggtctgttcagactgtctcctctcatggtttgaaactgcatctgaatgcctgccttcaatcctggccaagttggagtagactggtatgagaaaactatgattagttcacatttactggtgcatccttgatcctctcacagatagaggtcttaaaggttggatcatgtaacattgcttagtagaagaatcttcttctaaggatgatgggctttctacagcctgcttaccactaacagtaaggaatctttcataaacacacctcagtttgttcccagtgggcttagagggaggacctgatgactgattccaggatacttgtacttctaataacatttttcatgaatcatgagaaaatttccacagatacttcccttagaaaatttgctataaactctgtatcattggtagcacaaatttgagcgaggccttgtcaattttaaggtggaaataggaaggaccacaacatgacccgtaagtcaagaaggtagacatttcatatccagcttccttgcttagtctcctttcagtatttggcaataaaagaaagaagaaatagaacagctgaagtctcaaatcattgtctggaattttcctcaccttggctagctccacctgctctttgtctaaggcccttgcctcatcagggattagaactggcccatatgccagaacctgtactaaatgcctaatttgtatggaagagtgcatatttaatctcttttctatactgctcctttctgatgcttatcctttcatctgtgtgattgttttttcccctctactaacaagatcctcccagctttctctctacatgtagaaaggataacatttctcatgaacccactgcccctctgcattttcctcactggttagagattaagtaaataggatagaatatgctgcgtctcccctgacacacactttcttttttgaatgagcaagtctccattttgatttcagcaaagattttttctccttttctttgtcctcaaccatacttagaggaaagaaggaatggtcttccatgaactgattatgcttaattaagcaaagtaaggaaattagtttcatggaagcctaaacaaagctggaatagaaactacacactagacacagcagtagtcatagtcttcacaggtttaggagctactggaccaacattcttgtttttgcttttgtttttttaaataattctagtctggagctaactgtggagcagccaaatagtagctggcatgttgattcaaaccatgggctgaatttgctcataggctgtgcatcagacaaaagcttgaatatttgtgttgtatgcttgttccaaccaccgcttgtgtgagcatttttgtggcttgtacagaaagtacacttttaaattgtctcttgcatcactaaaatttttttaaaatgagcataacaacgaaaggcatccagctgactttttgattccaagattattgattggattgacttttttgcattaaatttttcccagcaaaataaatcatatggcgagtcagggaataaaaagtcaaaagaaacaaatagaagcttttttttttaaaaaatgtattgcttctgaacttttttctgccactgctccctagccctgtttagtttgttattgctgcttttcttttttctttctgtatctatgcctttttttcacagtagtccttggctctgcacggaataaatgataccctcaaatctaattggatgtgctttcgcctttgcatgtaagtacggtagtaagaaacctttgagatctttctgacttttcaaaattagagaaagcaaatgggatggatagattttttttttcttttcaaggggggcaggaaggtaatggtttgagtagcctttgtttaaaaaaaagactaaatatatttaaaaggccacatttatatttttttcacaagaaccacataataaattccacttcttgacctgaatttggaaatccgaaattactaatccaggccaggtgtggtggctcatgcctgtaatcccagcactttgagaggccgaggtgggcagatcacttgaggcctggagttcaagaccaccttggcgaacacggtgaaaccccgtctctacaaaaaatacaaaaattagccaggcgtggtggcacgtgcctgtagtcccagctacttgggaggctaagtcaggagaattgcttgaacttgggagatggaggttgcagtgagccaagattgcaccactgcattccaacctgggtgatgaagtgagactctccaaaaaaaaaaaagaaattattaatccctgcctgtgctctacatagcctcatgggcatcattggatagctcagagggcccttgattctggcaaggcaaataaagccagaatgagaaattaccatcttctactagagaaaaccaagagaaaaatttttatgctaggatgcctttatgaccacttaattttttaatcttagtttaatggtctctccctggtgctaactgctgacagtggccacctcttttttgggggttgaggggcctacataactagctggccttaccccatatcttttgttcaaacataataccatctttttgcttcttctgaactttagatctccataacacatgtactgtagaatgtgatggaaaagcattgatgagaatttattggcagttcagattgtgttttcccaacttaggctctttattaattggttaaggttttctccaaaaagggcatttcaacaatgggaattatttaatgtaacagtgggcacagattacttatcttccttctctgctttgtgactcaccagcagtaacacacacaatccacatcttgtgcacctcaaatgaacagacttggtttccttgctttcttgacatttccatgactgtttcacatacaaactattgggtgaggtttttcagctgttaccgacccacgtcctgctgtctctgtgtggtcctacaaaaactgtccattcccacccctttgctttgccatttgcaagagtctggaattgtcaggtctcagcttcgaaaagtcctggttccactgacaggacacattctttagtgggaattaagacctacaaagtctagtttgtatgtaggtatgaagggaattttttaaataaattgaaaagctgtgaacagcattagaactttgtctatttcttaattttaaaatatgctgatatgccttaaactgtagttgtagatccttgtcattttgctgtttgaaaataaccaatgtgttttctaaaactgtcgtgtaatctactttcattgttaatgcagaattgtcatatatgtaagctgcatgttagacatttgtcttttttaaactaaagtaattgtattgatgtgaagcatatcattttttcaaatatgaaagtgatcacttagcaacatgcttggtaatttggcatctgttaaggtaggagagtggtgaacagataatctatgcatatatcactagtgccaagacataaagcgggggaaaatatatttttacccaaacatta

SEQ ID NO: 459534 - DNA, 5351 bp, Homo sapiens
tttaaactttataatcatgactaataaaaaatactgatgaattgaactgatgtctgagagacattgacacattctctgatttttcttttgtggttatgtggtgagacaggcattggcaaatccacgttaatggacactttgttcaacaccaaatttgaaagtgacccagctactcacaatgaaccaggtgttcggttaaaagccagaagttatgagcttcaggaaagcaatgtacggctgaagttaaccattgttgacaccgtgggatttggagaccagataaataaagatgacagctataagccgatagtagaatatattgatgcccagttcgaggcctacctgcaagaggaattgaagattaaacgttctctcttcaactaccatgacacgaggatccatgcctgcctctactttattgcccctactggacattcactaaagtccctggatctggtcaccatgaaaaagctggacagtaaggtgaacatcattccaataattgcaaaagctgacaccattgccaagaatgaactgcacaaattcaagagtaagatcatgagtgaactggtcagcaatggggtccagatatatcagtttcccactgatgaagaaacggtggcagagattaacgcaacaatgagtgtccatctcccatttgcagtggttggcagcaccgaagaggtgaagattggcaacaagatggcaaaggccaggcagtacccctggggtgtggtgcaggttgagaatgaaaatcattgcgattttgtgaaacttcgagagatgctgatccgcgtgaacatggaggacttgcgagagcagactcacacccgccactatgaattgtaccgacgctgtaagcttgaagagatggggttcaaggacactgaccctgacagcaaacccttcagtcttcaggagacatatgaagcaaaaaggaatgaattcctgggagaactgcagaagaaagaagaagaaatgagacaaatgtttgttatgagagtgaaggagaaagaagctgaacttaaggaggcagagaaagagcttcacgagaagtttgaccttctaaagcggacacaccaagaagaaaagaagaaagtggaagacaagaagaaggagcttgaggaggaggtgaacaacttccagaagaagaaagcagcggctcagttactacagtcccaggcccagcaatctggggcccagcaaaccaagaaagacaaggataagaaaaatgcaagcttcacataaagcctggcaagccaaggatgttcccgcattcacctgcttttgcagtaatatcgtatctctgccatgtgtgttctttagttttattttattttattttatttttttacccttcctcaaacaccagtaactattattaactcgttttgctgaatgttgttgggtggtagaaaatgatagaacaagggaataaccgcgaatgctctgtgcagctggactctgtttccggaaagtaaatgatttgctttttatgcctgttctgaatggcagcacgaagcaggcctgttacttgtatgtcgctttggacagaggaaagtggggtaaaatgctacctgtacgtctgacatgaaaacttctcaccgcctcagcagctgaactaaaaacctgaatagccatgacaagagtttgcattttcttgatgattcatctccatgagtgcacaatccctgaactcactgtcttttctccacacttgtcctaagccaaggtagatttgtacgtagacagactggtgagcaagcattatattttatttttacccttgcatgacattttcattttaatcaataacattatttggcctgagcttgtgggtctgttcagactgtctcctctcatggtttgaaactgcatctgaatgcctgccttcaatcctggccaagttggagtagactggtatgagaaaactatgattagttcacatttactggtgcatccttgatcctctcacagatagaggtcttaaaggttggatcatgtaacattgcttagtagaagaatcttcttctaaggatgatgggctttctacagcctgcttaccactaacagtaaggaatctttcataaacacacctcagtttgttcccagtgggcttagagggaggacctgatgactgattccaggatacttgtacttctaataacatttttcatgaatcatgagaaaatttccacagatacttcccttagaaaatttgctataaactctgtatcattggtagcacaaatttgagcgaggccttgtcaattttaaggtggaaataggaaggaccacaacatgacccgtaagtcaagaaggtagacatttcatatccagcttccttgcttagtctcctttcagtatttggcaataaaagaaagaagaaatagaacagctgaagtctcaaatcattgtctggaattttcctcaccttggctagctccacctgctctttgtctaaggcccttgcctcatcagggattagaactggcccatatgccagaacctgtactaaatgcctaatttgtatggaagagtgcatatttaatctcttttctatactgctcctttctgatgcttatcctttcatctgtgtgattgttttttcccctctactaacaagatcctcccagctttctctctacatgtagaaaggataacatttctcatgaacccactgcccctctgcattttcctcactggttagagattaagtaaataggatagaatatgctgcgtctcccctgacacacactttcttttttgaatgagcaagtctccattttgatttcagcaaagattttttctccttttctttgtcctcaaccatacttagaggaaagaaggaatggtcttccatgaactgattatgcttaattaagcaaagtaaggaaattagtttcatggaagcctaaacaaagctggaatagaaactacacactagacacagcagtagtcatagtcttcacaggtttaggagctactggaccaacattcttgtttttgcttttgtttttttaaataattctagtctggagctaactgtggagcagccaaatagtagctggcatgttgattcaaaccatgggctgaatttgctcataggctgtgcatcagacaaaagcttgaatatttgtgttgtatgcttgttccaaccaccgcttgtgtgagcatttttgtggcttgtacagaaagtacacttttaaattgtctcttgcatcactaaaatttttttaaaatgagcataacaacgaaaggcatccagctgactttttgattccaagattattgattggattgacttttttgcattaaatttttcccagcaaaataaatcatatggcgagtcagggaataaaaagtcaaaagaaacaaatagaagcttttttttttaaaaaatgtattgcttctgaacttttttctgccactgctccctagccctgtttagtttgttattgctgcttttcttttttctttctgtatctatgcctttttttcacagtagtccttggctctgcacggaataaatgataccctcaaatctaattggatgtgctttcgcctttgcatgtaagtacggtagtaagaaacctttgagatctttctgacttttcaaaattagagaaagcaaatgggatggatagattttttttttcttttcaaggggggcaggaaggtaatggtttgagtagcctttgtttaaaaaaaagactaaatatatttaaaaggccacatttatatttttttcacaagaaccacataataaattccacttcttgacctgaatttggaaatccgaaattactaatccaggccaggtgtggtggctcatgcctgtaatcccagcactttgagaggccgaggtgggcagatcacttgaggcctggagttcaagaccaccttggcgaacacggtgaaaccccgtctctacaaaaaatacaaaaattagccaggcgtggtggcacgtgcctgtagtcccagctacttgggaggctaagtcaggagaattgcttgaacttgggagatggaggttgcagtgagccaagattgcaccactgcattccaacctgggtgatgaagtgagactctccaaaaaaaaaaaagaaattattaatccctgcctgtgctctacatagcctcatgggcatcattggatagctcagagggcccttgattctggcaaggcaaataaagccagaatgagaaattaccatcttctactagagaaaaccaagagaaaaatttttatgctaggatgcctttatgaccacttaattttttaatcttagtttaatggtctctccctggtgctaactgctgacagtggccacctcttttttgggggttgaggggcctacataactagctggccttaccccatatcttttgttcaaacataataccatctttttgcttcttctgaactttagatctccataacacatgtactgtagaatgtgatggaaaagcattgatgagaatttattggcagttcagattgtgttttcccaacttaggctctttattaattggttaaggttttctccaaaaagggcatttcaacaatgggaattatttaatgtaacagtgggcacagattacttatcttccttctctgctttgtgactcaccagcagtaacacacacaatccacatcttgtgcacctcaaatgaacagacttggtttccttgctttcttgacatttccatgactgtttcacatacaaactattgggtgaggtttttcagctgttaccgacccacgtcctgctgtctctgtgtggtcctacaaaaactgtccattcccacccctttgctttgccatttgcaagagtctggaattgtcaggtctcagcttcgaaaagtcctggttccactgacaggacacattctttagtgggaattaagacctacaaagtctagtttgtatgtaggtatgaagggaattttttaaataaattgaaaagctgtgaacagcattagaactttgtctatttcttaattttaaaatatgctgatatgccttaaactgtagttgtagatccttgtcattttgctgtttgaaaataaccaatgtgttttctaaaactgtcgtgtaatctactttcattgttaatgcagaattgtcatatatgtaagctgcatgttagacatttgtcttttttaaactaaagtaattgtattgatgtgaagcatatcattttttcaaatatgaaagtgatcacttagcaacatgcttggtaatttggcatctgttaaggtaggagagtggtgaacagataatctatgcatatatcactagtgccaagacataaagcgggggaaaatatatttttacccaaacatta

SEQ ID NO: 459535 - DNA, 5485 bp, Homo sapiens
tgctctaataaagcgggaggggcggcggcgtggggggagcagatgccgctggctgccagcgggacgccggcgagcagagcgcagccgcgagggaggcgcgagggaggcgagccggagcccgagcactagcagcagccggagtcggcgtaaagcacccgggcgcagccggagccggtgccgcagctgcgatggccgtggccgtggggagaccgtctaatgaagagcttcgaaacttgtctttgtctggccatgtgggatttgacagcctccctgaccagctggtcaacaagtctacttctcaaggattctgtttcaacatcctttgtgttggtgagacaggcattggcaaatccacgttaatggacactttgttcaacaccaaatttgaaagtgacccagctactcacaatgaaccaggtgttcggttaaaagccagaagttatgagcttcaggaaagcaatgtacggctgaagttaaccattgttgacaccgtgggatttggagaccagataaataaagatgacagctataagccgatagtagaatatattgatgcccagttcgaggcctacctgcaagaggaattgaagattaaacgttctctcttcaactaccatgacacgaggatccatgcctgcctctactttattgcccctactggacattcactaaagtccctggatctggtcaccatgaaaaagctggacagtaaggtgaacatcattccaataattgcaaaagctgacaccattgccaagaatgaactgcacaaattcaagagtaagatcatgagtgaactggtcagcaatggggtccagatatatcagtttcccactgatgaagaaacggtggcagagattaacgcaacaatgagtgtccatctcccatttgcagtggttggcagcaccgaagaggtgaagattggcaacaagatggcaaaggccaggcagtacccctggggtgtggtgcaggttgagaatgaaaatcattgcgattttgtgaaacttcgagagatgctgatccgcgtgaacatggaggacttgcgagagcagactcacacccgccactatgaattgtaccgacgctgtaagcttgaagagatggggttcaaggacactgaccctgacagcaaacccttcagtcttcaggagacatatgaagcaaaaaggaatgaattcctgggagaactgcagaagaaagaagaagaaatgagacaaatgtttgttatgagagtgaaggagaaagaagctgaacttaaggaggcagagaaagagcttcacgagaagtttgaccttctaaagcggacacaccaagaagaaaagaagaaagtggaagacaagaagaagaaagacaaggataagaaaaatgcaagcttcacataaagcctggcaagccaaggatgttcccgcattcacctgcttttgcagtaatatcgtatctctgccatgtgtgttctttagttttattttattttattttatttttttacccttcctcaaacaccagtaactattattaactcgttttgctgaatgttgttgggtggtagaaaatgatagaacaagggaataaccgcgaatgctctgtgcagctggactctgtttccggaaagtaaatgatttgctttttatgcctgttctgaatggcagcacgaagcaggcctgttacttgtatgtcgctttggacagaggaaagtggggtaaaatgctacctgtacgtctgacatgaaaacttctcaccgcctcagcagctgaactaaaaacctgaatagccatgacaagagtttgcattttcttgatgattcatctccatgagtgcacaatccctgaactcactgtcttttctccacacttgtcctaagccaaggtagatttgtacgtagacagactggtgagcaagcattatattttatttttacccttgcatgacattttcattttaatcaataacattatttggcctgagcttgtgggtctgttcagactgtctcctctcatggtttgaaactgcatctgaatgcctgccttcaatcctggccaagttggagtagactggtatgagaaaactatgattagttcacatttactggtgcatccttgatcctctcacagatagaggtcttaaaggttggatcatgtaacattgcttagtagaagaatcttcttctaaggatgatgggctttctacagcctgcttaccactaacagtaaggaatctttcataaacacacctcagtttgttcccagtgggcttagagggaggacctgatgactgattccaggatacttgtacttctaataacatttttcatgaatcatgagaaaatttccacagatacttcccttagaaaatttgctataaactctgtatcattggtagcacaaatttgagcgaggccttgtcaattttaaggtggaaataggaaggaccacaacatgacccgtaagtcaagaaggtagacatttcatatccagcttccttgcttagtctcctttcagtatttggcaataaaagaaagaagaaatagaacagctgaagtctcaaatcattgtctggaattttcctcaccttggctagctccacctgctctttgtctaaggcccttgcctcatcagggattagaactggcccatatgccagaacctgtactaaatgcctaatttgtatggaagagtgcatatttaatctcttttctatactgctcctttctgatgcttatcctttcatctgtgtgattgttttttcccctctactaacaagatcctcccagctttctctctacatgtagaaaggataacatttctcatgaacccactgcccctctgcattttcctcactggttagagattaagtaaataggatagaatatgctgcgtctcccctgacacacactttcttttttgaatgagcaagtctccattttgatttcagcaaagattttttctccttttctttgtcctcaaccatacttagaggaaagaaggaatggtcttccatgaactgattatgcttaattaagcaaagtaaggaaattagtttcatggaagcctaaacaaagctggaatagaaactacacactagacacagcagtagtcatagtcttcacaggtttaggagctactggaccaacattcttgtttttgcttttgtttttttaaataattctagtctggagctaactgtggagcagccaaatagtagctggcatgttgattcaaaccatgggctgaatttgctcataggctgtgcatcagacaaaagcttgaatatttgtgttgtatgcttgttccaaccaccgcttgtgtgagcatttttgtggcttgtacagaaagtacacttttaaattgtctcttgcatcactaaaatttttttaaaatgagcataacaacgaaaggcatccagctgactttttgattccaagattattgattggattgacttttttgcattaaatttttcccagcaaaataaatcatatggcgagtcagggaataaaaagtcaaaagaaacaaatagaagcttttttttttaaaaaatgtattgcttctgaacttttttctgccactgctccctagccctgtttagtttgttattgctgcttttcttttttctttctgtatctatgcctttttttcacagtagtccttggctctgcacggaataaatgataccctcaaatctaattggatgtgctttcgcctttgcatgtaagtacggtagtaagaaacctttgagatctttctgacttttcaaaattagagaaagcaaatgggatggatagattttttttttcttttcaaggggggcaggaaggtaatggtttgagtagcctttgtttaaaaaaaagactaaatatatttaaaaggccacatttatatttttttcacaagaaccacataataaattccacttcttgacctgaatttggaaatccgaaattactaatccaggccaggtgtggtggctcatgcctgtaatcccagcactttgagaggccgaggtgggcagatcacttgaggcctggagttcaagaccaccttggcgaacacggtgaaaccccgtctctacaaaaaatacaaaaattagccaggcgtggtggcacgtgcctgtagtcccagctacttgggaggctaagtcaggagaattgcttgaacttgggagatggaggttgcagtgagccaagattgcaccactgcattccaacctgggtgatgaagtgagactctccaaaaaaaaaaaagaaattattaatccctgcctgtgctctacatagcctcatgggcatcattggatagctcagagggcccttgattctggcaaggcaaataaagccagaatgagaaattaccatcttctactagagaaaaccaagagaaaaatttttatgctaggatgcctttatgaccacttaattttttaatcttagtttaatggtctctccctggtgctaactgctgacagtggccacctcttttttgggggttgaggggcctacataactagctggccttaccccatatcttttgttcaaacataataccatctttttgcttcttctgaactttagatctccataacacatgtactgtagaatgtgatggaaaagcattgatgagaatttattggcagttcagattgtgttttcccaacttaggctctttattaattggttaaggttttctccaaaaagggcatttcaacaatgggaattatttaatgtaacagtgggcacagattacttatcttccttctctgctttgtgactcaccagcagtaacacacacaatccacatcttgtgcacctcaaatgaacagacttggtttccttgctttcttgacatttccatgactgtttcacatacaaactattgggtgaggtttttcagctgttaccgacccacgtcctgctgtctctgtgtggtcctacaaaaactgtccattcccacccctttgctttgccatttgcaagagtctggaattgtcaggtctcagcttcgaaaagtcctggttccactgacaggacacattctttagtgggaattaagacctacaaagtctagtttgtatgtaggtatgaagggaattttttaaataaattgaaaagctgtgaacagcattagaactttgtctatttcttaattttaaaatatgctgatatgccttaaactgtagttgtagatccttgtcattttgctgtttgaaaataaccaatgtgttttctaaaactgtcgtgtaatctactttcattgttaatgcagaattgtcatatatgtaagctgcatgttagacatttgtcttttttaaactaaagtaattgtattgatgtgaagcatatcattttttcaaatatgaaagtgatcacttagcaacatgcttggtaatttggcatctgttaaggtaggagagtggtgaacagataatctatgcatatatcactagtgccaagacataaagcgggggaaaatatatttttacccaaacatta

SEQ ID NO: 459536 - DNA, 4221 bp, Homo sapiens
tgctctaataaagcgggaggggcggcggcgtggggggagcagatgccgctggctgccagcgggacgccggcgagcagagcgcagccgcgagggaggcgcgagggaggcgagccggagcccgagcactagcagcagccggagtcggcgtaaagcacccgggcgcagccggagccggtgccgcagctgcgatggccgtggccgtggggagaccgtctaatgaagagcttcgaaacttgtctttgtctggccatgtgggatttgacagcctccctgaccagctggtcaacaagtctacttctcaaggattctgtttcaacatcctttgtgttggtgagacaggcattggcaaatccacgttaatggacactttgttcaacaccaaatttgaaagtgacccagctactcacaatgaaccaggtgttcggttaaaagccagaagttatgagcttcaggaaagcaatgtacggctgaagttaaccattgttgacaccgtgggatttggagaccagataaataaagatgacagctataagccgatagtagaatatattgatgcccagttcgaggcctacctgcaagaggaattgaagattaaacgttctctcttcaactaccatgacacgaggatccatgcctgcctctactttattgcccctactggacattcactaaagtccctggatctggtcaccatgaaaaagctggacagtaaggtgaacatcattccaataattgcaaaagctgacaccattgccaagaatgaactgcacaaattcaagagtaagatcatgagtgaactggtcagcaatggggtccagatatatcagtttcccactgatgaagaaacggtggcagagattaacgcaacaatgagtgtccatctcccatttgcagtggttggcagcaccgaagaggtgaagattggcaacaagatggcaaaggccaggcagtacccctggggtgtggtgcaggttgagaatgaaaatcattgcgattttgtgaaacttcgagagatgctgatccgcgtgaacatggaggacttgcgagagcagactcacacccgccactatgaattgtaccgacgctgtaagcttgaagagatggggttcaaggacactgaccctgacagcaaacccttcagtcttcaggagacatatgaagcaaaaaggaatgaattcctgggagaactgcagaagaaagaagaagaaatgagacaaatgtttgttatgagagtgaaggagaaagaagctgaacttaaggaggcagagaaagagcttcacgagaagtttgaccttctaaagcggacacaccaagaagaaaagaagaaagtggaagacaagaagaaggagcttgaggaggaggtgaacaacttccagaagaagaaagcagcggctcagttactacagtcccaggcccagcaatctggggcccagcaaaccaagaaagacaaggataagaaaaatgcaagcttcacataaagcctggcaagccaaggatgttcccgcattcacctgcttttgcagtaatatcgtatctctgccatgtgtgttctttagttttattttattttattttatttttttacccttcctcaaacaccagtaactattattaactcgttttgctgaatgttgttgggtggtagaaaatgatagaacaagggaataaccgcgaatgctctgtgcagctggactctgtttccggaaagtaaatgatttgctttttatgcctgttctgaatggcagcacgaagcaggcctgttacttgtatgtcgctttggacagaggaaagtggggtaaaatgctacctgtacgtctgacatgaaaacttctcaccgcctcagcagctgaactaaaaacctgaatagccatgacaagagtttgcattttcttgatgattcatctccatgagtgcacaatccctgaactcactgtcttttctccacacttgtcctaagccaaggtagatttgtacgtagacagactggtgagcaagcattatattttatttttacccttgcatgacattttcattttaatcaataacattatttggcctgagcttgtgggtctgttcagactgtctcctctcatggtttgaaactgcatctgaatgcctgccttcaatcctggccaagttggagtagactggtatgagaaaactatgattagttcacatttactggtgcatccttgatcctctcacagatagaggtcttaaaggttggatcatgtaacattgcttagtagaagaatcttcttctaaggatgatgggctttctacagcctgcttaccactaacagtaaggaatctttcataaacacacctcagtttgttcccagtgggcttagagggaggacctgatgactgattccaggatacttgtacttctaataacatttttcatgaatcatgagaaaatttccacagatacttcccttagaaaatttgctataaactctgtatcattggtagcacaaatttgagcgaggccttgtcaattttaaggtggaaataggaaggaccacaacatgacccgtaagtcaagaaggtagacatttcatatccagcttccttgcttagtctcctttcagtatttggcaataaaagaaagaagaaatagaacagctgaagtctcaaatcattgtctggaattttcctcaccttggctagctccacctgctctttgtctaaggcccttgcctcatcagggattagaactggcccatatgccagaacctgtactaaatgcctaatttgtatggaagagtgcatatttaatctcttttctatactgctcctttctgatgcttatcctttcatctgtgtgattgttttttcccctctactaacaagatcctcccagctttctctctacatgtagaaaggataacatttctcatgaacccactgcccctctgcattttcctcactggttagagattaagtaaataggatagaatatgctgcgtctcccctgacacacactttcttttttgaatgagcaagtctccattttgatttcagcaaagattttttctccttttctttgtcctcaaccatacttagaggaaagaaggaatggtcttccatgaactgattatgcttaattaagcaaagtaaggaaattagtttcatggaagcctaaacaaagctggaatagaaactacacactagacacagcagtagtcatagtcttcacaggtttaggagctactggaccaacattcttgtttttgcttttgtttttttaaataattctagtctggagctaactgtggagcagccaaatagtagctggcatgttgattcaaaccatgggctgaatttgctcataggctgtgcatcagacaaaagcttgaatatttgtgttgtatgcttgttccaaccaccgcttgtgtgagcatttttgtggcttgtacagaaagtacacttttaaattgtctcttgcatcactaaaatttttttaaaatgagcataacaacgaaaggcatccagctgactttttgattccaagattattgattggattgacttttttgcattaaatttttcccagcaaaataaatcatatggcgagtcagggaataaaaagtcaaaagaaacaaatagaagcttttttttttaaaaaatgtattgcttctgaacttttttctgccactgctccctagccctgtttagtttgttattgctgcttttcttttttctttctgtatctatgcctttttttcacagtagtccttggctctgcacggaataaatgataccctcaaatctaattggatgtgctttcgcctttgcatctgaccatctgcctcttgagagagagagaagtgggcatccttcctttaaattcaggaaccactgttgttttatttgactttttctgttacttgcatcccttatataagttgttttggatttgggactatgttttgggggagaaaaactccagttagttctgttttttgtattggttattcagcttacttttggtatcaaaattatgccagttttaagctcacttgagtgaagtttaagtcacaagattctgtttaacatgctttccttgttttggaaacaaccaaaaacttcccttttttgttacgggattttgacctacaaatcctaatcatgtttaaaatgtgccggtgttgggtagatgacttttctgcctctggggttcaatttatatttaaagataccttaaaataaaaaaat

SEQ ID NO: 459537 - DNA, 3853 bp, Homo sapiens
  misc_feature (3843)..(3843): n is a, c, g, or t
  misc_feature (3848)..(3848): n is a, c, g, or t
tgctctaataaagcgggaggggcggcggcgtggggggagcagatgccgctggctgccagcgggacgccggcgagcagagcgcagccgcgagggaggcgcgagggaggcgagccggagcccgagcactagcagcagccggagtcggcgtaaagcacccgggcgcagccggagccggtgccgcagctgcgatggccgtggccgtggggagaccgtctaatgaagagcttcgaaacttgtctttgtctggccatgtgggatttgacagcctccctgaccagctggtcaacaagtctacttctcaaggattctgtttcaacatcctttgtgttggtgagacaggcattggcaaatccacgttaatggacactttgttcaacaccaaatttgaaagtgacccagctactcacaatgaaccaggtgttcggttaaaagccagaagttatgagcttcaggaaagcaatgtacggctgaagttaaccattgttgacaccgtgggatttggagaccagataaataaagatgacagctataagccgatagtagaatatattgatgcccagttcgaggcctacctgcaagaggaattgaagattaaacgttctctcttcaactaccatgacacgaggatccatgcctgcctctactttattgcccctactggacattcactaaagtccctggatctggtcaccatgaaaaagctggacagtaaggtgaacatcattccaataattgcaaaagctgacaccattgccaagaatgaactgcacaaattcaagagtaagatcatgagtgaactggtcagcaatggggtccagatatatcagtttcccactgatgaagaaacggtggcagagattaacgcaacaatgagtgtccatctcccatttgcagtggttggcagcaccgaagaggtgaagattggcaacaagatggcaaaggccaggcagtacccctggggtgtggtgcaggttgagaatgaaaatcattgcgattttgtgaaacttcgagagatgctgatccgcgtgaacatggaggacttgcgagagcagactcacacccgccactatgaattgtaccgacgctgtaagcttgaagagatggggttcaaggacactgaccctgacagcaaacccttcagtcttcaggagacatatgaagcaaaaaggaatgaattcctgggagaactgcagaagaaagaagaagaaatgagacaaatgtttgttatgagagtgaaggagaaagaagctgaacttaaggaggcagagaaagagcttcacgagaagtttgaccttctaaagcggacacaccaagaagaaaagaagaaagtggaagacaagaagaaggagcttgaggaggaggtgaacaacttccagaagaagaaagcagcggctcagttactacagtcccaggcccagcaatctggggcccagcaaaccaagaaagacaaggataagaaaaatgcaagcttcacataaagcctggcaagccaaggatgttcccgcattcacctgcttttgcagtaatatcgtatctctgccatgtgtgttctttagttttattttattttattttatttttttacccttcctcaaacaccagtaactattattaactcgttttgctgaatgttgttgggtggtagaaaatgatagaacaagggaataaccgcgaatgctctgtgcagctggactctgtttccggaaagtaaatgatttgctttttatgcctgttctgaatggcagcacgaagcaggcctgttacttgtatgtcgctttggacagaggaaagtggggtaaaatgctacctgtacgtctgacatgaaaacttctcaccgcctcagcagctgaactaaaaacctgaatagccatgacaagagtttgcattttcttgatgattcatctccatgagtgcacaatccctgaactcactgtcttttctccacacttgtcctaagccaaggtagatttgtacgtagacagactggtgagcaagcattatattttatttttacccttgcatgacattttcattttaatcaataacattatttggcctgagcttgtgggtctgttcagactgtctcctctcatggtttgaaactgcatctgaatgcctgccttcaatcctggccaagttggagtagactggtatgagaaaactatgattagttcacatttactggtgcatccttgatcctctcacagatagaggtcttaaaggttggatcatgtaacattgcttagtagaagaatcttcttctaaggatgatgggctttctacagcctgcttaccactaacagtaaggaatctttcataaacacacctcagtttgttcccagtgggcttagagggaggacctgatgactgattccaggatacttgtacttctaataacatttttcatgaatcatgagaaaatttccacagatacttcccttagaaaatttgctataaactctgtatcattggtagcacaaatttgagcgaggccttgtcaattttaaggtggaaataggaaggaccacaacatgacccgtaagtcaagaaggtagacatttcatatccagcttccttgcttagtctcctttcagtatttggcaataaaagaaagaagaaatagaacagctgaagtctcaaatcattgtctggaattttcctcaccttggctagctccacctgctctttgtctaaggcccttgcctcatcagggattagaactggcccatatgccagaacctgtactaaatgcctaatttgtatggaagagtgcatatttaatctcttttctatactgctcctttctgatgcttatcctttcatctgtgtgattgttttttcccctctactaacaagatcctcccagctttctctctacatgtagaaaggataacatttctcatgaacccactgcccctctgcattttcctcactggttagagattaagtaaataggatagaatatgctgcgtctcccctgacacacactttcttttttgaatgagcaagtctccattttgatttcagcaaagattttttctccttttctttgtcctcaaccatacttagaggaaagaaggaatggtcttccatgaactgattatgcttaattaagcaaagtaaggaaattagtttcatggaagcctaaacaaagctggaatagaaactacacactagacacagcagtagtcatagtcttcacaggtttaggagctactggaccaacattcttgtttttgcttttgtttttttaaataattctagtctggagctaactgtggagcagccaaatagtagctggcatgttgattcaaaccatgggctgaatttgctcataggctgtgcatcagacaaaagcttgaatatttgtgttgtatgcttgttccaaccaccgcttgtgtgagcatttttgtggcttgtacagaaagtacacttttaaattgtctcttgcatcactaaaatttttttaaaatgagcataacaacgaaaggcatccagctgactttttgattccaagattattgattggattgacttttttgcattaaatttttcccagcaaaataaatcatatggcgagtcagggaataaaaagtcaaaagaaacaaatagaagcttttttttttaaaaaatgtattgcttctgaacttttttctgccactgctccctagccctgtttagtttgttattgctgcttttcttttttctttctgtatctatgcctttttttcacagtagtccttggctctgcacggaataaatgataccctcaaatctaaaaaaaaaaaaaaaaaaaaaaaaaaaacaaaaaaaaaaaaaaaaaaaaaaaaaaaaaaaaaaaanaaaanaaaaa

SEQ ID NO: 459538 - DNA, 2626 bp, Homo sapiens
tgctctaataaagcgggaggggcggcggcgtggggggagcagatgccgctggctgccagcgggacgccggcgagcagagcgcagccgcgagggaggcgcgagggaggcgagccggagcccgagcactagcagcagccggagtcggcgtaaagcacccgggcgcagccggagccggtgccgcagctgcgatggccgtggccgtggggagaccgtctaatgaagagcttcgaaacttgtctttgtctggccatgtgggatttgacagcctccctgaccagctggtcaacaagtctacttctcaaggattctgtttcaacatcctttgtgttggtgagacaggcattggcaaatccacgttaatggacactttgttcaacaccaaatttgaaagtgacccagctactcacaatgaaccaggtgttcggttaaaagccagaagttatgagcttcaggaaagcaatgtacggctgaagttaaccattgttgacaccgtgggatttggagaccagataaataaagatgacagctataagccgatagtagaatatattgatgcccagttcgaggcctacctgcaagaggaattgaagattaaacgttctctcttcaactaccatgacacgaggatccatgcctgcctctactttattgcccctactggacattcactaaagtccctggatctggtcaccatgaaaaagctggacagtaaggtgaacatcattccaataattgcaaaagctgacaccattgccaagaatgaactgcacaaattcaagagtaagatcatgagtgaactggtcagcaatggggtccagatatatcagtttcccactgatgaagaaacggtggcagagattaacgcaacaatgagtgtccatctcccatttgcagtggttggcagcaccgaagaggtgaagattggcaacaagatggcaaaggccaggcagtacccctggggtgtggtgcaggttgagaatgaaaatcattgcgattttgtgaaacttcgagagatgctgatccgcgtgaacatggaggacttgcgagagcagactcacacccgccactatgaattgtaccgacgctgtaagcttgaagagatggggttcaaggacactgaccctgacagcaaacccttcagtcttcaggagacatatgaagcaaaaaggaatgaattcctgggagaactgcagaagaaagaagaagaaatgagacaaatgtttgttatgagagtgaaggagaaagaagctgaacttaaggaggcagagaaagagcttcacgagaagtttgaccttctaaagcggacacaccaagaagaaaagaagaaagtggaagacaagaagaaggagcttgaggaggaggtgaacaacttccagaagaagaaagcagcggctcagttactacagtcccaggcccagcaatctggggcccagcaaaccaagaaagacaaggataagaaaaatgcaagcttcacataaagcctggcaagccaaggatgttcccgcattcacctgcttttgcagtaatatcgtatctctgccatgtgtgttctttagttttattttattttattttatttttttacccttcctcaaacaccagtaactattattaactcgttttgctgaatgttgttgggtggtagaaaatgatagaacaagggaataaccgcgaatgctctgtgcagctggactctgtttccggaaagtaaatgatttgctttttatgcctgttctgaatggcagcacgaagcaggcctgttacttgtatgtcgctttggacagaggaaagtggggtaaaatgctacctgtacgtctgacatgaaaacttctcaccgcctcagcagctgaactaaaaacctgaatagccatgacaagagtttgcattttcttgatgattcatctccatgagtgcacaatccctgaactcactgtcttttctccacacttgtcctaagccaaggtagatttgtacgtagacagactggtgagcaagcattatattttatttttacccttgcatgacattttcattttaatcaataacattatttggcctgagcttgtgggtctgttcagactgtctcctctcatggtttgaaactgcatctgaatgcctgccttcaatcctggccaagttggagtagactggtatgagaaaactatgattagttcacatttactggtgcatccttgatcctctcacagatagaggtcttaaaggttggatcatgtaacattgcttagtagaagaatcttcttctaaggatgatgggctttctacagcctgcttaccactaacagtaaggaatctttcataaacacacctcagtttgttcccagtgggcttagagggaggacctgatgactgattccaggatacttgtacttctaataacatttttcatgaatcatgagaaaatttccacagatacttcccttagaaaatttgctataaactctgtatcattggtagcacaaatttgagcgaggccttgtcaattttaaggtggaaataggaaggaccacaacatgacccgtaagtcaagaaggtagacatttcatatccagcttccttgcttagtctcctttcagtatttggcaataaaagaaagaagaaatagaac

SEQ ID NO: 459539 - DNA, 2700 bp, Homo sapiens
  misc_feature (2690)..(2690): n is a, c, g, or t
  misc_feature (2695)..(2695): n is a, c, g, or t
tgctctaataaagcgggaggggcggcggcgtggggggagcagatgccgctggctgccagcgggacgccggcgagcagagcgcagccgcgagggaggcgcgagggaggcgagccggagcccgagcactagcagcagccggagtcggcgtaaagcacccgggcgcagccggagccggtgccgcagctgcgatggccgtggccgtggggagaccgtctaatgaagagcttcgaaacttgtctttgtctggccatgtgggatttgacagcctccctgaccagctggtcaacaagtctacttctcaaggattctgtttcaacatcctttgtgttggtgagacaggcattggcaaatccacgttaatggacactttgttcaacaccaaatttgaaagtgacccagctactcacaatgaaccaggtgttcggttaaaagccagaagttatgagcttcaggaaagcaatgtacggctgaagttaaccattgttgacaccgtgggatttggagaccagataaataaagatgacagctataagccgatagtagaatatattgatgcccagttcgaggcctacctgcaagaggaattgaagattaaacgttctctcttcaactaccatgacacgaggatccatgcctgcctctactttattgcccctactggacattcactaaagtccctggatctggtcaccatgaaaaagctggacagtaaggtgaacatcattccaataattgcaaaagctgacaccattgccaagaatgaactgcacaaattcaagagtaagatcatgagtgaactggtcagcaatggggtccagatatatcagtttcccactgatgaagaaacggtggcagagattaacgcaacaatgagtgtccatctcccatttgcagtggttggcagcaccgaagaggtgaagattggcaacaagatggcaaaggccaggcagtacccctggggtgtggtgcaggttgagaatgaaaatcattgcgattttgtgaaacttcgagagatgctgatccgcgtgaacatggaggacttgcgagagcagactcacacccgccactatgaattgtaccgacgctgtaagcttgaagagatggggttcaaggacactgaccctgacagcaaacccttcagtcttcaggagacatatgaagcaaaaaggaatgaattcctgggagaactgcagaagaaagaagaagaaatgagacaaatgtttgttatgagagtgaaggagaaagaagctgaacttaaggaggcagagaaagagcttcacgagaagtttgaccttctaaagcggacacaccaagaagaaaagaagaaagtggaagacaagaagaaggagcttgaggaggaggtgaacaacttccagaagaagaaagcagcggctcagttactacagtcccaggcccagcaatctggggcccagcaaaccaagaaagacaaggataagaaaaatgcaagcttcacataaagcctggcaagccaaggatgttcccgcattcacctgcttttgcagtaatatcgtatctctgccatgtgtgttctttagttttattttattttattttatttttttacccttcctcaaacaccagtaactattattaactcgttttgctgaatgttgttgggtggtagaaaatgatagaacaagggaataaccgcgaatgctctgtgcagctggactctgtttccggaaagtaaatgatttgctttttatgcctgttctgaatggcagcacgaagcaggcctgttacttgtatgtcgctttggacagaggaaagtggggtaaaatgctacctgtacgtctgacatgaaaacttctcaccgcctcagcagctgaactaaaaacctgaatagccatgacaagagtttgcattttcttgatgattcatctccatgagtgcacaatccctgaactcactgtcttttctccacacttgtcctaagccaaggtagatttgtacgtagacagactggtgagcaagcattatattttatttttacccttgcatgacattttcattttaatcaataacattatttggcctgagcttgtgggtctgttcagactgtctcctctcatggtttgaaactgcatctgaatgcctgccttcaatcctggccaagttggagtagactggtatgagaaaactatgattagttcacatttactggtgcatccttgatcctctcacagatagaggtcttaaaggttggatcatgtaacattgcttagtagaagaatcttcttctaaggatgatgggctttctacagcctgcttaccactaacagtaaggaatctttcataaacacacctcagtttgttcccagtgggcttagagggaggacctgatgactgattccaggatacttgtacttctaataacatttttcatgaatcatgagaaaatttccacagatacttcccttagaaaatttgctataaactctgtatcattggtagcacaaatttgagcgaggccttgtcaattttaaggtggaaataggaaggaccacaacatgacccgtaagtcaagaaggtagacatttcatatccagcttccttgcttagtctcctttcagtatttggcaataaaagaaagaagaaatagaacaaaaaaaaaaaaaaaaaaaaaaaaaacaaaaaaaaaaaaaaaaaaaaaaaaaaaaaaaaaaaanaaaanaaaaa

SEQ ID NO: 459540 - DNA, 2404 bp, Homo sapiens
tgctctaataaagcgggaggggcggcggcgtggggggagcagatgccgctggctgccagcgggacgccggcgagcagagcgcagccgcgagggaggcgcgagggaggcgagccggagcccgagcactagcagcagccggagtcggcgtaaagcacccgggcgcagccggagccggtgccgcagctgcgatggccgtggccgtggggagaccgtctaatgaagagcttcgaaacttgtctttgtctggccatgtgggatttgacagcctccctgaccagctggtcaacaagtctacttctcaaggattctgtttcaacatcctttgtgttggtgagacaggcattggcaaatccacgttaatggacactttgttcaacaccaaatttgaaagtgacccagctactcacaatgaaccaggtgttcggttaaaagccagaagttatgagcttcaggaaagcaatgtacggctgaagttaaccattgttgacaccgtgggatttggagaccagataaataaagatgacagctataagccgatagtagaatatattgatgcccagttcgaggcctacctgcaagaggaattgaagattaaacgttctctcttcaactaccatgacacgaggatccatgcctgcctctactttattgcccctactggacattcactaaagtccctggatctggtcaccatgaaaaagctggacagtaaggtgaacatcattccaataattgcaaaagctgacaccattgccaagaatgaactgcacaaattcaagagtaagatcatgagtgaactggtcagcaatggggtccagatatatcagtttcccactgatgaagaaacggtggcagagattaacgcaacaatgagtgtccatctcccatttgcagtggttggcagcaccgaagaggtgaagattggcaacaagatggcaaaggccaggcagtacccctggggtgtggtgcaggttgagaatgaaaatcattgcgattttgtgaaacttcgagagatgctgatccgcgtgaacatggaggacttgcgagagcagactcacacccgccactatgaattgtaccgacgctgtaagcttgaagagatggggttcaaggacactgaccctgacagcaaacccttcagtcttcaggagacatatgaagcaaaaaggaatgaattcctgggagaactgcagaagaaagaagaagaaatgagacaaatgtttgttatgagagtgaaggagaaagaagctgaacttaaggaggcagagaaagagcttcacgagaagtttgaccttctaaagcggacacaccaagaagaaaagaagaaagtggaagacaagaagaaggagcttgaggaggaggtgaacaacttccagaagaagaaagcagcggctcagttactacagtcccaggcccagcaatctggggcccagcaaaccaagaaagacaaggataagaaaaatgcaagcttcacataaagcctggcaagccaaggatgttcccgcattcacctgcttttgcagtaatatcgtatctctgccatgtgtgttctttagttttattttattttattttatttttttacccttcctcaaacaccagtaactattattaactcgttttgctgaatgttgttgggtggtagaaaatgatagaacaagggaataaccgcgaatgctctgtgcagctggactctgtttccggaaagtaaatgatttgctttttatgcctgttctgaatggcagcacgaagcaggcctgttacttgtatgtcgctttggacagaggaaagtggggtaaaatgctacctgtacgtctgacatgaaaacttctcaccgcctcagcagctgaactaaaaacctgaatagccatgacaagagtttgcattttcttgatgattcatctccatgagtgcacaatccctgaactcactgtcttttctccacacttgtcctaagccaaggtagatttgtacgtagacagactgctgaccatctgcctcttgagagagagagaagtgggcatccttcctttaaattcaggaaccactgttgttttatttgactttttctgttacttgcatcccttatataagttgttttggatttgggactatgttttgggggagaaaaactccagttagttctgttttttgtattggttattcagcttacttttggtatcaaaattatgccagttttaagctcacttgagtgaagtttaagtcacaagattctgtttaacatgctttccttgttttggaaacaaccaaaaacttcccttttttgttacgggattttgacctacaaatcctaatcatgtttaaaatgtgccggtgttgggtagatgacttttctgcctctggggttcaatttatatttaaagataccttaaaataaaaaaat

SEQ ID NO: 459541 - DNA, 1880 bp, Homo sapiens
tgctctaataaagcgggaggggcggcggcgtggggggagcagatgccgctggctgccagcgggacgccggcgagcagagcgcagccgcgagggaggcgcgagggaggcgagccggagcccgagcactagcagcagccggagtcggcgtaaagcacccgggcgcagccggagccggtgccgcagctgcgatggccgtggccgtggggagaccgtctaatgaagagcttcgaaacttgtctttgtctggccatgtgggatttgacagcctccctgaccagctggtcaacaagtctacttctcaaggattctgtttcaacatcctttgtgttggtgagacaggcattggcaaatccacgttaatggacactttgttcaacaccaaatttgaaagtgacccagctactcacaatgaaccaggtgttcggttaaaagccagaagttatgagcttcaggaaagcaatgtacggctgaagttaaccattgttgacaccgtgggatttggagaccagataaataaagatgacagctataagccgatagtagaatatattgatgcccagttcgaggcctacctgcaagaggaattgaagattaaacgttctctcttcaactaccatgacacgaggatccatgcctgcctctactttattgcccctactggacattcactaaagtccctggatctggtcaccatgaaaaagctggacagtaaggtgaacatcattccaataattgcaaaagctgacaccattgccaagaatgaactgcacaaattcaagagtaagatcatgagtgaactggtcagcaatggggtccagatatatcagtttcccactgatgaagaaacggtggcagagattaacgcaacaatgagtgtccatctcccatttgcagtggttggcagcaccgaagaggtgaagattggcaacaagatggcaaaggccaggcagtacccctggggtgtggtgcaggttgagaatgaaaatcattgcgattttgtgaaacttcgagagatgctgatccgcgtgaacatggaggacttgcgagagcagactcacacccgccactatgaattgtaccgacgctgtaagcttgaagagatggggttcaaggacactgaccctgacagcaaacccttcagtcttcaggagacatatgaagcaaaaaggaatgaattcctgggagaactgcagaagaaagaagaagaaatgagacaaatgtttgttatgagagtgaaggagaaagaagctgaacttaaggaggcagagaaagagcttcacgagaagtttgaccttctaaagcggacacaccaagaagaaaagaagaaagtggaagacaagaagaaggagcttgaggaggaggtgaacaacttccagaagaagaaagcagcggctcagttactacagtcccaggcccagcaatctggggcccagcaaaccaagaaagacaaggataagaaaaactgaccatctgcctcttgagagagagagaagtgggcatccttcctttaaattcaggaaccactgttgttttatttgactttttctgttacttgcatcccttatataagttgttttggatttgggactatgttttgggggagaaaaactccagttagttctgttttttgtattggttattcagcttacttttggtatcaaaattatgccagttttaagctcacttgagtgaagtttaagtcacaagattctgtttaacatgctttccttgttttggaaacaaccaaaaacttcccttttttgttacgggattttgacctacaaatcctaatcatgtttaaaatgtgccggtgttgggtagatgacttttctgcctctggggttcaatttatatttaaagataccttaaaataaaaaaat

SEQ ID NO: 459542 - DNA, 1948 bp, Homo sapiens
tgctctaataaagcgggaggggcggcggcgtggggggagcagatgccgctggctgccagcgggacgccggcgagcagagcgcagccgcgagggaggcgcgagggaggcgagccggagcccgagcactagcagcagccggagtcggcgtaaagcacccgggcgcagccggagccggtgccgcagctgcgatggccgtggccgtggggagaccgtctaatgaagagcttcgaaacttgtctttgtctggccatgtgggatttgacagcctccctgaccagctggtcaacaagtctacttctcaaggattctgtttcaacatcctttgtgttggtgagacaggcattggcaaatccacgttaatggacactttgttcaacaccaaatttgaaagtgacccagctactcacaatgaaccaggtgttcggttaaaagccagaagttatgagcttcaggaaagcaatgtacggctgaagttaaccattgttgacaccgtgggatttggagaccagataaataaagatgacagctataagccgatagtagaatatattgatgcccagttcgaggcctacctgcaagaggaattgaagattaaacgttctctcttcaactaccatgacacgaggatccatgcctgcctctactttattgcccctactggacattcactaaagtccctggatctggtcaccatgaaaaagctggacagtaaggtgaacatcattccaataattgcaaaagctgacaccattgccaagaatgaactgcacaaattcaagagtaagatcatgagtgaactggtcagcaatggggtccagatatatcagtttcccactgatgaagaaacggtggcagagattaacgcaacaatgagtgtccatctcccatttgcagtggttggcagcaccgaagaggtgaagattggcaacaagatggcaaaggccaggcagtacccctggggtgtggtgcaggttgagaatgaaaatcattgcgattttgtgaaacttcgagagatgctgatccgcgtgaacatggaggacttgcgagagcagactcacacccgccactatgaattgtaccgacgctgtaagcttgaagagatggggttcaaggacactgaccctgacagcaaacccttcagtcttcaggagacatatgaagcaaaaaggaatgaattcctgggagaactgcagaagaaagaagaagaaatgagacaaatgtttgttatgagagtgaaggagaaagaagctgaacttaaggaggcagagaaagagcttcacgagaagtttgaccttctaaagcggacacaccaagaagaaaagaagaaagtggaagacaagaagaaggagcttgaggaggaggtgaacaacttccagaagaagaaagcagcggctcagttactacagtcccaggcccagcaatctggggcccagcaaaccaagaaagacaaggataagaaaaatagtccttggctctgcacggaataaatgataccctcaaatctaattggatgtgctttcgcctttgcatctgaccatctgcctcttgagagagagagaagtgggcatccttcctttaaattcaggaaccactgttgttttatttgactttttctgttacttgcatcccttatataagttgttttggatttgggactatgttttgggggagaaaaactccagttagttctgttttttgtattggttattcagcttacttttggtatcaaaattatgccagttttaagctcacttgagtgaagtttaagtcacaagattctgtttaacatgctttccttgttttggaaacaaccaaaaacttcccttttttgttacgggattttgacctacaaatcctaatcatgtttaaaatgtgccggtgttgggtagatgacttttctgcctctggggttcaatttatatttaaagataccttaaaataaaaaaat

SEQ ID NO: 459543 - DNA, 2038 bp, Homo sapiens
tgctctaataaagcgggaggggcggcggcgtggggggagcagatgccgctggctgccagcgggacgccggcgagcagagcgcagccgcgagggaggcgcgagggaggcgagccggagcccgagcactagcagcagccggagtcggcgtaaagcacccgggcgcagccggagccggtgccgcagctgcgatggccgtggccgtggggagaccgtctaatgaagagcttcgaaacttgtctttgtctggccatgtgggatttgacagcctccctgaccagctggtcaacaagtctacttctcaaggattctgtttcaacatcctttgtgttggtgagacaggcattggcaaatccacgttaatggacactttgttcaacaccaaatttgaaagtgacccagctactcacaatgaaccaggtgttcggttaaaagccagaagttatgagcttcaggaaagcaatgtacggctgaagttaaccattgttgacaccgtgggatttggagaccagataaataaagatgacagctataagccgatagtagaatatattgatgcccagttcgaggcctacctgcaagaggaattgaagattaaacgttctctcttcaactaccatgacacgaggatccatgcctgcctctactttattgcccctactggacattcactaaagtccctggatctggtcaccatgaaaaagctggacagtaaggtgaacatcattccaataattgcaaaagctgacaccattgccaagaatgaactgcacaaattcaagagtaagatcatgagtgaactggtcagcaatggggtccagatatatcagtttcccactgatgaagaaacggtggcagagattaacgcaacaatgagtgtccatctcccatttgcagtggttggcagcaccgaagaggtgaagattggcaacaagatggcaaaggccaggcagtacccctggggtgtggtgcaggttgagaatgaaaatcattgcgattttgtgaaacttcgagagatgctgatccgcgtgaacatggaggacttgcgagagcagactcacacccgccactatgaattgtaccgacgctgtaagcttgaagagatggggttcaaggacactgaccctgacagcaaacccttcagtcttcaggagacatatgaagcaaaaaggaatgaattcctgggagaactgcagaagaaagaagaagaaatgagacaaatgtttgttatgagagtgaaggagaaagaagctgaacttaaggaggcagagaaagagcttcacgagaagtttgaccttctaaagcggacacaccaagaagaaaagaagaaagtggaagacaagaagaaggagcttgaggaggaggtgaacaacttccagaagaagaaagcagcggctcagttactacagtcccaggcccagcaatctggggcccagcaaaccaagaaagacaaggataagaaaaacttcttctttatgtaaccatcctgttgacaagccctactctctcctaatggacatagagcattagaagagcaggagctgtctgttcacacgtgttggggaagagttacctcatttccaccatcgcctcctgttcttttaaagtctgggtcaaatattgcactgctgtttgtacttgtcaatgtctgcccatagtggatactgaagtgacttaccactaccaaaaatagtcatattcaataatattaattaaaaaggaaaaaggaaattgactgaaacagaaaacgtgggccaagacccaaggtcttgtgctgggatccccttgcttagaactatcatgttcttgaagctgctgatccaagaactgatggactgaagacagcgtgtaccctaacctgagggggccaccacacccagggcccacaaacttgatctcatggtaactcctgtcctttctgtcccatgagccacattctgaacagcctgatcaggatcctcaaccgtcaggtcataagatccgagcaacattttccttccttttgttagttttatgggttgttttggtgtttggggttttt

SEQ ID NO: 459544 - DNA, 1778 bp, Homo sapiens
tgctctaataaagcgggaggggcggcggcgtggggggagcagatgccgctggctgccagcgggacgccggcgagcagagcgcagccgcgagggaggcgcgagggaggcgagccggagcccgagcactagcagcagccggagtcggcgtaaagcacccgggcgcagccggagccggtgccgcagctgcgatggccgtggccgtggggagaccgtctaatgaagagcttcgaaacttgtctttgtctggccatgtgggatttgacagcctccctgaccagctggtcaacaagtctacttctcaaggattctgtttcaacatcctttgtgttggtgagacaggcattggcaaatccacgttaatggacactttgttcaacaccaaatttgaaagtgacccagctactcacaatgaaccaggtgttcggttaaaagccagaagttatgagcttcaggaaagcaatgtacggctgaagttaaccattgttgacaccgtgggatttggagaccagataaataaagatgacagctataagccgatagtagaatatattgatgcccagttcgaggcctacctgcaagaggaattgaagattaaacgttctctcttcaactaccatgacacgaggatccatgcctgcctctactttattgcccctactggacattcactaaagtccctggatctggtcaccatgaaaaagctggacagtaaggtgaacatcattccaataattgcaaaagctgacaccattgccaagaatgaactgcacaaattcaagagtaagatcatgagtgaactggtcagcaatggggtccagatatatcagtttcccactgatgaagaaacggtggcagagattaacgcaacaatgagtgtccatctcccatttgcagtggttggcagcaccgaagaggtgaagattggcaacaagatggcaaaggccaggcagtacccctggggtgtggtgcaggttgagaatgaaaatcattgcgattttgtgaaacttcgagagatgctgatccgcgtgaacatggaggacttgcgagagcagactcacacccgccactatgaattgtaccgacgctgtaagcttgaagagatggggttcaaggacactgaccctgacagcaaacccttcagtcttcaggagacatatgaagcaaaaaggaatgaattcctgggagaactgcagaagaaagaagaagaaatgagacaaatgtttgttatgagagtgaaggagaaagaagctgaacttaaggaggcagagaaagagcttcacgagaagtttgaccttctaaagcggacacaccaagaagaaaagaagaaagtggaagacaagaagaagaagaagaagaagaagaagaagaagaagaagaagaagaagaagaagaagaagaagaagaagaaagaacgaagaagaaagaagaacgaagaacgaagacagaacgaagaagaagaacgaaaaaaaaacaaggggggcggccgcaccatcatcaccttaatcaagcaacaacgtaaggtatacaaaagaaacagaagagataccaacaaacaagagaaccagaaaagcgcggacaacgtacgacaaagtacgaccgcacaacgcaactagatggaaaaaaccagccaccgacaaggagactgaggggcaccaagaagcacaacgaacgaagaacaagacccgagacaggagatgaggaacacccagcacagcagaaacacaaaagcaaaaaaaacagacaacacacaaacaaagaggtggggaaataaaaacccg

SEQ ID NO: 459545 - DNA, 647 bp, Homo sapiens
aaggagtggttggtcattcaaagaataagttcctttgttatcactatttgtcatagaagagtaacacttcctttactctgtaaagaaaaatgaggtagcataggagaggaaattacaagtatactttcagtgcaggatgggaggaagtaaaagtgtttgaatatggaactaaaagtttatctcaggtcttcttaatttttcacctaggtagaaagtctgattttcattatcatctctaccccaaaaaaaaaaaaattgtaggtacataggaggcgtatatatttatggggtacaatgagatgttttgatataagtaggaaacatctttattttttacagtaaggttttgcaatttttatttgtttgctatgttttattcacttgtctatttttcttatgttggaattgtgtaaaaatggacgtgtctgttttacaggtgaacatcattccaataattgcaaaagctgacaccattgccaagaatgaactgcacaaattcaagagtaagatcatgagtgaactggtcagcaatggggtccagatatatcagtttcccactgatgaagaaacggtggcagagattaacgcaacaatgagtgtaagtcctcaagtcaaatgggaacaagtgatttttatgaacgcctgtc

SEQ ID NO: 459546 - DNA, 3659 bp, Homo sapiens
tgctctaataaagcgggaggggcggcggcgtggggggagcagatgccgctggctgccagcgggacgccggcgagcagagcgcagccgcgagggaggcgcgagggaggcgagccggagcccgagcactagcagcagccggagtcggcgtaaagcacccgggcgcagccggagccggtgccgcagctgcgatggccgtggccgtggggagaccgtctaatgaagagcttcgaaacttgtctttgtctggccatgtgggatttgacagcctccctgaccagctggtcaacaagtctacttctcaaggattctgtttcaacatcctttgtgttggtgagacaggcattggcaaatccacgttaatggacactttgttcaacaccaaatttgaaagtgacccagctactcacaatgaaccaggtgttcggttaaaagccagaagttatgagcttcaggaaagcaatgtacggctgaagttaaccattgttgacaccgtgggatttggagaccagataaataaagatgacagctataagccgatagtagaatatattgatgcccagttcgaggcctacctgcaagaggaattgaagattaaacgttctctcttcaactaccatgacacgaggatccatgcctgcctctactttattgcccctactggacattcactaaagtccctggatctggtcaccatgaaaaagctggacagtaaggtgaacatcattccaataattgcaaaagctgacaccattgccaagaatgaactgcacaaattcaagagtaagatcatgagtgaactggtcagcaatggggtccagatatatcagtttcccactgatgaagaaacggtggcagagattaacgcaacaatgagtgtccatctcccatttgcagtggttggcagcaccgaagaggtgaagattggcaacaagatggcaaaggccaggcagtacccctggggtgtggtgcaggttgagaatgaaaatcattgcgattttgtgaaacttcgagagatgctgatccgcgtgaacatggaggacttgcgagagcagactcacacccgccactatgaattgtaccgacgctgtaagcttgaagagatggggttcaaggacactgaccctgacagcaaacccttcagtcttcaggagacatatgaagcaaaaaggaatgaattcctgggagaactgcagaagaaagaagaagaaatgagacaaatgtttgttatgagagtgaaggagaaagaagctgaacttaaggaggcagagaaagagcttcacgagaagtttgaccttctaaagcggacacaccaagaagaaaagaagaaagtggaagacaagaagaaggagcttgaggaggaggtgaacaacttccagaagaagaaagcagcggctcagttactacagtcccaggcccagcaatctggggcccagcaaaccaagaaagacaaggataagaaaaagtaagcaggtgtcacccccctgtatcggggacctctaacaatttattcctcttgcatgtctctacttttcccatttacagactggaaactggtcctttaccagaaagataaaagcaagtattttctctacagtgcagggaagatgatgaaggtttttaaatttttttaaaaggtacacaaagattaatttataaaactttaccacaattgaccaagcaatcaggcctggaggaacctgttgtctccagtagcatcttccacaccaacactaggagtctcaaagaagacaggttgatgtctcttcagcaccctctgaagacaattctcatgactcttgatagagagcatcctaaaatcacaattgttaaaattattttcctattctgtgttgtaagacttcgtaagccagtcactgaaattctcgttcccaaaatgaaacatttggaagagctgctagtggccactagtttcctcaaaattcaatatgatgaattgttttattgtgaaatgggatccaaatgcctatccagttgacacctctgccaacctcaagccaaacctaaacccattcataaaaggttttttttaaatagggtcttaatgtcatgtgccaaagggtcagattctgctcttgagttggtcacttcctgtgatactccagtagcagctgcctgaaaccagtgggagatttaggcctcccttgacattctcctgtgatttgaagctctcctttgaatcatcataaagcctagttttatgtcaatgctatcggttttgacaggaagcacgatggtaagaataccactaacgaaaacctttgtggtgtctcaatgacaaatatgcagatgccaccctcctttgtctaatgtacggtgctttagggcagctatttaatataaagcaactcagaacttgtttcaggaagtgttgctctttcgccttacatgccaaggttctagggaaaaagctgaccatatgtaaaaacattgatgctcaagcacataaagaattacattctttaaacatagagtacataggatcaagtctctgcacaataattgagatgtgttatagggaaaagtgagcacagtgctattgtccacttagtcttggtgaatgtgcagtaggctcacccctaaggaatctcatgttgcctgcagtaaaaataaaaatggactgctacaatgacatactgagagagttttaaatcatgctttacaaactgacattctgagctctgagacagcagaaaatgtatcaccagagcaagggaggaggcaaatgttctgaacaataattgaaatggttgtgattttatttggagttggcacagatccaagtgaccaaaggagttcaaggcccaaaatttagttatgctggattaattctgagagtaacaagcacatagattataatctaagaaaaccctttgtagctatgcatgtcgggagagcatctaacactaatggtgatgtttcccatgcagagactcagattacagtgactcttccagtgaagacagatgaaagccattgggcattgtacctttgttaatccaagctaaactaaccaaggatataggggtgtgtatgtgtctgtgtgtgtgtgtttgtgtgtgtgtacacatacatctataggtatgaatgagacaaaaagctgctgacttacagcttaggaaatgcaaagtcaagtttttcttttcaccctgaggcactcagtgcataaaggttcaagttttaaaactaagaatgtttccaaaagaccagcaatgttaaaagagtatttcgtgtatactagacgtgcctttaagcaataaaaattccaagagctgatcattattgtgcttccattttagaaaagtttatttagtaacaaacttcccagtgtagggaggtttttccttgcccttttgaacatgttaggttattttcttcctatcctggggccttaccaatgtgtaatgctttcaaagtttctatgaagcctgtgtggattctattttagcttatttatatattctcatttattttgaaggatattatacttaatttggttcagagtagtcgccaggttttgcacctgacaatggcacatattttttgtataactttttctaggtccttacccttttccacactttacatttgtacagtgaaagcaactgccagtggaggcctgaaatgtccaagaaaaaaaa

SEQ ID NO: 459547 - DNA, 3294 bp, Homo sapiens
tgctctaataaagcgggaggggcggcggcgtggggggagcagatgccgctggctgccagcgggacgccggcgagcagagcgcagccgcgagggaggcgcgagggaggcgagccggagcccgagcactagcagcagccggagtcggcgtaaagcacccgggcgcagccggagccggtgccgcagctgcgatggccgtggccgtggggagaccgtctaatgaagagcttcgaaacttgtctttgtctggccatgtgggatttgacagcctccctgaccagctggtcaacaagtctacttctcaaggattctgtttcaacatcctttgtgttggtgagacaggcattggcaaatccacgttaatggacactttgttcaacaccaaatttgaaagtgacccagctactcacaatgaaccaggtgttcggttaaaagccagaagttatgagcttcaggaaagcaatgtacggctgaagttaaccattgttgacaccgtgggatttggagaccagataaataaagatgacagctataagccgatagtagaatatattgatgcccagttcgaggcctacctgcaagaggaattgaagattaaacgttctctcttcaactaccatgacacgaggatccatgcctgcctctactttattgcccctactggacattcactaaagtccctggatctggtcaccatgaaaaagctggacagtaaggtgaacatcattccaataattgcaaaagctgacaccattgccaagaatgaactgcacaaattcaagagtaagatcatgagtgaactggtcagcaatggggtccagatatatcagtttcccactgatgaagaaacggtggcagagattaacgcaacaatgagtgtccatctcccatttgcagtggttggcagcaccgaagaggtgaagattggcaacaagatggcaaaggccaggcagtacccctggggtgtggtgcaggttgagaatgaaaatcattgcgattttgtgaaacttcgagagatgctgatccgcgtgaacatggaggacttgcgagagcagactcacacccgccactatgaattgtaccgacgctgtaagcttgaagagatggggttcaaggacactgaccctgacagcaaacccttcagtcttcaggagacatatgaagcaaaaaggaatgaattcctgggagaactgcagaagaaagaagaagaaatgagacaaatgtttgttatgagagtgaaggagaaagaagctgaacttaaggaggcagagaaagagcttcacgagaagtttgaccttctaaagcggacacaccaagaagaaaagaagaaagtggaagacaagaagaaggagcttgaggaggaggtgaacaacttccagaagaagaaagcagcggctcagttactacagtcccaggcccagcaatctggggcccagcaaaccaagaaagacaaggataagaaaaagtaagcaggtgtcacccccctgtatcggggacctctaacaatttattcctcttgcatgtctctacttttcccatttacagactggaaactggtcctttaccagaaagataaaagcaagtattttctctacagtgcagggaagatgatgaaggtttttaaatttttttaaaaggtacacaaagattaatttataaaactttaccacaattgaccaagcaatcaggcctggaggaacctgttgtctccagtagcatcttccacaccaacactaggagtctcaaagaagacaggttgatgtctcttcagcaccctctgaagacaattctcatgactcttgatagagagcatcctaaaatcacaattgttaaaattattttcctattctgtgttgtaagacttcgtaagccagtcactgaaattctcgttcccaaaatgaaacatttggaagagctgctagtggccactagtttcctcaaaattcaatatgatgaattgttttattgtgaaatgggatccaaatgcctatccagttgacacctctgccaacctcaagccaaacctaaacccattcataaaaggttttttttaaatagggtcttaatgtcatgtgccaaagggtcagattctgctcttgagttggtcacttcctgtgatactccagtagcagctgcctgaaaccagtgggagatttaggcctcccttgacattctcctgtgatttgaagctctcctttgaatcatcataaagcctagttttatgtcaatgctatcggttttgacaggaagcacgatggtaagaataccactaacgaaaacctttgtggtgtctcaatgacaaatatgcagatgccaccctcctttgtctaatgtacggtgctttagggcagctatttaatataaagcaactcagaacttgtttcaggaagtgttgctctttcgccttacatgccaaggttctagggaaaaagctgaccatatgtaaaaacattgatgctcaagcacataaagaattacattctttaaacatagagtacataggatcaagtctctgcacaataattgagatgtgttatagggaaaagtgagcacagtgctattgtccacttagtcttggtgaatgtgcagtaggctcacccctaaggaatctcatgttgcctgcagtaaaaataaaaatggactgctacaatgacatactgagagagttttaaatcatgctttacaaactgacattctgagctctgagacagcagaaaatgtatcaccagagcaagggaggaggcaaatgttctgaacaataattgaaatggttgtgattttatttggagttggcacagatccaagtgaccaaaggagttcaaggcccaaaatttagttatgctggattaattctgagagtaacaagcacatagattataatctaagaaaaccctttgtagctatgcatgtcgggagagcatctaacactaatggtgatgtttcccatgcagagactcagattacagtgactcttccagtgaagacagatgaaagccattgggcattgtacctttgttaatccaagctaaactaaccaaggatataggggtgtgtatgtgtctgtgtgtgtgtgtttgtgtgtgtgtacacatacatctataggtatgaatgagacaaaaagctgctgacttacagcttaggaaatgcaaagtcaagtttttcttttcaccctgaggcactcagtgcataaaggttcaagttttaaaactaagaatgtttccaaaagaccagcaatgttaaaagagtatttcgtgtatactagacgtgcctttaagcaataaaaattccaagagctga

SEQ ID NO: 459548 - DNA, 2857 bp, Homo sapiens
tgctctaataaagcgggaggggcggcggcgtggggggagcagatgccgctggctgccagcgggacgccggcgagcagagcgcagccgcgagggaggcgcgagggaggcgagccggagcccgagcactagcagcagccggagtcggcgtaaagcacccgggcgcagccggagccggtgccgcagctgcgatggccgtggccgtggggagaccgtctaatgaagagcttcgaaacttgtctttgtctggccatgtgggatttgacagcctccctgaccagctggtcaacaagtctacttctcaaggattctgtttcaacatcctttgtgttggtgagacaggcattggcaaatccacgttaatggacactttgttcaacaccaaatttgaaagtgacccagctactcacaatgaaccaggtgttcggttaaaagccagaagttatgagcttcaggaaagcaatgtacggctgaagttaaccattgttgacaccgtgggatttggagaccagataaataaagatgacagctataagccgatagtagaatatattgatgcccagttcgaggcctacctgcaagaggaattgaagattaaacgttctctcttcaactaccatgacacgaggatccatgcctgcctctactttattgcccctactggacattcactaaagtccctggatctggtcaccatgaaaaagctggacagtaaggtgaacatcattccaataattgcaaaagctgacaccattgccaagaatgaactgcacaaattcaagagtaagatcatgagtgaactggtcagcaatggggtccagatatatcagtttcccactgatgaagaaacggtggcagagattaacgcaacaatgagtgtccatctcccatttgcagtggttggcagcaccgaagaggtgaagattggcaacaagatggcaaaggccaggcagtacccctggggtgtggtgcaggttgagaatgaaaatcattgcgattttgtgaaacttcgagagatgctgatccgcgtgaacatggaggacttgcgagagcagactcacacccgccactatgaattgtaccgacgctgtaagcttgaagagatggggttcaaggacactgaccctgacagcaaacccttcagtcttcaggagacatatgaagcaaaaaggaatgaattcctgggagaactgcagaagaaagaagaagaaatgagacaaatgtttgttatgagagtgaaggagaaagaagctgaacttaaggaggcagagaaagagcttcacgagaagtttgaccttctaaagcggacacaccaagaagaaaagaagaaagtggaagacaagaagaaggagcttgaggaggaggtgaacaacttccagaagaagaaagcagcggctcagttactacagtcccaggcccagcaatctggggcccagcaaaccaagaaagacaaggataagaaaaagtaagcaggtgtcacccccctgtatcggggacctctaacaatttattcctcttgcatgtctctacttttcccatttacagactggaaactggtcctttaccagaaagataaaagcaagtattttctctacagtgcagggaagatgatgaaggtttttaaatttttttaaaaggtacacaaagattaatttataaaactttaccacaattgaccaagcaatcaggcctggaggaacctgttgtctccagtagcatcttccacaccaacactaggagtctcaaagaagacaggttgatgtctcttcagcaccctctgaagacaattctcatgactcttgatagagagcatcctaaaatcacaattgttaaaattattttcctattctgtgttgtaagacttcgtaagccagtcactgaaattctcgttcccaaaatgaaacatttggaagagctgctagtggccactagtttcctcaaaattcaatatgatgaattgttttattgtgaaatgggatccaaatgcctatccagttgacacctctgccaacctcaagccaaacctaaacccattcataaaaggttttttttaaatagggtcttaatgtcatgtgccaaagggtcagattctgctcttgagttggtcacttcctgtgatactccagtagcagctgcctgaaaccagtgggagatttaggcctcccttgacattctcctgtgatttgaagctctcctttgaatcatcataaagcctagttttatgtcaatgctatcggttttgacaggaagcacgatggtaagaataccactaacgaaaacctttgtggtgtctcaatgacaaatatgcagatgccaccctcctttgtctaatgtacggtgctttagggcagctatttaatataaagcaactcagaacttgtttcaggaagtgttgctctttcgccttacatgccaaggttctagggaaaaagctgaccatatgtaaaaacattgatgctcaagcacataaagaattacattctttaaacatagagtacataggatcaagtctctgcacaataattgagatgtgttatagggaaaagtgagcacagtgctattgtccacttagtcttggtgaatgtgcagtaggctcacccctaaggaatctcatgttgcctgcagtaaaaataaaaatggactgctacaatgacatactgagagagttttaaatcatgctttacaaactgacttacagcttaggaaatgcaaagtcaagtttttcttttcaccctgaggcactcagtgcataaaggttcaagttttaaaactaagaatgtttccaaaagaccagcaatgttaaaagagtatttcgtgtatactagacgtgcctttaagcaataaaaattccaagagctga

SEQ ID NO: 459549 - DNA, 1272 bp, Homo sapiens
aggcaaggggaagctgcgcaggcgcagtgtgagcggcaacatggcgtccaggtctaagcggcgtgccgtggaaagtggggttccgcagccgccggatcccccagtccagcgcgacgaggaagaggaaaaagaagtcgaaaatgaggatgaagacgatgatgacagtgacaaggaaaaggatgaagaggacgaggtcattgacgaggaagtgaatattgaatttgaagcttattccctatcagataatgattatgacggaattaagaaattactgcagcagctttttctaaaggctcctgtgaacactgcagaactaacagatctcttaattcaacagaaccatattgggagtgtgattaagcaaacggatgtttcagaagacagcaatgatgatatggatgaagatgaggtttttggtttcataagccttttaaatttaactgaaagaaagggtacccagtgtgttgaacaaattcaagagttggttctacgcttctgtgagaagaactgtgaaaagagcatggttgaacagctggacaagtttttaaatgacaccaccaagcctgtgggccttctcctaagtgaaagattcattaatgtccctccacagatcgctctgcccatgtaccagcagcttcagaaagaactggcgggggcacacagaaccaataagccatgtgggaagtgctacttttaccttctgattagtaagacatttgtggaagcaggaaaaaacaattccaaaaagaaacctagcaacaaaaagaaagctgcgttaatgtttgcaaatgcagaggaagaatttttctatgagaaggcaattctcaagttcaactactcagtgcaggaggagagcgacacttgtctgggaggcaaatggtcttttgatgacgtaccaatgacgcccttgcgaactgtgatgttaattccaggcgacaagatgaacgaaatcatggataaactgaaagaatatctatctgtctaacccatttccaatggacagtgatgggcttgtttttgtaaaattaccagaaaactcagtggagatttactgaaaaactcagactttattcagattaagttcctctacaaaaagtagggttctgtcccatgtgtctctgacacatttacaaaataccagttttttaaaattttggtcaaattatgagtggttgatttaaaaacttttccaagaagaagaaaagcatggagtagtaatttaaagaactcaataaaaacttctattttttattttaaaataataaaaaaaat

SEQ ID NO: 459550 - DNA, 1287 bp, Homo sapiens
aggcaaggggaagctgcgcaggcgcagtgtgagcggcaacatggcgtccaggtctaagcggcgtgccgtggaaagtggggttccgcagccgccggatcccccagtccagcgcgacgaggaagaggaaaaagaagtcgaaaatgaggatgaagacgatgatgacagtgacaaggaaaaggatgaagaggacgaggtcattgacgaggaagtgaatattgaatttgaagcttattccctatcagataatgattatgacggaattaagaaattactgcagcagctttttctaaaggctcctgtgaacactgcagaactaacagatctcttaattcaacagaaccatattgggagtgtgattaagcaaacggatgtttcagaagacagcaatgatgatatggatgaagatgaggtttttggtttcataagccttttaaatttaactgaaagaaagggtacccagtgtgttgaacaaattcaagagttggttctacgcttctgtgagaagaactgtgaaaagagcatggttgaacagctggacaagtttttaaatgacaccaccaagcctgtgggccttctcctaagtgaaagattcattaatgtccctccacagatcgctctgcccatgtaccagcagcttcagaaagaactggcgggggcacacagaaccaataagccatgtgggaagtgctacttttaccttctgattagtaagacatttgtggaagcaggaaaaaacaattccaaaaagaaacctagcaacaaaaagaaagctgcgttaatgtttgcaaatgcagaggaagaatttttctatgaggagcagggaaaacctgaggtgcttggaggtccagacacaagaagaggattggaaccagttccgatacagcacaatggtggttcacgggggcaagtgacagccctggtttctctgaaggctggactaattcaatcaagatcaactctaagtgatttccagggaaccttcatgactgttggaattgctctgtcataataagtcagggatatttaggaggctcatagtctcctggagggataaaacatctcggcacctagtaatggtaaattagtcaatatttgttagtttcgtttgagatctcaaatgttaggattttctgaagtctcagtgtctttcagagtttgagataccttgttttcattttttctaatttttaatttaaaagtaataaagaatattttgtaatgattaggatgaaaattttatcgtcaattataagccaaaatttgctaaaattaaagtcagtatacttg

SEQ ID NO: 459551 - DNA, 670 bp, Homo sapiens
  misc_feature (162)..(162): n is a, c, g, or t
  misc_feature (603)..(603): n is a, c, g, or t
  misc_feature (637)..(637): n is a, c, g, or t
  misc_feature (669)..(669): n is a, c, g, or t
ttgtaggcttaatataaaataaccacgttagtgaacattatatctcttagaagaaaggccatattttgctcctgcttctgtaaaaatattatttgtttgaaggggaaataatggtagtgtgacctttcacttaattcctactcccttaatgtgagagagacnaaatgagctgaagaaggaaaattctggagttacactccacaaccttgaacatactgacggacatctctgttttgacaacaatttctcatcctaggatgaggaattgacgaggaagtgaatattgaatttgaagcttattccctatcagataatgattatgacggaattaagaaattactgcagcagctttttctaaaggctcctgtgaacactgcagaactaacagatctcttaattcaacagaaccatattgggagtgtgattaagcaaacggatgtttcagaagacagcaatgatgatatggatgaagatgaggtttttggtttcataagccttttaaatttaactgaaagaaagggtacccagtgtgttgaacaaattcaagagttggttctacgcttctgtggagggacattaatgaatctttcacttaggagaagnccacaggcttggtggtgtcatttaaaaacttgtncagctgttcaaccatgctcttttcacgtcganc

SEQ ID NO: 459552 - DNA, 1466 bp, Homo sapiens
aggcaaggggaagctgcgcaggcgcagtgtgagcggcaacatggcgtccaggtctaagcggcgtgccgtggaaagtggggttccgcagccgccggatcccccagtccagcgcgacgaggaagaggaaaaagaagtcgaaaatgaggatgaagacgatgatgacagtgacaaggaaaaggatgaagaggacgaggtcattgacgaggaagtgaatattgaatttgaagcttattccctatcagataatgattatgacggaattaagaaattactgcagcagctttttctaaaggctcctgtgaacactgcagaactaacagatctcttaattcaacagaaccatattgggagtgtgattaagcaaacggatgtttcagaagacagcaatgatgatatggatgaagatgaggtttttggtttcataagccttttaaatttaactgaaagaaagggtacccagtgtgttgaacaaattcaagagttggttctacgcttctgtgagaagaactgtgaaaagagcatggttgaacagctggacaagtttttaaatgacaccaccaagcctgtgggccttctcctaagtgaaagattcattaatgtccctccacagatcgctctgcccatgtaccagcagcttcagaaagaactggcgggggcacacagaaccaataagccatgtgggaagtgctacttttaccttctgattagtaagacatttgtggaagcaggaaaaaacaattccaaaaagaaacctagcaacaaaaagaaagctgcgttaatgtttgcaaatgcagaggaagaatttttctatgaggagcagggaaaacctgaggtgcttggaggtccagacacaagaagaggattggaaccagttccgatacagcacaatggtggttcacgggggcaagtgacagccctggtttctctgaaggctggactaattcaatcaagatcaactctaagtgatttccagggaaccttcatgactgttggaattgctctgtcataataagtcagggatatttaggaggctcatagtctcctggagggataaaacatctcggcacctagtaatggtaaattagtcaatatttgttagtttcgtttgagatctcaaatgttaggattttctgaagtctcagtgtctttcagagtttgagataccttgttttcattttttctaatttttaatttaaaagtaataaagaatattttgtaatgattaggatgaaaattttatcgtcaattataagccaaaatttgctaaaattaaagtcagtatacttgaaacaagtttctagtaagttctctggggtaagatactaattactctgataaaggggctatcaaaaaaatccagtaaattgttcataagaagagatcagtttaagagtcaaacaatttgctttgctagtaccttagctaaagaaaaaatactattaaagatgactatcacctttaaaaac

SEQ ID NO: 459553 - DNA, 1276 bp, Homo sapiens
aggcaaggggaagctgcgcaggcgcagtgtgagcggcaacatggcgtccaggtctaagcggcgtgccgtggaaagtggggttccgcagccgccggatcccccagtccagcgcgacgaggaagaggaaaaagaagtcgaaaatgaggatgaagacgatgatgacagtgacaaggaaaaggatgaagaggacgaggtcattgacgaggaagtgaatattgaatttgaagcttattccctatcagataatgattatgacggaattaagaaattactgcagcagctttttctaaaggctcctgtgaacactgcagaactaacagatctcttaattcaacagaaccatattgggagtgtgattaagcaaacggatgtttcagaagacagcaatgatgatatggatgaagatgaggtttttggtttcataagccttttaaatttaactgaaagaaagggtacccagtgtgttgaacaaattcaagagttggttctacgcttctgtgagaagaactgtgaaaagagcatggttgaacagctggacaagtttttaaatgacaccaccaagcctgtgggccttctcctaagtgaaagattcattaatgtccctccacagatcgctctgcccatgtaccagcagcttcagaaagaactggcgggggcacacagaaccaataagccatgtgggaagtgctacttttaccttctgattagtaagacatttgtggaagcaggaaaaaacaattccaaaaagaaacctagcaacaaaaagaaagctgcgttaatgtttgcaaatgcagaggaagaatttttctatgaggagcagggaaaacctgaggtgcttggaggtccagacacaagaagaggattggaaccagttccgatacagcacaatggttggtctgttcccccagtattagaataaattaaaacatacaagccaggatgaatgaagccaataggaaataaaaaacaggcacacaacattatttggggaaaaacacctctagtgacacattttcttcatctgcactgattatttcagcaaaagaaatctagtatgttttcatacatctgatgtataaatttgctgaactttgagttagttttcttaagataatttttcatattaagaaaattttccttttctaacctattaaaatacctcactatcatttcaaaaggttaaatgagttgatcactatctctgctctgtgctcctcaaaatataatttcaaatggatccgatctaaatctatacctagtgcagatttgcaaaaaa

SEQ ID NO: 459554 - DNA, 1390 bp, Homo sapiens
aggcaaggggaagctgcgcaggcgcagtgtgagcggcaacatggcgtccaggtctaagcggcgtgccgtggaaagtggggttccgcagccgccggatcccccagtccagcgcgacgaggaagaggaaaaagaagtcgaaaatgaggatgaagacgatgatgacagtgacaaggaaaaggatgaagaggacgaggtcattgacgaggaagtgaatattgaatttgaagcttattccctatcagataatgattatgacggaattaagaaattactgcagcagctttttctaaaggctcctgtgaacactgcagaactaacagatctcttaattcaacagaaccatattgggagtgtgattaagcaaacggatgtttcagaagacagcaatgatgatatggatgaagatgaggtttttggtttcataagccttttaaatttaactgaaagaaagggtacccagtgtgttgaacaaattcaagagttggttctacgcttctgtgagaagaactgtgaaaagagcatggttgaacagctggacaagtttttaaatgacaccaccaagcctgtgggccttctcctaagtgaaagattcattaatgtccctccacagatcgctctgcccatgtaccagcagcttcagaaagaactggcgggggcacacagaaccaataagccatgtgggaagtgctacttttaccttctgattagtaagacatttgtggaagcaggaaaaaacaattccaaaaagaaacctagcaacaaaaagaaagctgcgttaatgtttgcaaatgcagaggaagaatttttctatgaggtggttcacgggggcaagtgacagccctggtttctctgaaggctggactaattcaatcaagatcaactctaagtgatttccagggaaccttcatgactgttggaattgctctgtcataataagtcagggatatttaggaggctcatagtctcctggagggataaaacatctcggcacctagtaatggtaaattagtcaatatttgttagtttcgtttgagatctcaaatgttaggattttctgaagtctcagtgtctttcagagtttgagataccttgttttcattttttctaatttttaatttaaaagtaataaagaatattttgtaatgattaggatgaaaattttatcgtcaattataagccaaaatttgctaaaattaaagtcagtatacttgaaacaagtttctagtaagttctctggggtaagatactaattactctgataaaggggctatcaaaaaaatccagtaaattgttcataagaagagatcagtttaagagtcaaacaatttgctttgctagtaccttagctaaagaaaaaatactattaaagatgactatcacctttaaaaac

SEQ ID NO: 459555 - DNA, 1340 bp, Homo sapiens
  misc_feature (162)..(162): n is a, c, g, or t
ttgtaggcttaatataaaataaccacgttagtgaacattatatctcttagaagaaaggccatattttgctcctgcttctgtaaaaatattatttgtttgaaggggaaataatggtagtgtgacctttcacttaattcctactcccttaatgtgagagagacnaaatgagctgaagaaggaaaattctggagttacactccacaaccttgaacatactgacggacatctctgttttgacaacaatttctcatcctaggatgaggaattgacgaggaagtgaatattgaatttgaagcttattccctatcagataatgattatgacggaattaagaaattactgcagcagctttttctaaaggctcctgtgaacactgcagaactaacagatctcttaattcaacagaaccatattgggagtgtgattaagcaaacggatgtttcagaagacagcaatgatgatatggatgaagatgaggtttttggtttcataagccttttaaatttaactgaaagaaagggtacccagtgtgttgaacaaattcaagagttggttctacgcttctgtgagaagaactgtgaaaagagcatggttgaacagctggacaagtttttaaatgacaccaccaagcctgtgggccttctcctaagtgaaagattcattaatgtccctccacagatcgctctgcccatgtaccagcagcttcagaaagaactggcgggggcacacagaaccaataagccatgtgggaagtgctacttttaccttctgattagtaagacatttgtggaagcaggaaaaaacaattccaaaaagaaacctagcaacaaaaagaaagctgcgttaatgtttgcaaatgcagaggaagaatttttctatgagaaggcaattctcaagttcaactactcagtgcaggaggagagcgacacttgtctgggaggcaaatggtcttttgatgacgtaccaatgacgcccttgcgaactgtgatgttaattccaggcgacaagatgaacgaaatcatggataaactgaaagaatatctatctgtctaacccatttccaatggacagtgatgggcttgtttttgtaaaattaccagaaaactcagtggagatttactgaaaaactcagactttattcagattaagttcctctacaaaaagtagggttctgtcccatgtgtctctgacacatttacaaaataccagttttttaaaattttggtcaaattatgagtggttgatttaaaaacttttccaagaagaagaaaagcatggagtagtaatttaaagaactcaataaaaacttctattttttattttaaaataataaaaaaaat

SEQ ID NO: 459556 - DNA, 1218 bp, Homo sapiens
aggcaaggggaagctgcgcaggcgcagtgtgagcggcaacatggcgtccaggtctaagcggcgtgccgtggaaagtggggttccgcagccgccggatcccccagtccagcgcgacgaggaagaggaaaaagaagtcgaaaatgaggatgaagacgatgatgacagtgacaaggcttattccctatcagataatgattatgacggaattaagaaattactgcagcagctttttctaaaggctcctgtgaacactgcagaactaacagatctcttaattcaacagaaccatattgggagtgtgattaagcaaacggatgtttcagaagacagcaatgatgatatggatgaagatgaggtttttggtttcataagccttttaaatttaactgaaagaaagggtacccagtgtgttgaacaaattcaagagttggttctacgcttctgtgagaagaactgtgaaaagagcatggttgaacagctggacaagtttttaaatgacaccaccaagcctgtgggccttctcctaagtgaaagattcattaatgtccctccacagatcgctctgcccatgtaccagcagcttcagaaagaactggcgggggcacacagaaccaataagccatgtgggaagtgctacttttaccttctgattagtaagacatttgtggaagcaggaaaaaacaattccaaaaagaaacctagcaacaaaaagaaagctgcgttaatgtttgcaaatgcagaggaagaatttttctatgagaaggcaattctcaagttcaactactcagtgcaggaggagagcgacacttgtctgggaggcaaatggtcttttgatgacgtaccaatgacgcccttgcgaactgtgatgttaattccaggcgacaagatgaacgaaatcatggataaactgaaagaatatctatctgtctaacccatttccaatggacagtgatgggcttgtttttgtaaaattaccagaaaactcagtggagatttactgaaaaactcagactttattcagattaagttcctctacaaaaagtagggttctgtcccatgtgtctctgacacatttacaaaataccagttttttaaaattttggtcaaattatgagtggttgatttaaaaacttttccaagaagaagaaaagcatggagtagtaatttaaagaactcaataaaaacttctattttttattttaaaataataaaaaaaat

SEQ ID NO: 459557 - DNA, 1165 bp, Homo sapiens
catggcaggtcgaggccgggggttaatcggacgagggaacatattgggagtgtgattaagcaaacggatgtttcagaagacagcaatgatgatatggatgaagatgaggtttttggtttcataagccttttaaatttaactgaaagaaagggtacccagtgtgttgaacaaattcaagagttggttctacgcttctgtgagaagaactgtgaaaagagcatggttgaacagctggacaagtttttaaatgacaccaccaagcctgtgggccttctcctaagtgaaagattcattaatgtccctccacagatcgctctgcccatgtaccagcagcttcagaaagaactggcgggggcacacagaaccaataagccatgtgggaagtgctacttttaccttctgattagtaagacatttgtggaagcaggaaaaaacaattccaaaaagaaacctagcaacaaaaagaaagctgcgttaatgtttgcaaatgcagaggaagaatttttctatgaggagcagggaaaacctgaggtgcttggaggtccagacacaagaagaggattggaaccagttccgatacagcacaatggtggttcacgggggcaagtgacagccctggtttctctgaaggctggactaattcaatcaagatcaactctaagtgatttccagggaaccttcatgactgttggaattgctctgtcataataagtcagggatatttaggaggctcatagtctcctggagggataaaacatctcggcacctagtaatggtaaattagtcaatatttgttagtttcgtttgagatctcaaatgttaggattttctgaagtctcagtgtctttcagagtttgagataccttgttttcattttttctaatttttaatttaaaagtaataaagaatattttgtaatgattaggatgaaaattttatcgtcaattataagccaaaatttgctaaaattaaagtcagtatacttgaaacaagtttctagtaagttctctggggtaagatactaattactctgataaaggggctatcaaaaaaatccagtaaattgttcataagaagagatcagtttaagagtcaaacaatttgctttgctagtaccttagctaaagaaaaaatactattaaagatgactatcacctttaaaaac

SEQ ID NO: 459558 - DNA, 1215 bp, Homo sapiens
aggcaaggggaagctgcgcaggcgcagtgtgagcggcaacatggcgtccaggtctaagcggcgtgccgtggaaagtggggttccgcagccgccggatcccccagtccagcgcgacgaggaagaggaaaaagaagtcgaaaatgaggatgaagacgatgatgacagtgacaaggaaaaggatgaagaggacgaggtcattgacgaggaagtgaatattgaatttgaagcttattccctatcagataatgattatgacggaattaagaaattactgcagcagctttttctaaaggctcctgtgaacactgcagaactaacagatctcttaattcaacagaaccatattgggagtgtgattaagcaaacggatgtttcagaagacagcaatgatgatatggatgaagatgaggtttttggtttcataagccttttaaatttaactgaaagaaagggtacccagtgtgttgaacaaattcaagagttggttctacgcttctgtgagaagaactgtgaaaagagcatggttgaacagctggacaagtttttaaatgacaccaccaagcctgtgggccttctcctaagtgaaagattcattaatgtccctccacagatcgctctgcccatgtaccagcagcttcagtggttcacgggggcaagtgacagccctggtttctctgaaggctggactaattcaatcaagatcaactctaagtgatttccagggaaccttcatgactgttggaattgctctgtcataataagtcagggatatttaggaggctcatagtctcctggagggataaaacatctcggcacctagtaatggtaaattagtcaatatttgttagtttcgtttgagatctcaaatgttaggattttctgaagtctcagtgtctttcagagtttgagataccttgttttcattttttctaatttttaatttaaaagtaataaagaatattttgtaatgattaggatgaaaattttatcgtcaattataagccaaaatttgctaaaattaaagtcagtatacttgaaacaagtttctagtaagttctctggggtaagatactaattactctgataaaggggctatcaaaaaaatccagtaaattgttcataagaagagatcagtttaagagtcaaacaatttgctttgctagtaccttagctaaagaaaaaatactattaaagatgactatcacctttaaaaac

SEQ ID NO: 459559 - DNA, 1036 bp, Homo sapiens
aggcaaggggaagctgcgcaggcgcagtgtgagcggcaacatggcgtccaggtctaagcggcgtgccgtggaaagtggggttccgcagccgccggatcccccagtccagcgcgacgaggaagaggaaaaagaagtcgaaaatgaggatgaagacgatgatgacagtgacaaggaaaaggatgaagaggacgaggtcattgacgaggaagtgaatattgaatttgaagcttattccctatcagataatgattatgacggaattaagaaattactgcagcagctttttctaaaggctcctgtgaacactgcagaactaacagatctcttaattcaacagaaccatattgggagtgtgattaagcaaacggatgtttcagaagacagcaatgatgatatggatgaagatgaggtttttggtttcataagccttttaaatttaactgaaagaaagggtacccagtgtgttgaacaaattcaagagttggttctacgcttctgtgagaagaactgtgaaaagagcatggttgaacagctggacaagtttttaaatgacaccaccaagcctgtgggccttctcctaagtgaaagattcattaatgtccctccacagatcgctctgcccatgtaccagcagcttcagtggttcacgggggcaagtgacagccctggtttctctgaaggctggactaattcaatcaagatcaactctaagtgatttccagggaaccttcatgactgttggaattgctctgtcataataagtcagggatatttaggaggctcatagtctcctggagggataaaacatctcggcacctagtaatggtaaattagtcaatatttgttagtttcgtttgagatctcaaatgttaggattttctgaagtctcagtgtctttcagagtttgagataccttgttttcattttttctaatttttaatttaaaagtaataaagaatattttgtaatgattaggatgaaaattttatcgtcaattataagccaaaatttgctaaaattaaagtcagtatacttg

SEQ ID NO: 459560 - DNA, 756 bp, Homo sapiens
tgtttcacaagattattttgacaattaaatgaaaataccacttagctgcttgttcacctcttagaaattgcacacctctatccctgttcctcatgtgggtttaaaatctacttggtttgtgttttataacttctgcctgaatgtcccatttgaactttttcaattctgagttttgcttttttttagctctcattcttatttaagcatatgccaaacgtaatattctttgccgtagatcaaatgggttttgtctttgggttgtcccgatttttaattcatggttacttatttggtttagaaggcaattctcaagttcaactactcagtgcaggaggagagcgacacttgtctgggaggcaaatggtcttttgatgacgtaccaatgacgcccttgcgaactgtgatgttaattccaggcgacaagatgaacgaaatcatggataaactgaaagaatatctatctgtctaacccatttccaatggacagtgatgggcttgtttttgtaaaattaccagaaaactcagtggagatttactgaaaaactcagactttattcagattaagttcctctacaaaaagtagggttctgtcccatgtgtctctgacacatttacaaaataccagttttttaaaattttggtcaaattatgagtggttgatttaaaaacttttccaagaagaagaaaagcatggagtagtaatttaaagaactcaataaaaacttctattttttattttaaaataataaaaaaaat

SEQ ID NO: 459561 - DNA, 755 bp, Homo sapiens
aggcaaggggaagctgcgcaggcgcagtgtgagcggcaacatggcgtccaggtctaagcggcgtgccgtggaaagtggggttccgcagccgccggatcccccagtccagcgcgacgaggaagaggaaaaagaagtcgaaaatgaggatgaagacgatgatgacagtgacaaggaaaaggatgaagaggacgaggtcattgacgaggaagtgaatattgaatttgaagcttattccctatcagataatgattatgacggaattaagaaattactgcagcagctttttctaaaggctcctgtgaacactgcagaactaacagatctcttaattcaacagaaccatattgggagtgtgattaagggtacccagtgtgttgaacaaattcaagagttggttctacgcttctgtgagaagaactgtgaaaagagcatggttgaacagctggacaagtttttaaatgacaccaccaagcctgtgggccttctcctaagtgaaagattcattaatgtccctccacagatcgctctgcccatgtaccagcagcttcagtaagagattctgggaaaatatctttgaacagtaatttttttttcaaatagattcctaaatgtcatttaagtagaatatgtagatatagaaagagttctgtccttggtttaagtgggtttagtgtgaggggagtggaagaaacatcctgtgaagtacatacattattaacaactggctttttgaagagtttgtgacaataatcatg

SEQ ID NO: 459562 - DNA, 695 bp, Homo sapiens
aggcaaggggaagctgcgcaggcgcagtgtgagcggcaacatggcgtccaggtctaagcggcgtgccgtggaaagtggggttccgcagccgccggatcccccagtccagcgcgacgaggaagaggaaaaagaagtcgaaaatgaggatgaagacgatgatgacagtgacaaggaaaaggatgaagaggacgaggtcattgacgaggaagtgaatattgaatttgaagcttattccctatcagataatgattatgacggaattaagaaattactgcagcagctttttctaaaggctcctgtgaacactgcagaactaacagatctcttaattcaacagaaccatattgggagtgtgattaaggtaagtaggataattgtgtttattctgattaaatgagttctttattctgttcatgctgggcctcaccatgcttgtaatcccagcactttgggaagcaaaggtgggaggattgcttgaggccaggagttcaagaccatcctgggcaatatagcaatactctgtctctacaaaaaataacaaaaaattagccgggcatagtagcacatgcctgtagtctttttacccaggtggctgaggtaggaggatctcttgagccaagaagttgaaggccatggtgagctttgtgccgctgcactctagccgggcaacacagcaagaccctatatctgaaaaa

SEQ ID NO: 459563 - DNA, 391 bp, Homo sapiens
gcttattccctatcagataatgattatgacggaattaagaaattactgcagcaggtattgtcttttatttattatgcataaatttcctcttctaagaaaaatcaggggccgggtgcagtggttcatgcctataatctcagcattttggaaggccgaggtgagaggattgcttgagcccaggagtttgagaccagcctgggcaacataatgagaacctgtctctacaaaaaaattaaaaattagccaactgtggtagcacacaccgttagtcctaactcctcaggaggctgaggctggaggattacttgagtctaagagctcaaggctgcagctatgaatgtgccattgagctccagtctgggcaacagagtgagcctctgtctctaaaaaa

SEQ ID NO: 459564 - DNA, 5574 bp, Homo sapiens
  misc_feature (3407)..(3407): n is a, c, g, or t
gcaggcctttcaggtctctctggaggacctgacagggcatgaaggcaacgagaagggggctgggccggagcccccaggctcagaggaggaggaggaggagcaggaggagagcctggcggtggcggagcagggaaaggggcgcagggagtctgaaagctccaggagcagcagaaggcccagtggccggtctccaaccagtactgagaagcgcatgagcttcgagtccatttcttccctgccagaggttgagccggaccctgaggctgggagtgagcaagaggtattttctgctgtggaagggcccagtgccgaggagacgccttcagacacagaatctccagaagtcctggagacacagcttgatgcccaccagggccttctggggatggaccccccaggtgacatggtggacttcgtggcagctgagagcactgaggaccttaaggccctgagcagcgaggaggaagaagaaatgggaggtgccgcccaggagcctgagagccttctgccaccctctgtgctggaccaggccagcgtcattgcggagcgatttgtcagcagcttctctcggcggagcagcgtggcacaggaggacagcaagtccagtggctttgggagcccgcggctggtcagccggagcagcagcgtgctcagcctggagggcagcgagaagggcctggcccggcatggcagtgccacagactccctcagctgtcagctctccccagaagtggacatcagtgtgggggtggccacagaggacagcccttctgtcaatgggatggagcccccaagcccaggctgcccagtggagcctgaccggtcttcctgcaagaagaaggaatcagcactctccacccgagaccggctgttgctagacaagattaagagctattatgaaaatgcagaacaccatgatgcaggcttcagcgtccgtcgccgggagagcctctcctacatccccaaaggactggtaagaaactccatctccaggttcaacagccttccccggccagacccagagccagtacctccagtggggagcaagagacaggtgggctcccggccgacttcgtgggccctgtttgagctcccaggaccaagccaggcagtcaaaggggacccacctcccatctcagatgctgagttccgcccatcttcagaaattgtgaagatctgggagggaatggagtcttccggagggagccctgggaaggggccaggccagggccaggccaatggctttgacctgcatgagccactcttcatcctggaggagcatgagctgggagccatcacagaggagtcggccactgcctccccggaaagctcctctcccactgaggggcgcagcccggcccacctggcccgggagctgaaagagctggtgaaggagctgagcagcagtacccagggggagctggtggccccactgcacccccgcatcgtgcagctctcccacgtaatggacagccacgtgagcgagcgcgtcaagaacaaggtctaccagctggcccgccagtacagcctccggatcaagagcaacaagccagtgatggccaggccaccactgcagtgggaaaaggtggcccctgagagggatgggaagagccccactgtgccctgtctacaggaagaggctggagagccattaggtggcaaaggtaagaggaagccggtgctgtctctatttgactatgagcagctgatggcccaggagcacagccctcccaagccctcctcggctggggagatgtcaccacagcgtttcttcttcaacccgtctgctgtcagccagaggaccacctcgcctgggggccggccctccgcccggagccccctcagccccacagagaccttcagctggcccgacgtccgtgagctctgctccaagtatgcctcccgcgatgaggcacgccgagcagggggcggccggccccgcggcccacccgtcaacaggagccactcggtgccggagaacatggtagagccacctctgtcgggcagggtgggccgctgccgcagcctgagcaccaagaggggccggggaggcggagaggctgcccaatcccctgggcctctgccccagagcaagccggatggaggcgagaccctgtatgtcactgcagacctcaccctggaggacaaccggcgggtgattgtcatggagaagggaccccttcccagccccactgcagggctggaggagagcagtggccagggaccaagctcaccggtggccctgctggggcaggttcaggacttccagcagtctgcagagtgccagccgaaggaagagggttccagggacccggcagacccgagccagcagggcagagtgagaaaccttagagagaagttccaggccttgaactctgtcggttgatgctgactcctgggggagggaggagtcatgttggaggttggggaagaacctgggcatccttcccctcaagcctgggctcatggagcccctgcccagggccctcaggtgggcggaaagtccatcccctccgcccttcaggaaggatgctcccgtgtgcaggggtctcctgcctgtgccatccactggggctcgagacaatttcccactcacctgtgaggccggtgtggctgcttcccttgtaaatagttgttctctggtaagaagccaaatatttaagctcacttcttcccagagagaggaagctctgctcaggcctccagcgttggctggccatggccacagccagatggaggagcccatccccaggagactcaggcagtggcctggagaggctttgttctgtaacggtgccttttcttagggtccaggcaggaatgaagccaataatttattgctttccattctgtggtatgatgtgcgtgtgcgtgagtgtgtggcccctgtttattcccctcctgtcaagaatgaagtggattcagttcaggtacttttgagggttgttgtgctgaccctgtggttgtcgctgatgtacacacatttcattatttgccaatggtgcaataaccactgctgaccaacccactatgtgtgaactccttcctaggcttggctggggtagggaaggttattcatgggccagggatgtcttagggagatggagacatggaggttgttccttccacactcaattgtcacttgggcttatgaaacataaggcacccgggtactggtgggggaggtggggcaggaggatgtgagggcgggctttttctttctgctgcctagactcccatgggcttctctgtctagcagcagcctgctgtcctgtctagggtagggggtcccgcatgccagccttttgctcttttccccaagggccagagttggaccaagaaaaagggaggtggtgaggtggatagactgtttttctcataagcagatgctcccagtatctggtgcnttttgcgtttctctccggtccccaggaaacatcctagaagacaaggatttttttttttttttttttgagacagagtcttattctgtcacccaggctggagtgcaatggcgtgatcttggcttactgcaacctccgcctcccaggttcaagcaattctcgttgtctcagcctcccaggtcgctgggactacaggcatgagccaccacacccagctaattttttgtatttttagtagagacggggtttcgccgtgttgaccaggctggtctcgaacttctgacctcaggtgatccacccacctcggcctcccaaagtgctgggattacaggggtgagccactgcatgcggctgaaggtaaggattctaaactcggagactagaaatgtcctaaaggtgtctgcaacattggatgaggagtacaagtgcatttttctgggatgattcctccctttttatcacattctcagaagtatctttgattcagaagagttaggaatgcctccctatttcagttgggttttctgccctttctccacagaggtccagactcattttgcttaattttttttctagctggggcctgggaggtagaggcttcagggcctgggtggtagagctgcctgacaagtgttcagcagggctgctgggtcagggccctgtgggccttctgacccaacctgaagatgggtctgctaagtctaacaaggtcaagggaagatcagagggacccagattcttttttatcccccacttgaaacggagtcttgctctgtcgcccaggctggagcgcagtggtgcaatcttggctcactgcaacctccgcctccctgaccctcacactgtccagtgcccttgtggttactcagcatcatatcttgagactggcctggcaggagccagtgactgtggaatgaccacagaagattcagggcagctgccagaccaggggctatctctgccctgcgctgcttctgctcaagagaggttgtcactagcctctgatcttcccttgaagaacccgactggggctcttcagagggtggggcccaggaagttgtagttaaccccttccccaggcagtccttacacggccatctaggtatgcctgggaaccttgcaccaggtcggtggttctcactggctgcccattggaattatctggggagccttctggaaacgcagtgcttacattccatctccctagaccaacagaaactgccctctggaggtgaatcccaggcttagagattctgatgattctgcggtccagtgagtgctgagatctgtcctgagctctgtggggaggggcctggactgatcactgcttggaaatgattttgccctacagtaggccttcaagttgatcaaatgcatgaatgagcaagcttttcttggagtttgtgatgaagcccaggaaccgggtgcttgcagtcgtcccataaggctcccagggacaagctagagaatctggctgtccctctgtctccatggtgccagccctcttaggctcagttcaaagggagaggaggctagttaaataagaaactgagagaaacatggagcattattgatttattagaaaaactagtaaatgggtttcctctggttggtggaagcacggttgagcaggtggaggacaggacccagctggccccagggccagccccagattgcatggtctgtgcccaacagggttgcattcctctgcagccgccgcctcctcatttcctccctgagcttgtttgtccaagccaccaagccatgtggtcccgctggcttcatcctcctctggattcctgcccccctcccatgaagggaggaagaggattcagggtcagcctaggggaccctggctccctccgataggcaggaaggaggagggatgcggaggagaggctgagccttccacgggcctcctgttaggggtgttggtggaggccaggttggggagggaagcctaaggaccctccacacctcccacagccagagtcagttgaggctgggacaaaggggaaggagagagggaaggaggaccgcctgaccttgcccagaaggagcttcctctaaactgccctgggaaggaagcctggtatgctggtgtggactggagctgtgtcaacctcgtttgggaatactgtcaaaagactgtagagtagaataaggagag

SEQ ID NO: 459565 - DNA, 4750 bp, Homo sapiens
  misc_feature (2877)..(2877): n is a, c, g, or t
gcaggcctttcaggtctctctggaggacctgacagggcatgaaggcaacgagaagggggctgggccggagcccccaggctcagaggaggaggaggaggagcaggaggagagcctggcggtggcggagcagggaaaggggcgcagggagtctgaaagctccaggagcagcagaaggcccagtggccggtctccaaccagtactgagaagcgcatgagcttcgagtccatttcttccctgccagaggttgagccggaccctgaggctgggagtgagcaagaggtattttctgctgtggaagggcccagtgccgaggagacgccttcagacacagaatctccagaagtcctggagacacagcttgatgcccaccagggccttctggggatggaccccccaggtgacatggtggacttcgtggcagctgagagcactgaggaccttaaggccctgagcagcgaggaggaagaagaaatgggaggtgccgcccaggagcctgagagccttctgccaccctctgtgctggaccaggccagcgtcattgcggagcgatttgtcagcagcttctctcggcggagcagcgtggcacaggaggacagcaagtccagtggctttgggagcccgcggctggtcagccggagcagcagcgtgctcagcctggagggcagcgagaagggcctggcccggcatggcagtgccacagactccctcagctgtcagctctccccagaagtggacatcagtgtgggggtggccacagaggacagcccttctgtcaatgggatggagcccccaagcccaggctgcccagtggagcctgaccggtcttcctgcaagaagaaggaatcagcactctccacccgagaccggctgttgctagacaagattaagactggtggccccactgcacccccgcatcgtgcagctctcccacgtaatggacagccacgtgagcgagcgcgtcaagaacaaggtctaccagctggcccgccagtacagcctccggatcaagagcaacaagccagtgatggccaggccaccactgcagtgggaaaaggtggcccctgagagggatgggaagagccccactgtgccctgtctacaggaagaggctggagagccattaggtggcaaaggtaagaggaagccggtgctgtctctatttgactatgagcagctgatggcccaggagcacagccctcccaagccctcctcggctggggagatgtcaccacagcgtttcttcttcaacccgtctgctgtcagccagaggaccacctcgcctgggggccggccctccgcccggagccccctcagccccacagagaccttcagctggcccgacgtccgtgagctctgctccaagtatgcctcccgcgatgaggcacgccgagcagggggcggccggccccgcggcccacccgtcaacaggagccactcggtgccggagaacatggtagagccacctctgtcgggcagggtgggccgctgccgcagcctgagcaccaagaggggccggggaggcggagaggctgcccaatcccctgggcctctgccccagagcaagccggatggaggcgagaccctgtatgtcactgcagacctcaccctggaggacaaccggcgggtgattgtcatggagaagggaccccttcccagccccactgcagggctggaggagagcagtggccagggaccaagctcaccggtggccctgctggggcaggttcaggacttccagcagtctgcagagtgccagccgaaggaagagggttccagggacccggcagacccgagccagcagggcagagtgagaaaccttagagagaagttccaggccttgaactctgtcggttgatgctgactcctgggggagggaggagtcatgttggaggttggggaagaacctgggcatccttcccctcaagcctgggctcatggagcccctgcccagggccctcaggtgggcggaaagtccatcccctccgcccttcaggaaggatgctcccgtgtgcaggggtctcctgcctgtgccatccactggggctcgagacaatttcccactcacctgtgaggccggtgtggctgcttcccttgtaaatagttgttctctggtaagaagccaaatatttaagctcacttcttcccagagagaggaagctctgctcaggcctccagcgttggctggccatggccacagccagatggaggagcccatccccaggagactcaggcagtggcctggagaggctttgttctgtaacggtgccttttcttagggtccaggcaggaatgaagccaataatttattgctttccattctgtggtatgatgtgcgtgtgcgtgagtgtgtggcccctgtttattcccctcctgtcaagaatgaagtggattcagttcaggtacttttgagggttgttgtgctgaccctgtggttgtcgctgatgtacacacatttcattatttgccaatggtgcaataaccactgctgaccaacccactatgtgtgaactccttcctaggcttggctggggtagggaaggttattcatgggccagggatgtcttagggagatggagacatggaggttgttccttccacactcaattgtcacttgggcttatgaaacataaggcacccgggtactggtgggggaggtggggcaggaggatgtgagggcgggctttttctttctgctgcctagactcccatgggcttctctgtctagcagcagcctgctgtcctgtctagggtagggggtcccgcatgccagccttttgctcttttccccaagggccagagttggaccaagaaaaagggaggtggtgaggtggatagactgtttttctcataagcagatgctcccagtatctggtgcnttttgcgtttctctccggtccccaggaaacatcctagaagacaaggatttttttttttttttttttgagacagagtcttattctgtcacccaggctggagtgcaatggcgtgatcttggcttactgcaacctccgcctcccaggttcaagcaattctcgttgtctcagcctcccaggtcgctgggactacaggcatgagccaccacacccagctaattttttgtatttttagtagagacggggtttcgccgtgttgaccaggctggtctcgaacttctgacctcaggtgatccacccacctcggcctcccaaagtgctgggattacaggggtgagccactgcatgcggctgaaggtaaggattctaaactcggagactagaaatgtcctaaaggtgtctgcaacattggatgaggagtacaagtgcatttttctgggatgattcctccctttttatcacattctcagaagtatctttgattcagaagagttaggaatgcctccctatttcagttgggttttctgccctttctccacagaggtccagactcattttgcttaattttttttctagctggggcctgggaggtagaggcttcagggcctgggtggtagagctgcctgacaagtgttcagcagggctgctgggtcagggccctgtgggccttctgacccaacctgaagatgggtctgctaagtctaacaaggtcaagggaagatcagagggacccagattcttttttatcccccacttgaaacggagtcttgctctgtcgcccaggctggagcgcagtggtgcaatcttggctcactgcaacctccgcctccctgaccctcacactgtccagtgcccttgtggttactcagcatcatatcttgagactggcctggcaggagccagtgactgtggaatgaccacagaagattcagggcagctgccagaccaggggctatctctgccctgcgctgcttctgctcaagagaggttgtcactagcctctgatcttcccttgaagaacccgactggggctcttcagagggtggggcccaggaagttgtagttaaccccttccccaggcagtccttacacggccatctaggtatgcctgggaaccttgcaccaggtcggtggttctcactggctgcccattggaattatctggggagccttctggaaacgcagtgcttacattccatctccctagaccaacagaaactgccctctggaggtgaatcccaggcttagagattctgatgattctgcggtccagtgagtgctgagatctgtcctgagctctgtggggaggggcctggactgatcactgcttggaaatgattttgccctacagtaggccttcaagttgatcaaatgcatgaatgagcaagcttttcttggagtttgtgatgaagcccaggaaccgggtgcttgcagtcgtcccataaggctcccagggacaagctagagaatctggctgtccctctgtctccatggtgccagccctcttaggctcagttcaaagggagaggaggctagttaaataagaaactgagagaaacatggagcattattgatttattagaaaaactagtaaatgggtttcctctggttggtggaagcacggttgagcaggtggaggacaggacccagctggccccagggccagccccagattgcatggtctgtgcccaacagggttgcattcctctgcagccgccgcctcctcatttcctccctgagcttgtttgtccaagccaccaagccatgtggtcccgctggcttcatcctcctctggattcctgcccccctcccatcacctgaacaccacccatcacctgaacaccacccatcacctgaacaccacccatcacctgaa

SEQ ID NO: 459566 - DNA, 3019 bp, Homo sapiens
gcaggcctttcaggtctctctggaggacctgacagggcatgaaggcaacgagaagggggctgggccggagcccccaggctcagaggaggaggaggaggagcaggaggagagcctggcggtggcggagcaggtagccgactttgccagctccctgctggccgccctccactgctggcactatcgggccaacgctttacttttctcccggggcgctatgggaaaggggcgcagggagtctgaaagctccaggagcagcagaaggcccagtggccggtctccaaccagtactgagaagcgcatgagcttcgagtccatttcttccctgccagaggttgagccggaccctgaggctgggagtgagcaagaggtattttctgctgtggaagggcccagtgccgaggagacgccttcagacacagaatctccagaagtcctggagacacagcttgatgcccaccagggccttctggggatggaccccccaggtgacatggtggacttcgtggcagctgagagcactgaggaccttaaggccctgagcagcgaggaggaagaagaaatgggaggtgccgcccaggagcctgagagccttctgccaccctctgtgctggaccaggccagcgtcattgcggagcgatttgtcagcagcttctctcggcggagcagcgtggcacaggaggacagcaagtccagtggctttgggagcccgcggctggtcagccggagcagcagcgtgctcagcctggagggcagcgagaagggcctggcccggcatggcagtgccacagactccctcagctgtcagctctccccagaagtggacatcagtgtgggggtggccacagaggacagcccttctgtcaatgggatggagcccccaagcccaggctgcccagtggagcctgaccggtcttcctgcaagaagaaggaatcagcactctccacccgagaccggctgttgctagacaagattaagagctattatgaaaatgcagaacaccatgatgcaggcttcagcgtccgtcgccgggagagcctctcctacatccccaaaggactggtaagaaactccatctccaggttcaacagccttccccggccagacccagagccagtacctccagtggggagcaagagacaggtgggctcccggccgacttcgtgggccctgtttgagctcccaggaccaagccaggcagtcaaaggggacccacctcccatctcagatgctgagttccgcccatcttcagaaattgtgaagatctgggagggaatggagtcttccggagggagccctgggaaggggccaggccagggccaggccaatggctttgacctgcatgagccactcttcatcctggaggagcatgagctgggagccatcacagaggagtcggccactgcctccccggaaagctcctctcccactgaggggcgcagcccggcccacctggcccgggagctgaaagagctggtgaaggagctgagcagcagtacccagggggagctggtggccccactgcacccccgcatcgtgcagctctcccacgtaatggacagccacgtgagcgagcgcgtcaagaacaaggtctaccagctggcccgccagtacagcctccggatcaagagcaacaagccagtgatggccaggccaccactgcagtgggaaaaggtggcccctgagagggatgggaagagccccactgtgccctgtctacaggaagaggctggagagccattaggtggcaaaggtaagaggaagccggtgctgtctctatttgactatgagcagctgatggcccaggagcacagccctcccaagccctcctcggctggggagatgtcaccacagcgtttcttcttcaacccgtctgctgtcagccagaggaccacctcgcctgggggccggccctccgcccggagccccctcagccccacagagaccttcagctggcccgacgtccgtgagctctgctccaagtatgcctcccgcgatgaggcacgccgagcagggggcggccggccccgcggcccacccgtcaacaggagccactcggtgccggagaacatggtagagccacctctgtcgggcagggtgggccgctgccgcagcctgagcaccaagaggggccggggaggcggagaggctgcccaatcccctgggcctctgccccagagcaagccggatggaggcgagaccctgtatgtcactgcagacctcaccctggaggacaaccggcgggtgattgtcatggagaagggaccccttcccagccccactgcagggctggaggagagcagtggccagggaccaagctcaccggtggccctgctggggcaggttcaggacttccagcagtctgcagagtgccagccgaaggaagagggttccagggacccggcagacccgagccagcagggcagagtgagaaaccttagagagaagttccaggccttgaactctgtcggttgatgctgactcctgggggagggaggagtcatgttggaggttggggaagaacctgggcatccttcccctcaagcctgggctcatggagcccctgcccagggccctcaggtgggcggaaagtccatcccctccgcccttcaggaaggatgctcccgtgtgcaggggtctcctgcctgtgccatccactggggctcgagacaatttcccactcacctgtgaggccggtgtggctgcttcccttgtaaatagttgttctctggtaagaagccaaatatttaagctcacttcttcccagagagaggaagctctgctcaggcctccagcgttggctggccatggccacagccagatggaggagcccatccccaggagactcaggcagtggcctggagaggctttgttctgtaacggtgccttttcttagggtccaggcaggaatgaagccaataatttattgctttccattctgtggtatgatgtgcgtgtgcgtgagtgtgtggcccctgtttattcccctcctgtcaagaatgaagtggattcagttcaggt

SEQ ID NO: 459567 - DNA, 3440 bp, Homo sapiens
  misc_feature (3254)..(3254): n is a, c, g, or t
  misc_feature (3263)..(3263): n is a, c, g, or t
gcaggcctttcaggtctctctggaggacctgacagggcatgaaggcaacgagaagggggctgggccggagcccccaggctcagaggaggaggaggaggagcaggaggagagcctggcggtggcggagcaggtagccgactttgccagctccctgctggccgccctccactgctggcactatcgggccaacgctttacttttctcccggggcgctatgggaaaggggcgcagggagtctgaaagctccaggagcagcagaaggcccagtggccggtctccaaccagtactgagaagcgcatgagcttcgagtccatttcttccctgccagaggttgagccggaccctgaggctgggagtgagcaagaggtattttctgctgtggaagggcccagtgccgaggagacgccttcagacacagaatctccagaagtcctggagacacagcttgatgcccaccagggccttctggggatggaccccccaggtgacatggtggacttcgtggcagctgagagcactgaggaccttaaggccctgagcagcgaggaggaagaagaaatgggaggtgccgcccaggagcctgagagccttctgccaccctctgtgctggaccaggccagcgtcattgcggagcgatttgtcagcagcttctctcggcggagcagcgtggcacaggaggacagcaagtccagtggctttgggagcccgcggctggtcagccggagcagcagcgtgctcagcctggagggcagcgagaagggcctggcccggcatggcagtgccacagactccctcagctgtcagctctccccagaagtggacatcagtgtgggggtggccacagaggacagcccttctgtcaatgggatggagcccccaagcccaggctgcccagtggagcctgaccggtcttcctgcaagaagaaggaatcagcactctccacccgagaccggctgttgctagacaagattaagagctattatgaaaatgcagaacaccatgatgcaggcttcagcgtccgtcgccgggagagcctctcctacatccccaaaggactggtaagaaactccatctccaggttcaacagccttccccggccagacccagagccagtacctccagtggggagcaagagacaggtgggctcccggccgacttcgtgggccctgtttgagctcccaggaccaagccaggcagtcaaaggggacccacctcccatctcagatgctgagttccgcccatcttcagaaattgtgaagatctgggagggaatggagtcttccggagggagccctgggaaggggccaggccagggccaggccaatggctttgacctgcatgagccactcttcatcctggaggagcatgagctgggagccatcacagaggagtcggccactgcctccccggaaagctcctctcccactgaggggcgcagcccggcccacctggcccgggagctgaaagagctggtgaaggagctgagcagcagtacccagggggagctggtggccccactgcacccccgcatcgtgcagctctcccacgtaatggacagccacgtgagcgagcgcgtcaagaacaaggtctaccagctggcccgccagtacagcctccggatcaagagcaacaagccagtgatggccaggccaccactgcagtgggaaaaggtggcccctgagagggatgggaagagccccactgtgccctgtctacaggaagaggctggagagccattaggtggcaaaggtaagaggaagccggtgctgtctctatttgactatgagcagctgatggcccaggagcacagccctcccaagccctcctcggctggggagatgtcaccacagcgtttcttcttcaacccgtctgctgtcagccagaggaccacctcgcctgggggccggccctccgcccggagccccctcagccccacagagaccttcagctggcccgacgtccgtgagctctgctccaagtatgcctcccgcgatgaggcacgccgagcagggggcggccggccccgcggcccacccgtcaacaggagccactcggtgccggagaacatggtagagccacctctgtcgggcagggtgggccgctgccgcagcctgagcaccaagaggggccggggaggcggagaggctgcccaatcccctgggcctctgccccagagcaagccggatggaggcgagaccctgtatgtcactgcagacctcaccctggaggacaaccggcgggtgattgtcatggagaagggaccccttcccagccccactgcagggctggaggagagcagtggccagggaccaagctcaccggtggccctgctggggcaggttcaggacttccagcagtctgcagagtgccagccgaaggaagagggttccagggacccggcagacccgagccagcagggcagagtgagaaaccttagagagaagttccaggccttgaactctgtcggttgatgctgactcctgggggagggaggagtcatgttggaggttggggaagaacctgggcatccttcccctcaagcctgggctcatggagcccctgcccagggccctcaggtgggcggaaagtccatcccctccgcccttcaggaaggatgctcccgtgtgcaggggtctcctgcctgtgccatccactggggctcgagacaatttcccactcacctgtgaggccggtgtggctgcttcccttgtaaatagttgttctctggtaagaagccaaatatttaagctcacttcttcccagagagaggaagctctgctcaggcctccagcgttggctggccatggccacagccagatggaggagcccatccccaggagactcaggcagtggcctggagaggctttgttctgtaacggtgccttttcttagggtccaggcaggaatgaagccaataatttattgctttccattctgtggtatgatgtgcgtgtgcgtgagtgtgtggcccctgtttattcccctcctgtcgtcttctcaggaaacaccatacaagcaccaacttcattttatgattcaaagctcaccatccccactaaaagaatgctattcctcatctcagagaaacaggcaggaaggacagaaggggttagttacagtgatcaattttagcgtttgctaaaactcacaaattctagtctttttatgttcaagttttggtacagaagtatacattcaactatgagtgccacgttttccgcatcaaacattggtctggcaacaaactgtttntgttggctntctgaacataatacttcttcagaagggaggggcatggtgagatgctgaagcctaaattatgttggtaagaaacaaaataccatcagttgaaggtttttttttatcatcttggcttagattatttaaatgaaatccaaagcctccgccatttcccttctgtcgtctttctacaggatc

SEQ ID NO: 459568 - DNA, 3902 bp, Homo sapiens
  misc_feature (1735)..(1735): n is a, c, g, or t
gcaggcctttcaggtctctctggaggacctgacagggcatgaaggcaacgagaagggggctgggccggagcccccaggctcagaggaggaggaggaggagcaggaggagagcctggcggtggcggagcaggtagccgactttgccagctccctgctggccgccctccactgctggcactatcgggccaacgctttacttttctcccggggcgctatgggaaaggggcgcagggagtctgaaagctccaggagcagcagaaggcccagtggccggtctccaaccagtactgagaagcgcatgagcttcgagtccatttcttccctgccagaggttgagccggaccctgaggctgggagtgagcaagaggtattttctgctgtggaagggcccagtgccgaggagacgccttcagacacagaatctccagaagtcctggagacacagcttgatgcccaccagggccttctggggatggaccccccaggtgacatggtggacttcgtggcagctgagagcactgaggaccttaaggccctgagcagcgaggaggaagaagaaatgggaggtgccgcccaggagcctgagagccttctgccaccctctgtgctggaccaggccagcgtcattgcggagcgatttgtcagcagcttctctcggcggagcagcgtggcacaggaggacagcaagtccagtggctttgggagcccgcggctggtcagccggagcagcagcgtgctcagcctggagggcagcgagaagggcctggcccggcatggcagtgccacagactccctcagctgtcagctctccccagaagtggacatcagtgtgggggtggccacagaggacagcccttctgtcaatgggatggagcccccaagcccaggctgcccagtggagcctgaccggtcttcctgcaagaagaaggaatcagcactctccacccgagaccggctgttgctagacaagattaagagctattatgaaaatgcagaacaccatgatgcaggcttcagcgtccgtcgccgggagagcctctcctacatccccaaaggactggtaagaaactccatctccaggagactcaggcagtggcctggagaggctttgttctgtaacggtgccttttcttagggtccaggcaggaatgaagccaataatttattgctttccattctgtggtatgatgtgcgtgtgcgtgagtgtgtggcccctgtttattcccctcctgtcaagaatgaagtggattcagttcaggtacttttgagggttgttgtgctgaccctgtggttgtcgctgatgtacacacatttcattatttgccaatggtgcaataaccactgctgaccaacccactatgtgtgaactccttcctaggcttggctggggtagggaaggttattcatgggccagggatgtcttagggagatggagacatggaggttgttccttccacactcaattgtcacttgggcttatgaaacataaggcacccgggtactggtgggggaggtggggcaggaggatgtgagggcgggctttttctttctgctgcctagactcccatgggcttctctgtctagcagcagcctgctgtcctgtctagggtagggggtcccgcatgccagccttttgctcttttccccaagggccagagttggaccaagaaaaagggaggtggtgaggtggatagactgtttttctcataagcagatgctcccagtatctggtgcnttttgcgtttctctccggtccccaggaaacatcctagaagacaaggatttttttttttttttttttgagacagagtcttattctgtcacccaggctggagtgcaatggcgtgatcttggcttactgcaacctccgcctcccaggttcaagcaattctcgttgtctcagcctcccaggtcgctgggactacaggcatgagccaccacacccagctaattttttgtatttttagtagagacggggtttcgccgtgttgaccaggctggtctcgaacttctgacctcaggtgatccacccacctcggcctcccaaagtgctgggattacaggggtgagccactgcatgcggctgaaggtaaggattctaaactcggagactagaaatgtcctaaaggtgtctgcaacattggatgaggagtacaagtgcatttttctgggatgattcctccctttttatcacattctcagaagtatctttgattcagaagagttaggaatgcctccctatttcagttgggttttctgccctttctccacagaggtccagactcattttgcttaattttttttctagctggggcctgggaggtagaggcttcagggcctgggtggtagagctgcctgacaagtgttcagcagggctgctgggtcagggccctgtgggccttctgacccaacctgaagatgggtctgctaagtctaacaaggtcaagggaagatcagagggacccagattcttttttatcccccacttgaaacggagtcttgctctgtcgcccaggctggagcgcagtggtgcaatcttggctcactgcaacctccgcctccctgaccctcacactgtccagtgcccttgtggttactcagcatcatatcttgagactggcctggcaggagccagtgactgtggaatgaccacagaagattcagggcagctgccagaccaggggctatctctgccctgcgctgcttctgctcaagagaggttgtcactagcctctgatcttcccttgaagaacccgactggggctcttcagagggtggggcccaggaagttgtagttaaccccttccccaggcagtccttacacggccatctaggtatgcctgggaaccttgcaccaggtcggtggttctcactggctgcccattggaattatctggggagccttctggaaacgcagtgcttacattccatctccctagaccaacagaaactgccctctggaggtgaatcccaggcttagagattctgatgattctgcggtccagtgagtgctgagatctgtcctgagctctgtggggaggggcctggactgatcactgcttggaaatgattttgccctacagtaggccttcaagttgatcaaatgcatgaatgagcaagcttttcttggagtttgtgatgaagcccaggaaccgggtgcttgcagtcgtcccataaggctcccagggacaagctagagaatctggctgtccctctgtctccatggtgccagccctcttaggctcagttcaaagggagaggaggctagttaaataagaaactgagagaaacatggagcattattgatttattagaaaaactagtaaatgggtttcctctggttggtggaagcacggttgagcaggtggaggacaggacccagctggccccagggccagccccagattgcatggtctgtgcccaacagggttgcattcctctgcagccgccgcctcctcatttcctccctgagcttgtttgtccaagccaccaagccatgtggtcccgctggcttcatcctcctctggattcctgcccccctcccatgaagggaggaagaggattcagggtcagcctaggggaccctggctccctccgataggcaggaaggaggagggatgcggaggagaggctgagccttccacgggcctcctgttaggggtgttggtggaggccaggttggggagggaagcctaaggaccctccacacctcccacagccagagtcagttgaggctgggacaaaggggaaggagagagggaaggaggaccgcctgaccttgcccagaaggagcttcctctaaactgccctgggaaggaagcctggtatgctggtgtggactggagctgtgtcaacctcgtttgggaatactgtcaaaagactgtagagtagaataaggagag

SEQ ID NO: 459569 - DNA, 5661 bp, Homo sapiens
  misc_feature (3494)..(3494): n is a, c, g, or t
gcaggcctttcaggtctctctggaggacctgacagggcatgaaggcaacgagaagggggctgggccggagcccccaggctcagaggaggaggaggaggagcaggaggagagcctggcggtggcggagcaggtagccgactttgccagctccctgctggccgccctccactgctggcactatcgggccaacgctttacttttctcccggggcgctatgggaaaggggcgcagggagtctgaaagctccaggagcagcagaaggcccagtggccggtctccaaccagtactgagaagcgcatgagcttcgagtccatttcttccctgccagaggttgagccggaccctgaggctgggagtgagcaagaggtattttctgctgtggaagggcccagtgccgaggagacgccttcagacacagaatctccagaagtcctggagacacagcttgatgcccaccagggccttctggggatggaccccccaggtgacatggtggacttcgtggcagctgagagcactgaggaccttaaggccctgagcagcgaggaggaagaagaaatgggaggtgccgcccaggagcctgagagccttctgccaccctctgtgctggaccaggccagcgtcattgcggagcgatttgtcagcagcttctctcggcggagcagcgtggcacaggaggacagcaagtccagtggctttgggagcccgcggctggtcagccggagcagcagcgtgctcagcctggagggcagcgagaagggcctggcccggcatggcagtgccacagactccctcagctgtcagctctccccagaagtggacatcagtgtgggggtggccacagaggacagcccttctgtcaatgggatggagcccccaagcccaggctgcccagtggagcctgaccggtcttcctgcaagaagaaggaatcagcactctccacccgagaccggctgttgctagacaagattaagagctattatgaaaatgcagaacaccatgatgcaggcttcagcgtccgtcgccgggagagcctctcctacatccccaaaggactggtaagaaactccatctccaggttcaacagccttccccggccagacccagagccagtacctccagtggggagcaagagacaggtgggctcccggccgacttcgtgggccctgtttgagctcccaggaccaagccaggcagtcaaaggggacccacctcccatctcagatgctgagttccgcccatcttcagaaattgtgaagatctgggagggaatggagtcttccggagggagccctgggaaggggccaggccagggccaggccaatggctttgacctgcatgagccactcttcatcctggaggagcatgagctgggagccatcacagaggagtcggccactgcctccccggaaagctcctctcccactgaggggcgcagcccggcccacctggcccgggagctgaaagagctggtgaaggagctgagcagcagtacccagggggagctggtggccccactgcacccccgcatcgtgcagctctcccacgtaatggacagccacgtgagcgagcgcgtcaagaacaaggtctaccagctggcccgccagtacagcctccggatcaagagcaacaagccagtgatggccaggccaccactgcagtgggaaaaggtggcccctgagagggatgggaagagccccactgtgccctgtctacaggaagaggctggagagccattaggtggcaaaggtaagaggaagccggtgctgtctctatttgactatgagcagctgatggcccaggagcacagccctcccaagccctcctcggctggggagatgtcaccacagcgtttcttcttcaacccgtctgctgtcagccagaggaccacctcgcctgggggccggccctccgcccggagccccctcagccccacagagaccttcagctggcccgacgtccgtgagctctgctccaagtatgcctcccgcgatgaggcacgccgagcagggggcggccggccccgcggcccacccgtcaacaggagccactcggtgccggagaacatggtagagccacctctgtcgggcagggtgggccgctgccgcagcctgagcaccaagaggggccggggaggcggagaggctgcccaatcccctgggcctctgccccagagcaagccggatggaggcgagaccctgtatgtcactgcagacctcaccctggaggacaaccggcgggtgattgtcatggagaagggaccccttcccagccccactgcagggctggaggagagcagtggccagggaccaagctcaccggtggccctgctggggcaggttcaggacttccagcagtctgcagagtgccagccgaaggaagagggttccagggacccggcagacccgagccagcagggcagagtgagaaaccttagagagaagttccaggccttgaactctgtcggttgatgctgactcctgggggagggaggagtcatgttggaggttggggaagaacctgggcatccttcccctcaagcctgggctcatggagcccctgcccagggccctcaggtgggcggaaagtccatcccctccgcccttcaggaaggatgctcccgtgtgcaggggtctcctgcctgtgccatccactggggctcgagacaatttcccactcacctgtgaggccggtgtggctgcttcccttgtaaatagttgttctctggtaagaagccaaatatttaagctcacttcttcccagagagaggaagctctgctcaggcctccagcgttggctggccatggccacagccagatggaggagcccatccccaggagactcaggcagtggcctggagaggctttgttctgtaacggtgccttttcttagggtccaggcaggaatgaagccaataatttattgctttccattctgtggtatgatgtgcgtgtgcgtgagtgtgtggcccctgtttattcccctcctgtcaagaatgaagtggattcagttcaggtacttttgagggttgttgtgctgaccctgtggttgtcgctgatgtacacacatttcattatttgccaatggtgcaataaccactgctgaccaacccactatgtgtgaactccttcctaggcttggctggggtagggaaggttattcatgggccagggatgtcttagggagatggagacatggaggttgttccttccacactcaattgtcacttgggcttatgaaacataaggcacccgggtactggtgggggaggtggggcaggaggatgtgagggcgggctttttctttctgctgcctagactcccatgggcttctctgtctagcagcagcctgctgtcctgtctagggtagggggtcccgcatgccagccttttgctcttttccccaagggccagagttggaccaagaaaaagggaggtggtgaggtggatagactgtttttctcataagcagatgctcccagtatctggtgcnttttgcgtttctctccggtccccaggaaacatcctagaagacaaggatttttttttttttttttttgagacagagtcttattctgtcacccaggctggagtgcaatggcgtgatcttggcttactgcaacctccgcctcccaggttcaagcaattctcgttgtctcagcctcccaggtcgctgggactacaggcatgagccaccacacccagctaattttttgtatttttagtagagacggggtttcgccgtgttgaccaggctggtctcgaacttctgacctcaggtgatccacccacctcggcctcccaaagtgctgggattacaggggtgagccactgcatgcggctgaaggtaaggattctaaactcggagactagaaatgtcctaaaggtgtctgcaacattggatgaggagtacaagtgcatttttctgggatgattcctccctttttatcacattctcagaagtatctttgattcagaagagttaggaatgcctccctatttcagttgggttttctgccctttctccacagaggtccagactcattttgcttaattttttttctagctggggcctgggaggtagaggcttcagggcctgggtggtagagctgcctgacaagtgttcagcagggctgctgggtcagggccctgtgggccttctgacccaacctgaagatgggtctgctaagtctaacaaggtcaagggaagatcagagggacccagattcttttttatcccccacttgaaacggagtcttgctctgtcgcccaggctggagcgcagtggtgcaatcttggctcactgcaacctccgcctccctgaccctcacactgtccagtgcccttgtggttactcagcatcatatcttgagactggcctggcaggagccagtgactgtggaatgaccacagaagattcagggcagctgccagaccaggggctatctctgccctgcgctgcttctgctcaagagaggttgtcactagcctctgatcttcccttgaagaacccgactggggctcttcagagggtggggcccaggaagttgtagttaaccccttccccaggcagtccttacacggccatctaggtatgcctgggaaccttgcaccaggtcggtggttctcactggctgcccattggaattatctggggagccttctggaaacgcagtgcttacattccatctccctagaccaacagaaactgccctctggaggtgaatcccaggcttagagattctgatgattctgcggtccagtgagtgctgagatctgtcctgagctctgtggggaggggcctggactgatcactgcttggaaatgattttgccctacagtaggccttcaagttgatcaaatgcatgaatgagcaagcttttcttggagtttgtgatgaagcccaggaaccgggtgcttgcagtcgtcccataaggctcccagggacaagctagagaatctggctgtccctctgtctccatggtgccagccctcttaggctcagttcaaagggagaggaggctagttaaataagaaactgagagaaacatggagcattattgatttattagaaaaactagtaaatgggtttcctctggttggtggaagcacggttgagcaggtggaggacaggacccagctggccccagggccagccccagattgcatggtctgtgcccaacagggttgcattcctctgcagccgccgcctcctcatttcctccctgagcttgtttgtccaagccaccaagccatgtggtcccgctggcttcatcctcctctggattcctgcccccctcccatgaagggaggaagaggattcagggtcagcctaggggaccctggctccctccgataggcaggaaggaggagggatgcggaggagaggctgagccttccacgggcctcctgttaggggtgttggtggaggccaggttggggagggaagcctaaggaccctccacacctcccacagccagagtcagttgaggctgggacaaaggggaaggagagagggaaggaggaccgcctgaccttgcccagaaggagcttcctctaaactgccctgggaaggaagcctggtatgctggtgtggactggagctgtgtcaacctcgtttgggaatactgtcaaaagactgtagagtagaataaggagag

SEQ ID NO: 459570 - DNA, 5044 bp, Homo sapiens
  misc_feature (2877)..(2877): n is a, c, g, or t
gcaggcctttcaggtctctctggaggacctgacagggcatgaaggcaacgagaagggggctgggccggagcccccaggctcagaggaggaggaggaggagcaggaggagagcctggcggtggcggagcagggaaaggggcgcagggagtctgaaagctccaggagcagcagaaggcccagtggccggtctccaaccagtactgagaagcgcatgagcttcgagtccatttcttccctgccagaggttgagccggaccctgaggctgggagtgagcaagaggtattttctgctgtggaagggcccagtgccgaggagacgccttcagacacagaatctccagaagtcctggagacacagcttgatgcccaccagggccttctggggatggaccccccaggtgacatggtggacttcgtggcagctgagagcactgaggaccttaaggccctgagcagcgaggaggaagaagaaatgggaggtgccgcccaggagcctgagagccttctgccaccctctgtgctggaccaggccagcgtcattgcggagcgatttgtcagcagcttctctcggcggagcagcgtggcacaggaggacagcaagtccagtggctttgggagcccgcggctggtcagccggagcagcagcgtgctcagcctggagggcagcgagaagggcctggcccggcatggcagtgccacagactccctcagctgtcagctctccccagaagtggacatcagtgtgggggtggccacagaggacagcccttctgtcaatgggatggagcccccaagcccaggctgcccagtggagcctgaccggtcttcctgcaagaagaaggaatcagcactctccacccgagaccggctgttgctagacaagattaagactggtggccccactgcacccccgcatcgtgcagctctcccacgtaatggacagccacgtgagcgagcgcgtcaagaacaaggtctaccagctggcccgccagtacagcctccggatcaagagcaacaagccagtgatggccaggccaccactgcagtgggaaaaggtggcccctgagagggatgggaagagccccactgtgccctgtctacaggaagaggctggagagccattaggtggcaaaggtaagaggaagccggtgctgtctctatttgactatgagcagctgatggcccaggagcacagccctcccaagccctcctcggctggggagatgtcaccacagcgtttcttcttcaacccgtctgctgtcagccagaggaccacctcgcctgggggccggccctccgcccggagccccctcagccccacagagaccttcagctggcccgacgtccgtgagctctgctccaagtatgcctcccgcgatgaggcacgccgagcagggggcggccggccccgcggcccacccgtcaacaggagccactcggtgccggagaacatggtagagccacctctgtcgggcagggtgggccgctgccgcagcctgagcaccaagaggggccggggaggcggagaggctgcccaatcccctgggcctctgccccagagcaagccggatggaggcgagaccctgtatgtcactgcagacctcaccctggaggacaaccggcgggtgattgtcatggagaagggaccccttcccagccccactgcagggctggaggagagcagtggccagggaccaagctcaccggtggccctgctggggcaggttcaggacttccagcagtctgcagagtgccagccgaaggaagagggttccagggacccggcagacccgagccagcagggcagagtgagaaaccttagagagaagttccaggccttgaactctgtcggttgatgctgactcctgggggagggaggagtcatgttggaggttggggaagaacctgggcatccttcccctcaagcctgggctcatggagcccctgcccagggccctcaggtgggcggaaagtccatcccctccgcccttcaggaaggatgctcccgtgtgcaggggtctcctgcctgtgccatccactggggctcgagacaatttcccactcacctgtgaggccggtgtggctgcttcccttgtaaatagttgttctctggtaagaagccaaatatttaagctcacttcttcccagagagaggaagctctgctcaggcctccagcgttggctggccatggccacagccagatggaggagcccatccccaggagactcaggcagtggcctggagaggctttgttctgtaacggtgccttttcttagggtccaggcaggaatgaagccaataatttattgctttccattctgtggtatgatgtgcgtgtgcgtgagtgtgtggcccctgtttattcccctcctgtcaagaatgaagtggattcagttcaggtacttttgagggttgttgtgctgaccctgtggttgtcgctgatgtacacacatttcattatttgccaatggtgcaataaccactgctgaccaacccactatgtgtgaactccttcctaggcttggctggggtagggaaggttattcatgggccagggatgtcttagggagatggagacatggaggttgttccttccacactcaattgtcacttgggcttatgaaacataaggcacccgggtactggtgggggaggtggggcaggaggatgtgagggcgggctttttctttctgctgcctagactcccatgggcttctctgtctagcagcagcctgctgtcctgtctagggtagggggtcccgcatgccagccttttgctcttttccccaagggccagagttggaccaagaaaaagggaggtggtgaggtggatagactgtttttctcataagcagatgctcccagtatctggtgcnttttgcgtttctctccggtccccaggaaacatcctagaagacaaggatttttttttttttttttttgagacagagtcttattctgtcacccaggctggagtgcaatggcgtgatcttggcttactgcaacctccgcctcccaggttcaagcaattctcgttgtctcagcctcccaggtcgctgggactacaggcatgagccaccacacccagctaattttttgtatttttagtagagacggggtttcgccgtgttgaccaggctggtctcgaacttctgacctcaggtgatccacccacctcggcctcccaaagtgctgggattacaggggtgagccactgcatgcggctgaaggtaaggattctaaactcggagactagaaatgtcctaaaggtgtctgcaacattggatgaggagtacaagtgcatttttctgggatgattcctccctttttatcacattctcagaagtatctttgattcagaagagttaggaatgcctccctatttcagttgggttttctgccctttctccacagaggtccagactcattttgcttaattttttttctagctggggcctgggaggtagaggcttcagggcctgggtggtagagctgcctgacaagtgttcagcagggctgctgggtcagggccctgtgggccttctgacccaacctgaagatgggtctgctaagtctaacaaggtcaagggaagatcagagggacccagattcttttttatcccccacttgaaacggagtcttgctctgtcgcccaggctggagcgcagtggtgcaatcttggctcactgcaacctccgcctccctgaccctcacactgtccagtgcccttgtggttactcagcatcatatcttgagactggcctggcaggagccagtgactgtggaatgaccacagaagattcagggcagctgccagaccaggggctatctctgccctgcgctgcttctgctcaagagaggttgtcactagcctctgatcttcccttgaagaacccgactggggctcttcagagggtggggcccaggaagttgtagttaaccccttccccaggcagtccttacacggccatctaggtatgcctgggaaccttgcaccaggtcggtggttctcactggctgcccattggaattatctggggagccttctggaaacgcagtgcttacattccatctccctagaccaacagaaactgccctctggaggtgaatcccaggcttagagattctgatgattctgcggtccagtgagtgctgagatctgtcctgagctctgtggggaggggcctggactgatcactgcttggaaatgattttgccctacagtaggccttcaagttgatcaaatgcatgaatgagcaagcttttcttggagtttgtgatgaagcccaggaaccgggtgcttgcagtcgtcccataaggctcccagggacaagctagagaatctggctgtccctctgtctccatggtgccagccctcttaggctcagttcaaagggagaggaggctagttaaataagaaactgagagaaacatggagcattattgatttattagaaaaactagtaaatgggtttcctctggttggtggaagcacggttgagcaggtggaggacaggacccagctggccccagggccagccccagattgcatggtctgtgcccaacagggttgcattcctctgcagccgccgcctcctcatttcctccctgagcttgtttgtccaagccaccaagccatgtggtcccgctggcttcatcctcctctggattcctgcccccctcccatgaagggaggaagaggattcagggtcagcctaggggaccctggctccctccgataggcaggaaggaggagggatgcggaggagaggctgagccttccacgggcctcctgttaggggtgttggtggaggccaggttggggagggaagcctaaggaccctccacacctcccacagccagagtcagttgaggctgggacaaaggggaaggagagagggaaggaggaccgcctgaccttgcccagaaggagcttcctctaaactgccctgggaaggaagcctggtatgctggtgtggactggagctgtgtcaacctcgtttgggaatactgtcaaaagactgtagagtagaataaggagag

SEQ ID NO: 459571 - DNA, 4983 bp, Homo sapiens
  misc_feature (2816)..(2816): n is a, c, g, or t
gtgctgatgtcgatctaaggatcccagtcactgaagcctggttcagccgtgagtcacgtctgactgggaagaaagcgagaagggcctggcccggcatggcagtgccacagactccctcagctgtcagctctccccagaagtggacatcagtgtgggggtggccacagaggacagcccttctgtcaatgggatggagcccccaagcccaggctgcccagtggagcctgaccggtcttcctgcaagaagaaggaatcagcactctccacccgagaccggctgttgctagacaagattaagagctattatgaaaatgcagaacaccatgatgcaggcttcagcgtccgtcgccgggagagcctctcctacatccccaaaggactggtaagaaactccatctccaggttcaacagccttccccggccagacccagagccagtacctccagtggggagcaagagacaggtgggctcccggccgacttcgtgggccctgtttgagctcccaggaccaagccaggcagtcaaaggggacccacctcccatctcagatgctgagttccgcccatcttcagaaattgtgaagatctgggagggaatggagtcttccggagggagccctgggaaggggccaggccagggccaggccaatggctttgacctgcatgagccactcttcatcctggaggagcatgagctgggagccatcacagaggagtcggccactgcctccccggaaagctcctctcccactgaggggcgcagcccggcccacctggcccgggagctgaaagagctggtgaaggagctgagcagcagtacccagggggagctggtggccccactgcacccccgcatcgtgcagctctcccacgtaatggacagccacgtgagcgagcgcgtcaagaacaaggtctaccagctggcccgccagtacagcctccggatcaagagcaacaagccagtgatggccaggccaccactgcagtgggaaaaggtggcccctgagagggatgggaagagccccactgtgccctgtctacaggaagaggctggagagccattaggtggcaaaggtaagaggaagccggtgctgtctctatttgactatgagcagctgatggcccaggagcacagccctcccaagccctcctcggctggggagatgtcaccacagcgtttcttcttcaacccgtctgctgtcagccagaggaccacctcgcctgggggccggccctccgcccggagccccctcagccccacagagaccttcagctggcccgacgtccgtgagctctgctccaagtatgcctcccgcgatgaggcacgccgagcagggggcggccggccccgcggcccacccgtcaacaggagccactcggtgccggagaacatggtagagccacctctgtcgggcagggtgggccgctgccgcagcctgagcaccaagaggggccggggaggcggagaggctgcccaatcccctgggcctctgccccagagcaagccggatggaggcgagaccctgtatgtcactgcagacctcaccctggaggacaaccggcgggtgattgtcatggagaagggaccccttcccagccccactgcagggctggaggagagcagtggccagggaccaagctcaccggtggccctgctggggcaggttcaggacttccagcagtctgcagagtgccagccgaaggaagagggttccagggacccggcagacccgagccagcagggcagagtgagaaaccttagagagaagttccaggccttgaactctgtcggttgatgctgactcctgggggagggaggagtcatgttggaggttggggaagaacctgggcatccttcccctcaagcctgggctcatggagcccctgcccagggccctcaggtgggcggaaagtccatcccctccgcccttcaggaaggatgctcccgtgtgcaggggtctcctgcctgtgccatccactggggctcgagacaatttcccactcacctgtgaggccggtgtggctgcttcccttgtaaatagttgttctctggtaagaagccaaatatttaagctcacttcttcccagagagaggaagctctgctcaggcctccagcgttggctggccatggccacagccagatggaggagcccatccccaggagactcaggcagtggcctggagaggctttgttctgtaacggtgccttttcttagggtccaggcaggaatgaagccaataatttattgctttccattctgtggtatgatgtgcgtgtgcgtgagtgtgtggcccctgtttattcccctcctgtcaagaatgaagtggattcagttcaggtacttttgagggttgttgtgctgaccctgtggttgtcgctgatgtacacacatttcattatttgccaatggtgcaataaccactgctgaccaacccactatgtgtgaactccttcctaggcttggctggggtagggaaggttattcatgggccagggatgtcttagggagatggagacatggaggttgttccttccacactcaattgtcacttgggcttatgaaacataaggcacccgggtactggtgggggaggtggggcaggaggatgtgagggcgggctttttctttctgctgcctagactcccatgggcttctctgtctagcagcagcctgctgtcctgtctagggtagggggtcccgcatgccagccttttgctcttttccccaagggccagagttggaccaagaaaaagggaggtggtgaggtggatagactgtttttctcataagcagatgctcccagtatctggtgcnttttgcgtttctctccggtccccaggaaacatcctagaagacaaggatttttttttttttttttttgagacagagtcttattctgtcacccaggctggagtgcaatggcgtgatcttggcttactgcaacctccgcctcccaggttcaagcaattctcgttgtctcagcctcccaggtcgctgggactacaggcatgagccaccacacccagctaattttttgtatttttagtagagacggggtttcgccgtgttgaccaggctggtctcgaacttctgacctcaggtgatccacccacctcggcctcccaaagtgctgggattacaggggtgagccactgcatgcggctgaaggtaaggattctaaactcggagactagaaatgtcctaaaggtgtctgcaacattggatgaggagtacaagtgcatttttctgggatgattcctccctttttatcacattctcagaagtatctttgattcagaagagttaggaatgcctccctatttcagttgggttttctgccctttctccacagaggtccagactcattttgcttaattttttttctagctggggcctgggaggtagaggcttcagggcctgggtggtagagctgcctgacaagtgttcagcagggctgctgggtcagggccctgtgggccttctgacccaacctgaagatgggtctgctaagtctaacaaggtcaagggaagatcagagggacccagattcttttttatcccccacttgaaacggagtcttgctctgtcgcccaggctggagcgcagtggtgcaatcttggctcactgcaacctccgcctccctgaccctcacactgtccagtgcccttgtggttactcagcatcatatcttgagactggcctggcaggagccagtgactgtggaatgaccacagaagattcagggcagctgccagaccaggggctatctctgccctgcgctgcttctgctcaagagaggttgtcactagcctctgatcttcccttgaagaacccgactggggctcttcagagggtggggcccaggaagttgtagttaaccccttccccaggcagtccttacacggccatctaggtatgcctgggaaccttgcaccaggtcggtggttctcactggctgcccattggaattatctggggagccttctggaaacgcagtgcttacattccatctccctagaccaacagaaactgccctctggaggtgaatcccaggcttagagattctgatgattctgcggtccagtgagtgctgagatctgtcctgagctctgtggggaggggcctggactgatcactgcttggaaatgattttgccctacagtaggccttcaagttgatcaaatgcatgaatgagcaagcttttcttggagtttgtgatgaagcccaggaaccgggtgcttgcagtcgtcccataaggctcccagggacaagctagagaatctggctgtccctctgtctccatggtgccagccctcttaggctcagttcaaagggagaggaggctagttaaataagaaactgagagaaacatggagcattattgatttattagaaaaactagtaaatgggtttcctctggttggtggaagcacggttgagcaggtggaggacaggacccagctggccccagggccagccccagattgcatggtctgtgcccaacagggttgcattcctctgcagccgccgcctcctcatttcctccctgagcttgtttgtccaagccaccaagccatgtggtcccgctggcttcatcctcctctggattcctgcccccctcccatgaagggaggaagaggattcagggtcagcctaggggaccctggctccctccgataggcaggaaggaggagggatgcggaggagaggctgagccttccacgggcctcctgttaggggtgttggtggaggccaggttggggagggaagcctaaggaccctccacacctcccacagccagagtcagttgaggctgggacaaaggggaaggagagagggaaggaggaccgcctgaccttgcccagaaggagcttcctctaaactgccctgggaaggaagcctggtatgctggtgtggactggagctgtgtcaacctcgtttgggaatactgtcaaaagactgtagagtagaataaggagag

SEQ ID NO: 459572 - DNA, 2934 bp, Homo sapiens
gcaggcctttcaggtctctctggaggacctgacagggcatgaaggcaacgagaagggggctgggccggagcccccaggctcagaggaggaggaggaggagcaggaggagagcctggcggtggcggagcaggtagccgactttgccagctccctgctggccgccctccactgctggcactatcgggccaacgctttacttttctcccggggcgctatgggaaaggggcgcagggagtctgaaagctccaggagcagcagaaggcccagtggccggtctccaaccagtactgagaagcgcatgagcttcgagtccatttcttccctgccagaggttgagccggaccctgaggctgggagtgagcaagaggtattttctgctgtggaagggcccagtgccgaggagacgccttcagacacagaatctccagaagtcctggagacacagcttgatgcccaccagggccttctggggatggaccccccaggtgacatggtggacttcgtggcagctgagagcactgaggaccttaaggccctgagcagcgaggaggaagaagaaatgggaggtgccgcccaggagcctgagagccttctgccaccctctgtgctggaccaggccagcgtcattgcggagcgatttgtcagcagcttctctcggcggagcagcgtggcacaggaggacagcaagtccagtggctttgggagcccgcggctggtcagccggagcagcagcgtgctcagcctggagggcagcgagaagggcctggcccggcatggcagtgccacagactccctcagctgtcagctctccccagaagtggacatcagtgtgggggtggccacagaggacagcccttctgtcaatgggatggagcccccaagcccaggctgcccagtggagcctgaccggtcttcctgcaagaagaaggaatcagcactctccacccgagaccggctgttgctagacaagattaagagctattatgaaaatgcagaacaccatgatgcaggcttcagcgtccgtcgccgggagagcctctcctacatccccaaaggactggtaagaaactccatctccaggttcaacagccttccccggccagacccagagccagtacctccagtggggagcaagagacaggtgggctcccggccgacttcgtgggccctgtttgagctcccaggaccaagccaggcagtcaaaggggacccacctcccatctcagatgctgagttccgcccatcttcagaaattgtgaagatctgggagggaatggagtcttccggagggagccctgggaaggggccaggccagggccaggccaatggctttgacctgcatgagccactcttcatcctggaggagcatgagctgggagccatcacagaggagtcggccactgcctccccggaaagctcctctcccactgaggggcgcagcccggcccacctggcccgggagctgaaagagctggtgaaggagctgagcagcagtacccagggggagctggtggccccactgcacccccgcatcgtgcagctctcccacgtaatggacagccacgtgagcgagcgcgtcaagaacaaggtctaccagctggcccgccagtacagcctccggatcaagagcaacaagccagtgatggccaggccaccactgcagtgggaaaaggtggcccctgagagggatgggaagagccccactgtgccctgtctacaggaagaggctggagagccattaggtggcaaaggtaagaggaagccggtgctgtctctatttgactatgagcagctgatggcccaggagcacagccctcccaagccctcctcggctggggagatgtcaccacagcgtttcttcttcaacccgtctgctgtcagccagaggaccacctcgcctgggggccggccctccgcccggagccccctcagccccacagagaccttcagctggcccgacgtccgtgagctctgctccaagtatgcctcccgcgatgaggcacgccgagcagggggcggccggccccgcggcccacccgtcaacaggagccactcggtgccggagaacatggtagagccacctctgtcgggcagggtgggccgctgccgcagcctgagcaccaagaggggccggggaggcggagaggctgcccaatcccctgggcctctgccccagagcaagccggatggaggcgagaccctgtatgtcactgcagacctcaccctggaggacaaccggcgggtgattgtcatggagaagggaccccttcccagccccactgcagggctggaggagagcagtggccagggaccaagctcaccggtggccctgctggggcaggttcaggacttccagcagtctgcagagtgccagccgaaggaagagggttccagggacccggcagacccgagccagcagggcagagtgagaaaccttagagagaagttccaggccttgaactctgtcggttgatgctgactcctgggggagggaggagtcatgttggaggttggggaagaacctgggcatccttcccctcaagcctgggctcatggagcccctgcccagggccctcaggtgggcggaaagtccatcccctccgcccttcaggaaggatgctcccgtgtgcaggggtctcctgcctgtgccatccactggggctcgagacaatttcccactcacctgtgaggccggtgtggctgcttcccttgtaaatagttgttctctggtaagaagccaaatatttaagctcacttcttcccagagagaggaagctctgctcaggcctccagcgttggctggccatggccacagccagatggaggagcccatccccaggagactcaggcagtggcctggagaggctttgttctgtaacggtgccttttcttagggtccaggcaggaatgaagccaataatttattgctttcca

SEQ ID NO: 459573 - DNA, 312 bp, Homo sapiens
tgcacaggcatttttctagtccccactgctccagtggagtctaagagtccagtaggagcacaaaatggacaaagtcacaaaggctttgaacgctcctgccatcctcctctctccttataatgtttctgagcaatgagtaaattaatttccctgggatgtgtctgtgcactcctgtggtgccacgaagacctgcacttcaccactgcccttgcatagagttaactgagtttattttattttatcttaatttattttgggacagagtctctctcttgtcacccaggctggagtacaatggcatgatctcggctc

SEQ ID NO: 459574 - DNA, 304 bp, Homo sapiens
aataattgagctactactatataaaaagcactgaatttggtactatgagtgattccaaaaagacttttgcctctgacactaccaaaaccactccagataaaattccaaatgacctaaaattgctaaatccaatttttatttttcagttctcctcttgacctatcggtagcatctgacgtaagtaaaacactcttccttgaaatattttccttctttcttttttttctttttctttttttttttgagacagagtctggctctgttgcccaggctggagtgcagtggcacgatctcgcctcactgc

SEQ ID NO: 459575 - DNA, 10508 bp, Homo sapiens
  misc_feature (7700)..(7700): n is a, c, g, or t
aagcgcgggggagggagtgtaaatagagcgaaggctgctctgtgtcagccccgtcaccgccgggcggcccgcgcggagtctgagggagatggaagttgagcaagagcagcggcgcagaaaggtggaggccgggaggacgaagcttgctcacttccgacagagaaaaacaaaaggtgacagttcgcattcggagaaaaagacggcgaagaggaagggctcggctgtcgatgcgtctgtccaggaggagagtccggtaaccaaggaggacagcgcactctgtggaggaggggacatttgcaaaagcacatcatgtgacgacacccctgatggggcaggaggggcctttgcagctcagccggaggactgtgatggagagaagagagaggacttggaacagctgcagcagaagcaagtcaatgaccatcctccagagcagtgtgggatgttcacagtcagtgaccacccaccagaacagcatgggatgttcacagtcggtgaccacccaccagaacagcgtgggatgttcacagtcagtgaccacccaccagaacagcatgggatgttcacagtcagtgaccacccaccagaacagcgtgggatgttcacaatcagtgaccaccaaccggaacagcgtgggatgttcacagtcagtgaccacacaccagaacagcgtgggatcttcacaatcagtgaccacccagcagaacagcgtgggatgttcacaaaggagtgtgaacaagaatgtgaacttgccattactgacctggagagcggccgtgaagatgaggctggcctgcatcagagtcaggccgtgcatggccttgagctggaggcgctgcgcctgagtctgagcaacatgcacacggcgcagctggagctgacacaggccaacctccagaaggagaaggagacggcattgacggagctgcgggagatgctcaacagccggcgtgcccaggagctggccctgctacagagcaggcagcagcacgagctggagctcctcagggagcagcacgcacgggagaaggaggaggtggtgctcaggtgtggacaggaagcagctgagctgaaggagaagttacaatcagaaatggagaaaaacgcccagatagtaaagaccctgaaggaagattgggaatctgaaaaagatttatgtttagaaaatctacgcaaagaactgtctgcaaagcatcaatcagaaatggaggatttacaaaaccagtttcagaaagaattggcagaacagagagctgagttggagaagatttttcaagacaaaaaccaggctgaacgggcccttaggaacctggagagtcatcatcaagcagccattgagaagttacgtgaagacctgcagtccgagcacggccggtgtttagaagacttggagttcaagttcaaagagagcgagaaagaaaaacagctggagttagagaatcttcaagcatcatatgaagacctgaaggcacaatcacaagaagagatcaggcgcttgtggtcccagcttgattctgccaggaccagtagacaggaattgagtgagctacatgagcaactcctggcgcgcacctctcgtgtggaagatttagaacagctgaagcagcgagaaaaaacccagcatgagtccgaactggagcaactgaggatttattttgaaaagaagttaagggatgctgagaaaacttaccaagaagacctaaccctgttacagcagaggctgcagggggcgagggaagatgctcttctggactctgtggaagttgggttgtcctgtgtgggtttagaagagaaacctgagaaaggaagaaaagatcacgttgatgaactcgagcctgagcgacataaggagagcctgccacgcttccaggcggagttagaagaaagccacaggcaccagctggaagcgctggagtctcccctctgcatccagcacgaggggcatgtctcagacagatgctgcgtagagacttcagcattgggacacgagtggcgtctggaaccctctgaagggcacagccaagagcttccctgggtgcatctccagggtgtgcaggacggggacttggaggccgacacagagcgggcagccagagtcttgggtctggaaactgagcacaaggtgcaactttcgcttcttcagactgagctcaaagaagaaattgaactcctaaaaatagaaaatagaaatttgtttgagaagttgcagcatgaaactcgtctgaaggacgatttggagaaggtaaaacacaatctaattgaagaccaccagaaggaactaaataatgctaagcaaaagactgagctgatgaaacaggaattccaaagaaaagaaacggactggaaagttatgaaggaggagctacagcgggaagctgaggagaagttaacattgatgctacttgaactgagagaaaaggctgaatccgagaaacagaccatcataaacaagttggagcttcgagaagctgaaatgaggcagcttcaggaccaacaggcagcgcagatcctggatctggagaggtccttgacggagcagcaggcccgcctgcagcagctggaacaggacctcacttcagacgacgccctgcattgcagccagtgtgggcgggagccgcccacagcccaggacggggagcttgccgcgctccacgtgaaggaagactgcgccctgcagctgatgctggcccggagcaggtttttagaggaacgtaaagagatcgccgagaaattcagtgcggaacaagatgccttcctgcagctcctccaggagagacaccagcagcagctcctgtcagtgacggcggagctcgaggccagacaccaggccgcgttgggcgagctgacagcctccttagagagcaagcagggggctctgctggctgcacgtgtggccgaactgcagaccaaacacgctgccgacctcggcgctctggagaccagacatctgtccagccttgattctttggaatcctgttacctgtctgaatttcagaccatccgtgaggagcacaggcaggccctagagctcttacgagcagactttgaggaacaactgtggaaaaaggactctcttcaccaaacgattttgactcaagagttggagaaactgaagcggaaacacgaaggggagctacagtctgtgcgggaccacctgcgaaccgaagcgagcacagagctcgccggaaccgtggctcacgagctgcagggagtgcaccagggtgaatttggaagtgaaaagaaaactgctttgcatgaaaaagaggagacacttcggcttcagagtgcacaggcacagccttttcaccaagaggagaaagagtctttgtctctgcagcttcaaaagaagaatcaccaagtccagcagctgaaagaccaggttttatccttaagtcacgagatagaagagtgccgctccgagttggaggtgctgcagcagaggcgggagcgggagaaccgggaaggcgcaaacctcctctccatgctcaaggccgacgtcaacctgtcccacagcgaaagaggggccctccaggacgccctgcgcaggctgctgggtttgtttggagagacgctgagggcagccgtcaccctgaggagccggatcggggagcgcgtggggctctgcctggatgacgcgggcgcaggcctggccctgtcgacagctccggcgctggaggagacatggtctgatgtggccctcccggagttggacagaactttgtctgaatgtgcagagatgtcttccgtggctgaaattagcagccacatgcgtgaaagctttctcatgagcccagaaagtgtgcgggagtgtgagcagcccatccggagggtcttccagagcctcagcctggccgtggacggcctcatggagatggccctggactccagcaggcagctggaagaagcacgccaacttcattctcgttttgaaaaagaatttagttttaagaatgaggagacagcacaggttgtcaggaagcaccaggagctgctggagtgtttgacggaggagagcgcagcaaaggcagagctggcgctggagctgcacaagactcagggtacccttgagggattcaaggtggagacagcagatctgaaggaggtgctggccgggaaggaggattccgagcaccgtctggtgctggagctggagagcctgagacggcagctgcagcaggcggcccaggagcaggcggcgctgagggaggagtgcacccgtctgtggagtcggggggaggccacagccacggacgccgaggccagagaagctgctctccggaaggaagtggaggatctgaccaaagaacagtcggagaccaggaagcaggctgagaaggaccgctcagccctgctctcccagatgaagattttggagtctgagttagaagaacagctgtctcagcatcgcgggtgtgccaagcaggcggaggccgtcactgccctggaacagcaggtggcatctctggacaagcatttgcgcaaccagcggcaattcatggatgagcaggcagccgagcgggagcacgagcgcgaggagttccagcaggagattcagaggctggaggggcagctccgccaggcggccaagccgcagccctggggccctcgcgacagccagcaggcgccgctggatggagaggttgagttgttacaacaaaagttgagagaaaagttggatgaatttaatgaattggctatacagaaagagtcggcagatagacaagtgttaatgcaggaagaagaaattaaacgtctggaggagatgaacatcaacatcaggaaaaaagtggcccagctccaggaagaagtggaaaaacagaaaaacatcgtgaaagggctggaacaggataaagaggtgttaaagaaacagcagatgagtagcttgcttctggcgtccacgttgcagtctacactagatgcaggcagatgtcccgagcctccttcgggcagccctcctgagggtccagaaatacagttagaggtgacacagagagcactcctgcggcgcgagagcgaggttttggacttaaaagaacagctagaaaagatgaaaggtgacttagaaagtaaaaatgaagaaatactacatctgaacttaaaattggacatgcagaacagccagactgctgtcagcctcagagaacttgaggaagagaacacgagcttgaaggtcatatataccagaagttctgagattgaagagctgaaagccactattgaaaatctgcaagagaatcagaaacgattacaaaaggagaaagcagaggaaattgaacaactccatgaagtcattgagaagctgcagcacgagctgtccctcatggggcctgtggtgcacgaagtcagcgacagtcaggctggcagtctgcagagcgagctgctctgctcccaggccgggggccctcgtgggcaggccctacagggcgagctcgaggctgcgctggaagccaaggaggccctgagccggctgctggctgaccaggagcgcaggcacagccaggccctggaggccctgcagcagcgcctccagggcgcagaggaggctgcggagctacagctggctgagctggagcgcaatgtagccctcagggaggctgaggtcgaagacatggcctcccggatccaggagttcgaagcggccctgaaagcaaaggaagcgacgattgccgagagaaatttagaaatcgacgctctgaaccagcggaaggcggcccactctgccgagctggaggccgtcctgttggccttggcccgcatccgccgcgccctggagcagcagcccctggcagccggggcggcgcctcccgagctgcagtggctccgagcgcagtgtgcccgcctcagccgccagctgcaggtgctgcaccagcggttcctgaggtgccaggtggagctggacaggcggcaggcccgcagagccacagctcacacacgggtgcccggggcccacccacagcctcgcatggatggtggcgccaaggcccaggtcaccggcgacgtggaggcctcccatgatgctgctttggagccggttgtccctgacccacagggtgatctgcagcctgtcctggtgacgttgaaggatgcacctctctgcaagcaagaaggcgtgatgtcagtgctcaccgtctgccagaggcagctgcagtcggagctgctcttggtgaaaaatgaaatgcgcctgagtctggaggacggcggcaagggtaaagaaaaagtactggaagattgtcagctgccgaaggtcgatctcgtagctcaggtgaaacagcttcaggaaaaactgaaccgtttgctgtattccatgaccttccagaatgtggatgctgccgacaccaaatctctgtggcccatggcctcagcacacctgttggagagcagctggagtgatgattcctgtgacggagaagagcctgacatatcaccccacatagacacatgtgatgccaatacagccacggggggtgtaactgatgttatcaaaaatcaggccatagacgcgtgtgatgccaatacaaccccagggggtgtaactgatgttatcaaaaattgggattccttgataccagatgaaatgccagattctcccattcaagaaaaatcagaatgtcaggacatgtctctttcttcaccgaccagcgtacttggtggctcccgccaccagagccacactgcagaggctgggccccggaagagcccggtcgggatgctggacctgtcttcctggagctcccctgaggtcctcaggaaggactggaccctggagccctggcccagcctccccgtgacaccccactcaggagccctgagcctgtgcagtgccgacacatccctgggggacagggcggacacctcgctgccacagacccaggggccggggctgctttgttccccaggcgtgtctgcagcagcgctggcactgcagtgggccgagtctccgccggctgacgaccaccatgtgcagaggacggctgtggagaaagatgtcgaagattttatcacaacatcctttgattctcaagaaacattaagttcacctcctcctggattagaaggaaaagctgatagaagtgagaaaagtgacggctcgggttttggagcaagactgagcccggggtcaggaggccctgaggctcaaactgctggtcctgtgacccctgcttccatctctggaaggtttcagccgctgccggaagccatgaaggagaaggaagtgcgtccgaagcacgtgaaggctttactgcagatggtgcgtgacgagagccaccagatcctggcgctgtcagaaggccttgcacccccaagcggcgagccacacccaccccggaaggaagacgagatacaggacatctcgctccatgggggaaagacgcaggaagtgcccaccgcgtgccccgattggagaggggaccttctgcaggttgtgcaagaggcctttgaaaaagagcaggagatgcagggggttgagctgcagccccgactcagtggctcagatctggggggtcacagctccctgctcgaaaggctggagaagatcatccgtgagcagggagacctgcaggaaaagtccctggagcatcttcgcttgccggaccggagcagcctgctgtccgagatccaggcgctgcgtgcccagctgcgcatgacgcacctgcagaaccaggagaagctgcagcacttgcgcacggcgctgacaagcncagaggcgcgcgggagccagcaggagcaccagctgcgcaggcaggttgaactgctggcttataaagtagagcaggagaagtgcattgctggtgacttgcagaagacgctgagtgaagagcaagagaaggcaaacagcgtgcagaagctcctggcggcggagcagactgtagtgcgagatttgaagtccgacctctgtgagagcaggcagaagagcgaacagctgtcccggtccctctgcgaggtgcagcaggaggtcctccagctgagatccatgctgagcagtaaggagaacgagctgaaggccgcgcttcaggagctggagagtgagcaggggaaggggcgtgccctgcagagccagctggaggaggagcagctgcggcacctgcagagggagagccagagtgccaaggccctggaggagctgcgggcgtctttggagacacagcgtgctcagagcagtcgactctgcgtggcactgaaacacgagcagacggccaaggacaacctgcagaaggagctgcgtatcgagcactcacgctgcgaggccttgctggctcaggagcggagccagctctctgagctccagaaggaccttgcggctgagaagagccgcaccctggagctgtcagaggccttgcggcacgagcggctcctgaccgagcagctgagccagaggacacaggaggcttgcgtgcaccaggacacacaggcccatcacgctctgctgcagaagctgaaggaggagaagtcccgggtggtggacttgcaagcgatgcttgaaaaggtgcagcagcaagccctgcattctcagcagcagcttgaggctgaggctcagaagcactgtgaggcgctcaggagagagaaggaggtaagtgccacactgaagtcgacggtggaagccctgcacacccaaaaacgagagctgagatgctctctggagagagagagggagaaaccagcgtggttgcaggcagaattagagcagtcacacccacggttgaaagagcaagaaggacgcaaggctgcgaggaggagcgcggaggccaggcagagcccagcggctgcggagcagtggaggaagtggcagagagacaaggagaagctgcgagaattagaactgcagcgtcagcgtgacttgcataagatcaagcagcttcagcagacggtgagagacctggagtcgaaggacgaggtgcctggcagccgcctccacctaggttctgcccgcagggctgccggctcggatgcggaccacctccgggaacagcagcgagagctggaggcgatgaggcagcggctgctctctgccgcccggcttctcaccagcttcaccagccaggccgtggacaggacagttaatgattggacgtcatccaatgagaaagcagtgatgtctttactgcacacgttggaggagctgaagtctgacttgagcaggcccacctcctcccagaaaaaaatggcagcagagctgcagttccagtttgtggacgtcctgctgaaagacaatgtttccctcacaaaagcgctcagcacggtgacccaggagaagctggagctgagcagagccgtgtctaagcttgagaagttgctgaagcaccatctgcagaagggctgcagcccaagcaggtcggaaaggtctgcttggaagccagacgaaacggctccacagagttccctgaggcgcccagaccccggccggcttccaccagctgccagcgaggaagcacacaccagcaatgtcaagatggaaaaattgtacctgcattacttgagagcagagagctttagaaaagctctgatttatcaaaagaagtatcttttgctgttgattggtggattccaggattctgaacaagaaacactctccatgattgcccatttgggggtatttccttccaaagcagaacggaaaatcacatctcgtcctttcaccaggttccgcacggccgtcagggtggtcattgcaatattaagattacgttttttggttaagaaatggcaagaagtagatcggaaaggagctctggcacaaggcaaagcccctcgcccagggccccgagcacgacagccgcagtctccacccagaaccagagagtcccccccaacccgggatgtaccctctggccacaccagggaccctgccagaggccgcagactggcagcagcagcctccccacacagtgggggaagagccactccatccccaaattcaagattagaaagatccctgactgcttctcaagatccagaacattccttgacagagtatattcaccatttagaagtgatccagcaaagattgggaggggtactaccagattctacttcaaagaaatcctgccacccgatgattaaacagtgaataaaatgtcatggctctttcctgcgacaattctatttgaggaaaagatttgtttttcccttttcccaaggaagctcgtgggacagcatgggcactactcttcatgtgcggtgacaccagcccccagatgccttgaattaagtgtcctcacctttatgcatgactgcaaagccagctggagcattttctatggagcctccgtatgttttaggcccatgaccttcgtgaggtgacgggcactcactcccatgagccctggctgtgtgctgttgtgtgcctatcggcagatccatccttcctgcctccaaggaggatacacagagaatggcttcctgttgttttgtttattttcttaacgtgtacagatggaaacttcatttaaaaataaaaacaaaacaactcaaaaaggaataaaatttaatcactgttttgtttgtgaata

SEQ ID NO: 459576 - DNA, 10253 bp, Homo sapiens
  misc_feature (7682)..(7682): n is a, c, g, or t
aagcgcgggggagggagtgtaaatagagcgaaggctgctctgtgtcagccccgtcaccgccgggcggcccgcgcggagtctgagggagatggaagttgagcaagagcagcggcgcagaaaggtggaggccgggaggacgaagcttgctcacttccgacagagaaaaacaaaaggtgacagttcgcattcggagaaaaagacggcgaagaggaagggctcggctgtcgatgcgtctgtccaggaggagagtccggtaaccaaggaggacagcgcactctgtggaggaggggacatttgcaaaagcacatcatgtgacgacacccctgatggggcaggaggggcctttgcagctcagccggaggactgtgatggagagaagagagaggacttggaacagctgcagcagaagcaagtcaatgaccatcctccagagcagtgtgggatgttcacagtcagtgaccacccaccagaacagcatgggatgttcacagtcggtgaccacccaccagaacagcgtgggatgttcacaagtcagtgaccacccaccagaacagcgtgggatgttcacaatcagtgaccaccaaccggaacagcgtgggatgttcacagtcagtgaccacacaccagaacagcgtgggatcttcacaatcagtgaccacccagcagaacagcgtgggatgttcacaaaggagtgtgaacaagaatgtgaacttgccattactgacctggagagcggccgtgaagatgaggctggcctgcatcagagtcagaggccttttctccgccgcaggccgtgcatggccttgagctggaggcgctgcgcctgagtctgagcaacatgcacacggcgcagctggagctgacacaggccaacctccagaaggagaaggagacggcattgacggagctgcgggagatgctcaacagccggcgtgcccaggagctggccctgctacagagcaggcagcagcacgagctggagctcctcagggagcagcacgcacgggagaaggaggaggtggtgctcaggtgtggacaggaagcagctgagctgaaggagaagttacaatcagaaatggagaaaaacgcccagatagtaaagaccctgaaggaagattgggaatctgaaaaagatttatgtttagaaaatctacgcaaagaactgtctgcaaagcatcaatcagaaatggaggatttacaaaaccagtttcagaaagaattggcagaacagagagctgagttggagaagatttttcaagacaaaaaccaggctgaacgggcccttaggaacctggagagtcatcatcaagcagccattgagaagttacgtgaagacctgcagtccgagcacggccggtgtttagaagacttggagttcaagttcaaagagagcgagaaagaaaaacagctggagttagagaatcttcaagcatcatatgaagacctgaaggcacaatcacaagaagagatcaggcgcttgtggtcccagcttgattctgccaggaccagtagacaggaattgagtgagctacatgagcaactcctggcgcgcacctctcgtgtggaagatttagaacagctgaagcagcgagaaaaaacccagcatgagtccgaactggagcaactgaggatttattttgaaaagaagttaagggatgctgagaaaacttaccaagaagacctaaccctgttacagcagaggctgcagggggcgagggaagatgctcttctggactctgtggaagttgggttgtcctgtgtgggtttagaagagaaacctgagaaaggaagaaaagatcacgttgatgaactcgagcctgagcgacataaggagagcctgccacgcttccaggcggagttagaagaaagccacaggcaccagctggaagcgctggagtctcccctctgcatccagcacgaggggcatgtctcagacagatgctgcgtagagacttcagcattgggacacgagtggcgtctggaaccctctgaagggcacagccaagagcttccctgggtgcatctccagggtgtgcaggacggggacttggaggccgacacagagcgggcagccagagtcttgggtctggaaactgagcacaaggtgcaactttcgcttcttcagactgagctcaaagaagaaattgaactcctaaaaatagaaaatagaaatttgtttgagaagttgcagcatgaaactcgtctgaaggacgatttggagaaggtaaaacacaatctaattgaagaccaccagaaggaactaaataatgctaagcaaaagactgagctgatgaaacaggaattccaaagaaaagaaacggactggaaagttatgaaggaggagctacagcgggaagctgaggagaagttaacattgatgctacttgaactgagagaaaaggctgaatccgagaaacagaccatcataaacaagttggagcttcgagaagctgaaatgaggcagcttcaggaccaacaggcagcgcagatcctggatctggagaggtccttgacggagcagcaggcccgcctgcagcagctggaacaggacctcacttcagacgacgccctgcattgcagccagtgtgggcgggagccgcccacagcccaggacggggagcttgccgcgctccacgtgaaggaagactgcgccctgcagctgatgctggcccggagcaggtttttagaggaacgtaaagagatcgccgagaaattcagtgcggaacaagatgccttcctgcagctcctccaggagagacaccagcagcagctcctgtcagtgacggcggagctcgaggccagacaccaggccgcgttgggcgagctgacagcctccttagagagcaagcagggggctctgctggctgcacgtgtggccgaactgcagaccaaacacgctgccgacctcggcgctctggagaccagacatctgtccagccttgattctttggaatcctgttacctgtctgaatttcagaccatccgtgaggagcacaggcaggccctagagctcttacgagcagactttgaggaacaactgtggaaaaaggactctcttcaccaaacgattttgactcaagagttggagaaactgaagcggaaacacgaaggggagctacagtctgtgcgggaccacctgcgaaccgaagcgagcacagagctcgccggaaccgtggctcacgagctgcagggagtgcaccagggtgaatttggaagtgaaaagaaaactgctttgcatgaaaaagaggagacacttcggcttcagagtgcacaggcacagccttttcaccaagaggagaaagagtctttgtctctgcagcttcaaaagaagaatcaccaagtccagcagctgaaagaccaggttttatccttaagtcacgagatagaagagtgccgctccgagttggaggtgctgcagcagaggcgggagcgggagaaccgggaaggcgcaaacctcctctccatgctcaaggccgacgtcaacctgtcccacagcgaaagaggggccctccaggacgccctgcgcaggctgctgggtttgtttggagagacgctgagggcagccgtcaccctgaggagccggatcggggagcgcgtggggctctgcctggatgacgcgggcgcaggcctggccctgtcgacagctccggcgctggaggagacatggtctgatgtggccctcccggagttggacagaactttgtctgaatgtgcagagatgtcttccgtggctgaaattagcagccacatgcgtgaaagctttctcatgagcccagaaagtgtgcgggagtgtgagcagcccatccggagggtcttccagagcctcagcctggccgtggacggcctcatggagatggccctggactccagcaggcagctggaagaagcacgccaacttcattctcgttttgaaaaagaatttagttttaagaatgaggagacagcacaggttgtcaggaagcaccaggagctgctggagtgtttgacggaggagagcgcagcaaaggcagagctggcgctggagctgcacaagactcagggtacccttgagggattcaaggtggagacagcagatctgaaggaggtgctggccgggaaggaggattccgagcaccgtctggtgctggagctggagagcctgagacggcagctgcagcaggcggcccaggagcaggcggcgctgagggaggagtgcacccgtctgtggagtcggggggaggccacagccacggacgccgaggccagagaagctgctctccggaaggaagtggaggatctgaccaaagaacagtcggagaccaggaagcaggctgagaaggaccgctcagccctgctctcccagatgaagattttggagtctgagttagaagaacagctgtctcagcatcgcgggtgtgccaagcaggcggaggccgtcactgccctggaacagcaggtggcatctctggacaagcatttgcgcaaccagcggcaattcatggatgagcaggcagccgagcgggagcacgagcgcgaggagttccagcaggagattcagaggctggaggggcagctccgccaggcggccaagccgcagccctggggccctcgcgacagccagcaggcgccgctggatggagaggttgagttgttacaacaaaagttgagagaaaagttggatgaatttaatgaattggctatacagaaagagtcggcagatagacaagtgttaatgcaggaagaagaaattaaacgtctggaggagatgaacatcaacatcaggaaaaaagtggcccagctccaggaagaagtggaaaaacagaaaaacatcgtgaaagggctggaacaggataaagaggtgttaaagaaacagcagatgagtagcttgcttctggcgtccacgttgcagtctacactagatgcaggcagatgtcccgagcctccttcgggcagccctcctgagggtccagaaatacagttagaggtgacacagagagcactcctgcggcgcgagagcgaggttttggacttaaaagaacagctagaaaagatgaaaggtgacttagaaagtaaaaatgaagaaatactacatctgaacttaaaattggacatgcagaacagccagactgctgtcagcctcagagaacttgaggaagagaacacgagcttgaaggtcatatataccagaagttctgagattgaagagctgaaagccactattgaaaatctgcaagagaatcagaaacgattacaaaaggagaaagcagaggaaattgaacaactccatgaagtcattgagaagctgcagcacgagctgtccctcatggggcctgtggtgcacgaagtcagcgacagtcaggctggcagtctgcagagcgagctgctctgctcccaggccgggggccctcgtgggcaggccctacagggcgagctcgaggctgcgctggaagccaaggaggccctgagccggctgctggctgaccaggagcgcaggcacagccaggccctggaggccctgcagcagcgcctccagggcgcagaggaggctgcggagctacagctggctgagctggagcgcaatgtagccctcagggaggctgaggtcgaagacatggcctcccggatccaggagttcgaagcggccctgaaagcaaaggaagcgacgattgccgagagaaatttagaaatcgacgctctgaaccagcggaaggcggcccactctgccgagctggaggccgtcctgttggccttggcccgcatccgccgcgccctggagcagcagcccctggcagccggggcggcgcctcccgagctgcagtggctccgagcgcagtgtgcccgcctcagccgccagctgcaggtgctgcaccagcggttcctgaggtgccaggtggagctggacaggcggcaggcccgcagagccacagctcacacacgggtgcccggggcccacccacagcctcgcatggatggtggcgccaaggcccaggtcaccggcgacgtggaggcctcccatgatgctgctttggagccggttgtccctgacccacagggtgatctgcagcctgtcctggtgacgttgaaggatgcacctctctgcaagcaagaaggcgtgatgtcagtgctcaccgtctgccagaggcagctgcagtcggagctgctcttggtgaaaaatgaaatgcgcctgagtctggaggacggcggcaagggtaaagaaaaagtactggaagattgtcagctgccgaaggtcgatctcgtagctcaggtgaaacagcttcaggaaaaactgaaccgtttgctgtattccatgaccttccagaatgtggatgctgccgacaccaaatctctgtggcccatggcctcagcacacctgttggagagcagctggagtgatgattcctgtgacggagaagagcctgacatatcaccccacatagacacatgtgatgccaatacagccacggggggtgtaactgatgttatcaaaaatcaggccatagacgcgtgtgatgccaatacaaccccagggggtgtaactgatgttatcaaaaattgggattccttgataccagatgaaatgccagattctcccattcaagaaaaatcagaatgtcaggacatgtctctttcttcaccgaccagcgtacttggtggctcccgccaccagagccacactgcagaggctgggccccggaagagcccggtcgggatgctggacctgtcttcctggagctcccctgaggtcctcaggaaggactggaccctggagccctggcccagcctccccgtgacaccccactcaggagccctgagcctgtgcagtgccgacacatccctgggggacagggcggacacctcgctgccacagacccaggggccggggctgctttgttccccaggcgtgtctgcagcagcgctggcactgcagtgggccgagtctccgccggctgacgaccaccatgtgcagaggacggctgtggagaaagatgtcgaagattttatcacaacatcctttgattctcaagaaacattaagttcacctcctcctggattagaaggaaaagctgatagaagtgagaaaagtgacggctcgggttttggagcaagactgagcccggggtcaggaggccctgaggctcaaactgctggtcctgtgacccctgcttccatctctggaaggtttcagccgctgccggaagccatgaaggagaaggaagtgcgtccgaagcacgtgaaggctttactgcagatggtgcgtgacgagagccaccagatcctggcgctgtcagaaggccttgcacccccaagcggcgagccacacccaccccggaaggaagacgagatacaggacatctcgctccatgggggaaagacgcaggaagtgcccaccgcgtgccccgattggagaggggaccttctgcaggttgtgcaagaggcctttgaaaaagagcaggagatgcagggggttgagctgcagccccgactcagtggctcagatctggggggtcacagctccctgctcgaaaggctggagaagatcatccgtgagcagggagacctgcaggaaaagtccctggagcatcttcgcttgccggaccggagcagcctgctgtccgagatccaggcgctgcgtgcccagctgcgcatgacgcacctgcagaaccaggagaagctgcagcacttgcgcacggcgctgacaagcncagaggcgcgcgggagccagcaggagcaccagctgcgcaggcaggttgaactgctggcttataaagtagagcaggagaagtgcattgctggtgacttgcagaagacgctgagtgaagagcaagagaaggcaaacagcgtgcagaagctcctggcggcggagcagactgtagtgcgagatttgaagtccgacctctgtgagagcaggcagaagagcgaacagctgtcccggtccctctgcgaggtgcagcaggaggtcctccagctgagatccatgctgagcagtaaggagaacgagctgaaggccgcgcttcaggagctggagagtgagcaggggaaggggcgtgccctgcagagccagctggaggaggagcagctgcggcacctgcagagggagagccagagtgccaaggccctggaggagctgcgggcgtctttggagacacagcgtgctcagagcagtcgactctgcgtggcactgaaacacgagcagacggccaaggacaacctgcagaaggagctgcgtatcgagcactcacgctgcgaggccttgctggctcaggagcggagccagctctctgagctccagaaggaccttgcggctgagaagagccgcaccctggagctgtcagaggccttgcggcacgagcggctcctgaccgagcagctgagccagaggacacaggaggcttgcgtgcaccaggacacacaggcccatcacgctctgctgcagaagctgaaggaggagaagtcccgggtggtggacttgcaagcgatgcttgaaaaggtgcagcagcaagccctgcattctcagcagcagcttgaggctgaggctcagaagcactgtgaggcgctcaggagagagaaggagcgagaattagaactgcagcgtcagcgtgacttgcataagatcaagcagcttcagcagacggtgagagacctggagtcgaaggacgaggtgcctggcagccgcctccacctaggttctgcccgcagggctgccggctcggatgcggaccacctccgggaacagcagcgagagctggaggcgatgaggcagcggctgctctctgccgcccggcttctcaccagcttcaccagccaggccgtggacaggacagttaatgattggacgtcatccaatgagaaagcagtgatgtctttactgcacacgttggaggagctgaagtctgacttgagcaggcccacctcctcccagaaaaaaatggcagcagagctgcagttccagtttgtggacgtcctgctgaaagacaatgtttccctcacaaaagcgctcagcacggtgacccaggagaagctggagctgagcagagccgtgtctaagcttgagaagttgctgaagcaccatctgcagaagggctgcagcccaagcaggtcggaaaggtctgcttggaagccagacgaaacggctccacagagttccctgaggcgcccagaccccggccggcttccaccagctgccagcgaggaagcacacaccagcaatgtcaagatggaaaaattgtacctgcattacttgagagcagagagctttagaaaagctctgatttatcaaaagaagtatcttttgctgttgattggtggattccaggattctgaacaagaaacactctccatgattgcccatttgggggtatttccttccaaagcagaacggaaaatcacatctcgtcctttcaccaggttccgcacggccgtcagggtggtcattgcaatattaagattacgttttttggttaagaaatggcaagaagtagatcggaaaggagctctggcacaaggcaaagcccctcgcccagggccccgagcacgacagccgcagtctccacccagaaccagagagtcccccccaacccgggatgtaccctctggccacaccagggaccctgccagaggccgcagactggcagcagcagcctccccacacagtgggggaagagccactccatccccaaattcaagattagaaagatccctgactgcttctcaagatccagaacattccttgacagagtatattcaccatttagaagtgatccagcaaagattgggaggggtactaccagattctacttcaaagaaatcctgccacccgatgattaaacagtgaataaaatgtcatggctctttcctgcgacaattctatttgaggaaaagatttgtttttcccttttcccaaggaagctcgtgggacagcatgggcactactcttcatgtgcggtgacaccagcccccagatgccttgaattaagtgtcctcacctttatgcatgactgcaaagccagctggagcattttctatggagcctccgtatgttttaggcccatgaccttcgtgaggtgacgggcactcactcccatgagccctggctgtgtgctgttgtgtgcctatcggcagatccatccttcctgcctccaaggaggatacacagagaatggcttcctgttgttttgtttattttcttaacgtgtacagatggaaacttcatttaaaaataaaaacaaaacaactcaaaaaggaataaaatttaatcactgttttgtttgtgaata

SEQ ID NO: 459577 - DNA, 9240 bp, Homo sapiens
  misc_feature (6669)..(6669): n is a, c, g, or t
gagggtgactgtgtggattaggccttgcgtgcagaggctcgtctgtttcggggtgggtggtccttgtgcagaggctggtctgtttcaggaccctgaaggaagattgggaatctgaaaaagatttatgtttagaaaatctacgcaaagaactgtctgcaaagcatcaatcagaaatggaggatttacaaaaccagtttcagaaagaattggcagaacagagagctgagttggagaagatttttcaagacaaaaaccaggctgaacgggcccttaggaacctggagagtcatcatcaagcagccattgagaagttacgtgaagacctgcagtccgagcacggccggtgtttagaagacttggagttcaagttcaaagagagcgagaaagaaaaacagctggagttagagaatcttcaagcatcatatgaagacctgaaggcacaatcacaagaagagatcaggcgcttgtggtcccagcttgattctgccaggaccagtagacaggaattgagtgagctacatgagcaactcctggcgcgcacctctcgtgtggaagatttagaacagctgaagcagcgagaaaaaacccagcatgagtccgaactggagcaactgaggatttattttgaaaagaagttaagggatgctgagaaaacttaccaagaagacctaaccctgttacagcagaggctgcagggggcgagggaagatgctcttctggactctgtggaagttgggttgtcctgtgtgggtttagaagagaaacctgagaaaggaagaaaagatcacgttgatgaactcgagcctgagcgacataaggagagcctgccacgcttccaggcggagttagaagaaagccacaggcaccagctggaagcgctggagtctcccctctgcatccagcacgaggggcatgtctcagacagatgctgcgtagagacttcagcattgggacacgagtggcgtctggaaccctctgaagggcacagccaagagcttccctgggtgcatctccagggtgtgcaggacggggacttggaggccgacacagagcgggcagccagagtcttgggtctggaaactgagcacaaggtgcaactttcgcttcttcagactgagctcaaagaagaaattgaactcctaaaaatagaaaatagaaatttgtttgagaagttgcagcatgaaactcgtctgaaggacgatttggagaaggtaaaacacaatctaattgaagaccaccagaaggaactaaataatgctaagcaaaagactgagctgatgaaacaggaattccaaagaaaagaaacggactggaaagttatgaaggaggagctacagcgggaagctgaggagaagttaacattgatgctacttgaactgagagaaaaggctgaatccgagaaacagaccatcataaacaagttggagcttcgagaagctgaaatgaggcagcttcaggaccaacaggcagcgcagatcctggatctggagaggtccttgacggagcagcaggcccgcctgcagcagctggaacaggacctcacttcagacgacgccctgcattgcagccagtgtgggcgggagccgcccacagcccaggacggggagcttgccgcgctccacgtgaaggaagactgcgccctgcagctgatgctggcccggagcaggtttttagaggaacgtaaagagatcgccgagaaattcagtgcggaacaagatgccttcctgcagctcctccaggagagacaccagcagcagctcctgtcagtgacggcggagctcgaggccagacaccaggccgcgttgggcgagctgacagcctccttagagagcaagcagggggctctgctggctgcacgtgtggccgaactgcagaccaaacacgctgccgacctcggcgctctggagaccagacatctgtccagccttgattctttggaatcctgttacctgtctgaatttcagaccatccgtgaggagcacaggcaggccctagagctcttacgagcagactttgaggaacaactgtggaaaaaggactctcttcaccaaacgattttgactcaagagttggagaaactgaagcggaaacacgaaggggagctacagtctgtgcgggaccacctgcgaaccgaagcgagcacagagctcgccggaaccgtggctcacgagctgcagggagtgcaccagggtgaatttggaagtgaaaagaaaactgctttgcatgaaaaagaggagacacttcggcttcagagtgcacaggcacagccttttcaccaagaggagaaagagtctttgtctctgcagcttcaaaagaagaatcaccaagtccagcagctgaaagaccaggttttatccttaagtcacgagatagaagagtgccgctccgagttggaggtgctgcagcagaggcgggagcgggagaaccgggaaggcgcaaacctcctctccatgctcaaggccgacgtcaacctgtcccacagcgaaagaggggccctccaggacgccctgcgcaggctgctgggtttgtttggagagacgctgagggcagccgtcaccctgaggagccggatcggggagcgcgtggggctctgcctggatgacgcgggcgcaggcctggccctgtcgacagctccggcgctggaggagacatggtctgatgtggccctcccggagttggacagaactttgtctgaatgtgcagagatgtcttccgtggctgaaattagcagccacatgcgtgaaagctttctcatgagcccagaaagtgtgcgggagtgtgagcagcccatccggagggtcttccagagcctcagcctggccgtggacggcctcatggagatggccctggactccagcaggcagctggaagaagcacgccaacttcattctcgttttgaaaaagaatttagttttaagaatgaggagacagcacaggttgtcaggaagcaccaggagctgctggagtgtttgacggaggagagcgcagcaaaggcagagctggcgctggagctgcacaagactcagggtacccttgagggattcaaggtggagacagcagatctgaaggaggtgctggccgggaaggaggattccgagcaccgtctggtgctggagctggagagcctgagacggcagctgcagcaggcggcccaggagcaggcggcgctgagggaggagtgcacccgtctgtggagtcggggggaggccacagccacggacgccgaggccagagaagctgctctccggaaggaagtggaggatctgaccaaagaacagtcggagaccaggaagcaggctgagaaggaccgctcagccctgctctcccagatgaagattttggagtctgagttagaagaacagctgtctcagcatcgcgggtgtgccaagcaggcggaggccgtcactgccctggaacagcaggtggcatctctggacaagcatttgcgcaaccagcggcaattcatggatgagcaggcagccgagcgggagcacgagcgcgaggagttccagcaggagattcagaggctggaggggcagctccgccaggcggccaagccgcagccctggggccctcgcgacagccagcaggcgccgctggatggagaggttgagttgttacaacaaaagttgagagaaaagttggatgaatttaatgaattggctatacagaaagagtcggcagatagacaagtgttaatgcaggaagaagaaattaaacgtctggaggagatgaacatcaacatcaggaaaaaagtggcccagctccaggaagaagtggaaaaacagaaaaacatcgtgaaagggctggaacaggataaagaggtgttaaagaaacagcagatgagtagcttgcttctggcgtccacgttgcagtctacactagatgcaggcagatgtcccgagcctccttcgggcagccctcctgagggtccagaaatacagttagaggtgacacagagagcactcctgcggcgcgagagcgaggttttggacttaaaagaacagctagaaaagatgaaaggtgacttagaaagtaaaaatgaagaaatactacatctgaacttaaaattggacatgcagaacagccagactgctgtcagcctcagagaacttgaggaagagaacacgagcttgaaggtcatatataccagaagttctgagattgaagagctgaaagccactattgaaaatctgcaagagaatcagaaacgattacaaaaggagaaagcagaggaaattgaacaactccatgaagtcattgagaagctgcagcacgagctgtccctcatggggcctgtggtgcacgaagtcagcgacagtcaggctggcagtctgcagagcgagctgctctgctcccaggccgggggccctcgtgggcaggccctacagggcgagctcgaggctgcgctggaagccaaggaggccctgagccggctgctggctgaccaggagcgcaggcacagccaggccctggaggccctgcagcagcgcctccagggcgcagaggaggctgcggagctacagctggctgagctggagcgcaatgtagccctcagggaggctgaggtcgaagacatggcctcccggatccaggagttcgaagcggccctgaaagcaaaggaagcgacgattgccgagagaaatttagaaatcgacgctctgaaccagcggaaggcggcccactctgccgagctggaggccgtcctgttggccttggcccgcatccgccgcgccctggagcagcagcccctggcagccggggcggcgcctcccgagctgcagtggctccgagcgcagtgtgcccgcctcagccgccagctgcaggtgctgcaccagcggttcctgaggtgccaggtggagctggacaggcggcaggcccgcagagccacagctcacacacgggtgcccggggcccacccacagcctcgcatggatggtggcgccaaggcccaggtcaccggcgacgtggaggcctcccatgatgctgctttggagccggttgtccctgacccacagggtgatctgcagcctgtcctggtgacgttgaaggatgcacctctctgcaagcaagaaggcgtgatgtcagtgctcaccgtctgccagaggcagctgcagtcggagctgctcttggtgaaaaatgaaatgcgcctgagtctggaggacggcggcaagggtaaagaaaaagtactggaagattgtcagctgccgaaggtcgatctcgtagctcaggtgaaacagcttcaggaaaaactgaaccgtttgctgtattccatgaccttccagaatgtggatgctgccgacaccaaatctctgtggcccatggcctcagcacacctgttggagagcagctggagtgatgattcctgtgacggagaagagcctgacatatcaccccacatagacacatgtgatgccaatacagccacggggggtgtaactgatgttatcaaaaatcaggccatagacgcgtgtgatgccaatacaaccccagggggtgtaactgatgttatcaaaaattgggattccttgataccagatgaaatgccagattctcccattcaagaaaaatcagaatgtcaggacatgtctctttcttcaccgaccagcgtacttggtggctcccgccaccagagccacactgcagaggctgggccccggaagagcccggtcgggatgctggacctgtcttcctggagctcccctgaggtcctcaggaaggactggaccctggagccctggcccagcctccccgtgacaccccactcaggagccctgagcctgtgcagtgccgacacatccctgggggacagggcggacacctcgctgccacagacccaggggccggggctgctttgttccccaggcgtgtctgcagcagcgctggcactgcagtgggccgagtctccgccggctgacgaccaccatgtgcagaggacggctgtggagaaagatgtcgaagattttatcacaacatcctttgattctcaagaaacattaagttcacctcctcctggattagaaggaaaagctgatagaagtgagaaaagtgacggctcgggttttggagcaagactgagcccggggtcaggaggccctgaggctcaaactgctggtcctgtgacccctgcttccatctctggaaggtttcagccgctgccggaagccatgaaggagaaggaagtgcgtccgaagcacgtgaaggctttactgcagatggtgcgtgacgagagccaccagatcctggcgctgtcagaaggccttgcacccccaagcggcgagccacacccaccccggaaggaagacgagatacaggacatctcgctccatgggggaaagacgcaggaagtgcccaccgcgtgccccgattggagaggggaccttctgcaggttgtgcaagaggcctttgaaaaagagcaggagatgcagggggttgagctgcagccccgactcagtggctcagatctggggggtcacagctccctgctcgaaaggctggagaagatcatccgtgagcagggagacctgcaggaaaagtccctggagcatcttcgcttgccggaccggagcagcctgctgtccgagatccaggcgctgcgtgcccagctgcgcatgacgcacctgcagaaccaggagaagctgcagcacttgcgcacggcgctgacaagcncagaggcgcgcgggagccagcaggagcaccagctgcgcaggcaggttgaactgctggcttataaagtagagcaggagaagtgcattgctggtgacttgcagaagacgctgagtgaagagcaagagaaggcaaacagcgtgcagaagctcctggcggcggagcagactgtagtgcgagatttgaagtccgacctctgtgagagcaggcagaagagcgaacagctgtcccggtccctctgcgaggtgcagcaggaggtcctccagctgagatccatgctgagcagtaaggagaacgagctgaaggccgcgcttcaggagctggagagtgagcaggggaaggggcgtgccctgcagagccagctggaggaggagcagctgcggcacctgcagagggagagccagagtgccaaggccctggaggagctgcgggcgtctttggagacacagcgtgctcagagcagtcgactctgcgtggcactgaaacacgagcagacggccaaggacaacctgcagaaggagctgcgtatcgagcactcacgctgcgaggccttgctggctcaggagcggagccagctctctgagctccagaaggaccttgcggctgagaagagccgcaccctggagctgtcagaggccttgcggcacgagcggctcctgaccgagcagctgagccagaggacacaggaggcttgcgtgcaccaggacacacaggcccatcacgctctgctgcagaagctgaaggaggagaagtcccgggtggtggacttgcaagcgatgcttgaaaaggtgcagcagcaagccctgcattctcagcagcagcttgaggctgaggctcagaagcactgtgaggcgctcaggagagagaaggagcgagaattagaactgcagcgtcagcgtgacttgcataagatcaagcagcttcagcagacggtgagagacctggagtcgaaggacgaggtgcctggcagccgcctccacctaggttctgcccgcagggctgccggctcggatgcggaccacctccgggaacagcagcgagagctggaggcgatgaggcagcggctgctctctgccgcccggcttctcaccagcttcaccagccaggccgtggacaggacagttaatgattggacgtcatccaatgagaaagcagtgatgtctttactgcacacgttggaggagctgaagtctgacttgagcaggcccacctcctcccagaaaaaaatggcagcagagctgcagttccagtttgtggacgtcctgctgaaagacaatgtttccctcacaaaagcgctcagcacggtgacccaggagaagctggagctgagcagagccgtgtctaagcttgagaagttgctgaagcaccatctgcagaagggctgcagcccaagcaggtcggaaaggtctgcttggaagccagacgaaacggctccacagagttccctgaggcgcccagaccccggccggcttccaccagctgccagcgaggaagcacacaccagcaatgtcaagatggaaaaattgtacctgcattacttgagagcagagagctttagaaaagctctgatttatcaaaagaagtatcttttgctgttgattggtggattccaggattctgaacaagaaacactctccatgattgcccatttgggggtatttccttccaaagcagaacggaaaatcacatctcgtcctttcaccaggttccgcacggccgtcagggtggtcattgcaatattaagattacgttttttggttaagaaatggcaagaagtagatcggaaaggagctctggcacaaggcaaagcccctcgcccagggccccgagcacgacagccgcagtctccacccagaaccagagagtcccccccaacccgggatgtaccctctggccacaccagggaccctgccagaggccgcagactggcagcagcagcctccccacacagtgggggaagagccactccatccccaaattcaagattagaaagatccctgactgcttctcaagatccagaacattccttgacagagtatattcaccatttagaagtgatccagcaaagattgggaggggtactaccagattctacttcaaagaaatcctgccacccgatgattaaacagtgaataaaatgtcatggctctttcctgcgacaattctatttgaggaaaagatttgtttttcccttttcccaaggaagctcgtgggacagcatgggcactactcttcatgtgcggtgacaccagcccccagatgccttgaattaagtgtcctcacctttatgcatgactgcaaagccagctggagcattttctatggagcctccgtatgttttaggcccatgaccttcgtgaggtgacgggcactcactcccatgagccctggctgtgtgctgttgtgtgcctatcggcagatccatccttcctgcctccaaggaggatacacagagaatggcttcctgttgttttgtttattttcttaacgtgtacagatggaaacttcatttaaaaataaaaacaaaacaactcaaaaaggaataaaatttaatcactgttttgtttgtgaata

SEQ ID NO: 459578 - DNA, 9023 bp, Homo sapiens
  misc_feature (6452)..(6452): n is a, c, g, or t
ctggggctgcaggaccatcgtctgtctccttgctggctgtgccccccacatccctgccacttcgagtgctgcttttgctcccagccctgtggctcttgccaccgcttggagagagctctccacattcaggggcgtacgagagtctaagccgtaggggtccctcatccctctccggttctgggatgggcccttttccgagttctgcccccaccacaggtaaccaggctcttgcctctcgcctggcttgttgtgggtgtcccattttaagacgattgcctgactccgttatgttgcagagctacatgagcaactcctggcgcgcacctctcgtgtggaagatttagaacagctgaagcagcgagaaaaaacccagcatgagtccgaactggagcaactgaggatttattttgaaaagaagttaagggatgctgagaaaacttaccaagaagacctaaccctgttacagcagaggctgcagggggcgagggaagatgctcttctggactctgtggaagttgggttgtcctgtgtgggtttagaagagaaacctgagaaaggaagaaaagatcacgttgatgaactcgagcctgagcgacataaggagagcctgccacgcttccaggcggagttagaagaaagccacaggcaccagctggaagcgctggagtctcccctctgcatccagcacgaggggcatgtctcagacagatgctgcgtagagacttcagcattgggacacgagtggcgtctggaaccctctgaagggcacagccaagagcttccctgggtgcatctccagggtgtgcaggacggggacttggaggccgacacagagcgggcagccagagtcttgggtctggaaactgagcacaaggtgcaactttcgcttcttcagactgagctcaaagaagaaattgaactcctaaaaatagaaaatagaaatttgtttgagaagttgcagcatgaaactcgtctgaaggacgatttggagaaggtaaaacacaatctaattgaagaccaccagaaggaactaaataatgctaagcaaaagactgagctgatgaaacaggaattccaaagaaaagaaacggactggaaagttatgaaggaggagctacagcgggaagctgaggagaagttaacattgatgctacttgaactgagagaaaaggctgaatccgagaaacagaccatcataaacaagttggagcttcgagaagctgaaatgaggcagcttcaggaccaacaggcagcgcagatcctggatctggagaggtccttgacggagcagcaggcccgcctgcagcagctggaacaggacctcacttcagacgacgccctgcattgcagccagtgtgggcgggagccgcccacagcccaggacggggagcttgccgcgctccacgtgaaggaagactgcgccctgcagctgatgctggcccggagcaggtttttagaggaacgtaaagagatcgccgagaaattcagtgcggaacaagatgccttcctgcagctcctccaggagagacaccagcagcagctcctgtcagtgacggcggagctcgaggccagacaccaggccgcgttgggcgagctgacagcctccttagagagcaagcagggggctctgctggctgcacgtgtggccgaactgcagaccaaacacgctgccgacctcggcgctctggagaccagacatctgtccagccttgattctttggaatcctgttacctgtctgaatttcagaccatccgtgaggagcacaggcaggccctagagctcttacgagcagactttgaggaacaactgtggaaaaaggactctcttcaccaaacgattttgactcaagagttggagaaactgaagcggaaacacgaaggggagctacagtctgtgcgggaccacctgcgaaccgaagcgagcacagagctcgccggaaccgtggctcacgagctgcagggagtgcaccagggtgaatttggaagtgaaaagaaaactgctttgcatgaaaaagaggagacacttcggcttcagagtgcacaggcacagccttttcaccaagaggagaaagagtctttgtctctgcagcttcaaaagaagaatcaccaagtccagcagctgaaagaccaggttttatccttaagtcacgagatagaagagtgccgctccgagttggaggtgctgcagcagaggcgggagcgggagaaccgggaaggcgcaaacctcctctccatgctcaaggccgacgtcaacctgtcccacagcgaaagaggggccctccaggacgccctgcgcaggctgctgggtttgtttggagagacgctgagggcagccgtcaccctgaggagccggatcggggagcgcgtggggctctgcctggatgacgcgggcgcaggcctggccctgtcgacagctccggcgctggaggagacatggtctgatgtggccctcccggagttggacagaactttgtctgaatgtgcagagatgtcttccgtggctgaaattagcagccacatgcgtgaaagctttctcatgagcccagaaagtgtgcgggagtgtgagcagcccatccggagggtcttccagagcctcagcctggccgtggacggcctcatggagatggccctggactccagcaggcagctggaagaagcacgccaacttcattctcgttttgaaaaagaatttagttttaagaatgaggagacagcacaggttgtcaggaagcaccaggagctgctggagtgtttgacggaggagagcgcagcaaaggcagagctggcgctggagctgcacaagactcagggtacccttgagggattcaaggtggagacagcagatctgaaggaggtgctggccgggaaggaggattccgagcaccgtctggtgctggagctggagagcctgagacggcagctgcagcaggcggcccaggagcaggcggcgctgagggaggagtgcacccgtctgtggagtcggggggaggccacagccacggacgccgaggccagagaagctgctctccggaaggaagtggaggatctgaccaaagaacagtcggagaccaggaagcaggctgagaaggaccgctcagccctgctctcccagatgaagattttggagtctgagttagaagaacagctgtctcagcatcgcgggtgtgccaagcaggcggaggccgtcactgccctggaacagcaggtggcatctctggacaagcatttgcgcaaccagcggcaattcatggatgagcaggcagccgagcgggagcacgagcgcgaggagttccagcaggagattcagaggctggaggggcagctccgccaggcggccaagccgcagccctggggccctcgcgacagccagcaggcgccgctggatggagaggttgagttgttacaacaaaagttgagagaaaagttggatgaatttaatgaattggctatacagaaagagtcggcagatagacaagtgttaatgcaggaagaagaaattaaacgtctggaggagatgaacatcaacatcaggaaaaaagtggcccagctccaggaagaagtggaaaaacagaaaaacatcgtgaaagggctggaacaggataaagaggtgttaaagaaacagcagatgagtagcttgcttctggcgtccacgttgcagtctacactagatgcaggcagatgtcccgagcctccttcgggcagccctcctgagggtccagaaatacagttagaggtgacacagagagcactcctgcggcgcgagagcgaggttttggacttaaaagaacagctagaaaagatgaaaggtgacttagaaagtaaaaatgaagaaatactacatctgaacttaaaattggacatgcagaacagccagactgctgtcagcctcagagaacttgaggaagagaacacgagcttgaaggtcatatataccagaagttctgagattgaagagctgaaagccactattgaaaatctgcaagagaatcagaaacgattacaaaaggagaaagcagaggaaattgaacaactccatgaagtcattgagaagctgcagcacgagctgtccctcatggggcctgtggtgcacgaagtcagcgacagtcaggctggcagtctgcagagcgagctgctctgctcccaggccgggggccctcgtgggcaggccctacagggcgagctcgaggctgcgctggaagccaaggaggccctgagccggctgctggctgaccaggagcgcaggcacagccaggccctggaggccctgcagcagcgcctccagggcgcagaggaggctgcggagctacagctggctgagctggagcgcaatgtagccctcagggaggctgaggtcgaagacatggcctcccggatccaggagttcgaagcggccctgaaagcaaaggaagcgacgattgccgagagaaatttagaaatcgacgctctgaaccagcggaaggcggcccactctgccgagctggaggccgtcctgttggccttggcccgcatccgccgcgccctggagcagcagcccctggcagccggggcggcgcctcccgagctgcagtggctccgagcgcagtgtgcccgcctcagccgccagctgcaggtgctgcaccagcggttcctgaggtgccaggtggagctggacaggcggcaggcccgcagagccacagctcacacacgggtgcccggggcccacccacagcctcgcatggatggtggcgccaaggcccaggtcaccggcgacgtggaggcctcccatgatgctgctttggagccggttgtccctgacccacagggtgatctgcagcctgtcctggtgacgttgaaggatgcacctctctgcaagcaagaaggcgtgatgtcagtgctcaccgtctgccagaggcagctgcagtcggagctgctcttggtgaaaaatgaaatgcgcctgagtctggaggacggcggcaagggtaaagaaaaagtactggaagattgtcagctgccgaaggtcgatctcgtagctcaggtgaaacagcttcaggaaaaactgaaccgtttgctgtattccatgaccttccagaatgtggatgctgccgacaccaaatctctgtggcccatggcctcagcacacctgttggagagcagctggagtgatgattcctgtgacggagaagagcctgacatatcaccccacatagacacatgtgatgccaatacagccacggggggtgtaactgatgttatcaaaaatcaggccatagacgcgtgtgatgccaatacaaccccagggggtgtaactgatgttatcaaaaattgggattccttgataccagatgaaatgccagattctcccattcaagaaaaatcagaatgtcaggacatgtctctttcttcaccgaccagcgtacttggtggctcccgccaccagagccacactgcagaggctgggccccggaagagcccggtcgggatgctggacctgtcttcctggagctcccctgaggtcctcaggaaggactggaccctggagccctggcccagcctccccgtgacaccccactcaggagccctgagcctgtgcagtgccgacacatccctgggggacagggcggacacctcgctgccacagacccaggggccggggctgctttgttccccaggcgtgtctgcagcagcgctggcactgcagtgggccgagtctccgccggctgacgaccaccatgtgcagaggacggctgtggagaaagatgtcgaagattttatcacaacatcctttgattctcaagaaacattaagttcacctcctcctggattagaaggaaaagctgatagaagtgagaaaagtgacggctcgggttttggagcaagactgagcccggggtcaggaggccctgaggctcaaactgctggtcctgtgacccctgcttccatctctggaaggtttcagccgctgccggaagccatgaaggagaaggaagtgcgtccgaagcacgtgaaggctttactgcagatggtgcgtgacgagagccaccagatcctggcgctgtcagaaggccttgcacccccaagcggcgagccacacccaccccggaaggaagacgagatacaggacatctcgctccatgggggaaagacgcaggaagtgcccaccgcgtgccccgattggagaggggaccttctgcaggttgtgcaagaggcctttgaaaaagagcaggagatgcagggggttgagctgcagccccgactcagtggctcagatctggggggtcacagctccctgctcgaaaggctggagaagatcatccgtgagcagggagacctgcaggaaaagtccctggagcatcttcgcttgccggaccggagcagcctgctgtccgagatccaggcgctgcgtgcccagctgcgcatgacgcacctgcagaaccaggagaagctgcagcacttgcgcacggcgctgacaagcncagaggcgcgcgggagccagcaggagcaccagctgcgcaggcaggttgaactgctggcttataaagtagagcaggagaagtgcattgctggtgacttgcagaagacgctgagtgaagagcaagagaaggcaaacagcgtgcagaagctcctggcggcggagcagactgtagtgcgagatttgaagtccgacctctgtgagagcaggcagaagagcgaacagctgtcccggtccctctgcgaggtgcagcaggaggtcctccagctgagatccatgctgagcagtaaggagaacgagctgaaggccgcgcttcaggagctggagagtgagcaggggaaggggcgtgccctgcagagccagctggaggaggagcagctgcggcacctgcagagggagagccagagtgccaaggccctggaggagctgcgggcgtctttggagacacagcgtgctcagagcagtcgactctgcgtggcactgaaacacgagcagacggccaaggacaacctgcagaaggagctgcgtatcgagcactcacgctgcgaggccttgctggctcaggagcggagccagctctctgagctccagaaggaccttgcggctgagaagagccgcaccctggagctgtcagaggccttgcggcacgagcggctcctgaccgagcagctgagccagaggacacaggaggcttgcgtgcaccaggacacacaggcccatcacgctctgctgcagaagctgaaggaggagaagtcccgggtggtggacttgcaagcgatgcttgaaaaggtgcagcagcaagccctgcattctcagcagcagcttgaggctgaggctcagaagcactgtgaggcgctcaggagagagaaggagcgagaattagaactgcagcgtcagcgtgacttgcataagatcaagcagcttcagcagacggtgagagacctggagtcgaaggacgaggtgcctggcagccgcctccacctaggttctgcccgcagggctgccggctcggatgcggaccacctccgggaacagcagcgagagctggaggcgatgaggcagcggctgctctctgccgcccggcttctcaccagcttcaccagccaggccgtggacaggacagttaatgattggacgtcatccaatgagaaagcagtgatgtctttactgcacacgttggaggagctgaagtctgacttgagcaggcccacctcctcccagaaaaaaatggcagcagagctgcagttccagtttgtggacgtcctgctgaaagacaatgtttccctcacaaaagcgctcagcacggtgacccaggagaagctggagctgagcagagccgtgtctaagcttgagaagttgctgaagcaccatctgcagaagggctgcagcccaagcaggtcggaaaggtctgcttggaagccagacgaaacggctccacagagttccctgaggcgcccagaccccggccggcttccaccagctgccagcgaggaagcacacaccagcaatgtcaagatggaaaaattgtacctgcattacttgagagcagagagctttagaaaagctctgatttatcaaaagaagtatcttttgctgttgattggtggattccaggattctgaacaagaaacactctccatgattgcccatttgggggtatttccttccaaagcagaacggaaaatcacatctcgtcctttcaccaggttccgcacggccgtcagggtggtcattgcaatattaagattacgttttttggttaagaaatggcaagaagtagatcggaaaggagctctggcacaaggcaaagcccctcgcccagggccccgagcacgacagccgcagtctccacccagaaccagagagtcccccccaacccgggatgtaccctctggccacaccagggaccctgccagaggccgcagactggcagcagcagcctccccacacagtgggggaagagccactccatccccaaattcaagattagaaagatccctgactgcttctcaagatccagaacattccttgacagagtatattcaccatttagaagtgatccagcaaagattgggaggggtactaccagattctacttcaaagaaatcctgccacccgatgattaaacagtgaataaaatgtcatggctctttcctgcgacaattctatttgaggaaaagatttgtttttcccttttcccaaggaagctcgtgggacagcatgggcactactcttcatgtgcggtgacaccagcccccagatgccttgaattaagtgtcctcacctttatgcatgactgcaaagccagctggagcattttctatggagcctccgtatgttttaggcccatgaccttcgtgaggtgacgggcactcactcccatgagccctggctgtgtgctgttgtgtgcctatcggcagatccatccttcctgcctccaaggaggatacacagagaatggcttcctgttgttttgtttattttcttaacgtgtacagatggaaacttcatttaaaaataaaaacaaaacaactcaaaaaggaataaaatttaatcactgttttgtttgtgaata

SEQ ID NO: 459579 - DNA, 7208 bp, Homo sapiens
  misc_feature (4637)..(4637): n is a, c, g, or t
acttactactactacttgccgctcttaggaatagtggatcatcggatccaagcggaaacacgaaggggagctacagtctgtgcgggaccacctgcgaaccgaagcgagcacagagctcgccggaaccgtggctcacgagctgcagggagtgcaccagggtgaatttggaagtgaaaagaaaactgctttgcatgaaaaagaggagacacttcggcttcagagtgcacaggcacagccttttcaccaagaggagaaagagtctttgtctctgcagcttcaaaagaagaatcaccaagtccagcagctgaaagaccaggttttatccttaagtcacgagatagaagagtgccgctccgagttggaggtgctgcagcagaggcgggagcgggagaaccgggaaggcgcaaacctcctctccatgctcaaggccgacgtcaacctgtcccacagcgaaagaggggccctccaggacgccctgcgcaggctgctgggtttgtttggagagacgctgagggcagccgtcaccctgaggagccggatcggggagcgcgtggggctctgcctggatgacgcgggcgcaggcctggccctgtcgacagctccggcgctggaggagacatggtctgatgtggccctcccggagttggacagaactttgtctgaatgtgcagagatgtcttccgtggctgaaattagcagccacatgcgtgaaagctttctcatgagcccagaaagtgtgcgggagtgtgagcagcccatccggagggtcttccagagcctcagcctggccgtggacggcctcatggagatggccctggactccagcaggcagctggaagaagcacgccaacttcattctcgttttgaaaaagaatttagttttaagaatgaggagacagcacaggttgtcaggaagcaccaggagctgctggagtgtttgacggaggagagcgcagcaaaggcagagctggcgctggagctgcacaagactcagggtacccttgagggattcaaggtggagacagcagatctgaaggaggtgctggccgggaaggaggattccgagcaccgtctggtgctggagctggagagcctgagacggcagctgcagcaggcggcccaggagcaggcggcgctgagggaggagtgcacccgtctgtggagtcggggggaggccacagccacggacgccgaggccagagaagctgctctccggaaggaagtggaggatctgaccaaagaacagtcggagaccaggaagcaggctgagaaggaccgctcagccctgctctcccagatgaagattttggagtctgagttagaagaacagctgtctcagcatcgcgggtgtgccaagcaggcggaggccgtcactgccctggaacagcaggtggcatctctggacaagcatttgcgcaaccagcggcaattcatggatgagcaggcagccgagcgggagcacgagcgcgaggagttccagcaggagattcagaggctggaggggcagctccgccaggcggccaagccgcagccctggggccctcgcgacagccagcaggcgccgctggatggagaggttgagttgttacaacaaaagttgagagaaaagttggatgaatttaatgaattggctatacagaaagagtcggcagatagacaagtgttaatgcaggaagaagaaattaaacgtctggaggagatgaacatcaacatcaggaaaaaagtggcccagctccaggaagaagtggaaaaacagaaaaacatcgtgaaagggctggaacaggataaagaggtgttaaagaaacagcagatgagtagcttgcttctggcgtccacgttgcagtctacactagatgcaggcagatgtcccgagcctccttcgggcagccctcctgagggtccagaaatacagttagaggtgacacagagagcactcctgcggcgcgagagcgaggttttggacttaaaagaacagctagaaaagatgaaaggtgacttagaaagtaaaaatgaagaaatactacatctgaacttaaaattggacatgcagaacagccagactgctgtcagcctcagagaacttgaggaagagaacacgagcttgaaggtcatatataccagaagttctgagattgaagagctgaaagccactattgaaaatctgcaagagaatcagaaacgattacaaaaggagaaagcagaggaaattgaacaactccatgaagtcattgagaagctgcagcacgagctgtccctcatggggcctgtggtgcacgaagtcagcgacagtcaggctggcagtctgcagagcgagctgctctgctcccaggccgggggccctcgtgggcaggccctacagggcgagctcgaggctgcgctggaagccaaggaggccctgagccggctgctggctgaccaggagcgcaggcacagccaggccctggaggccctgcagcagcgcctccagggcgcagaggaggctgcggagctacagctggctgagctggagcgcaatgtagccctcagggaggctgaggtcgaagacatggcctcccggatccaggagttcgaagcggccctgaaagcaaaggaagcgacgattgccgagagaaatttagaaatcgacgctctgaaccagcggaaggcggcccactctgccgagctggaggccgtcctgttggccttggcccgcatccgccgcgccctggagcagcagcccctggcagccggggcggcgcctcccgagctgcagtggctccgagcgcagtgtgcccgcctcagccgccagctgcaggtgctgcaccagcggttcctgaggtgccaggtggagctggacaggcggcaggcccgcagagccacagctcacacacgggtgcccggggcccacccacagcctcgcatggatggtggcgccaaggcccaggtcaccggcgacgtggaggcctcccatgatgctgctttggagccggttgtccctgacccacagggtgatctgcagcctgtcctggtgacgttgaaggatgcacctctctgcaagcaagaaggcgtgatgtcagtgctcaccgtctgccagaggcagctgcagtcggagctgctcttggtgaaaaatgaaatgcgcctgagtctggaggacggcggcaagggtaaagaaaaagtactggaagattgtcagctgccgaaggtcgatctcgtagctcaggtgaaacagcttcaggaaaaactgaaccgtttgctgtattccatgaccttccagaatgtggatgctgccgacaccaaatctctgtggcccatggcctcagcacacctgttggagagcagctggagtgatgattcctgtgacggagaagagcctgacatatcaccccacatagacacatgtgatgccaatacagccacggggggtgtaactgatgttatcaaaaatcaggccatagacgcgtgtgatgccaatacaaccccagggggtgtaactgatgttatcaaaaattgggattccttgataccagatgaaatgccagattctcccattcaagaaaaatcagaatgtcaggacatgtctctttcttcaccgaccagcgtacttggtggctcccgccaccagagccacactgcagaggctgggccccggaagagcccggtcgggatgctggacctgtcttcctggagctcccctgaggtcctcaggaaggactggaccctggagccctggcccagcctccccgtgacaccccactcaggagccctgagcctgtgcagtgccgacacatccctgggggacagggcggacacctcgctgccacagacccaggggccggggctgctttgttccccaggcgtgtctgcagcagcgctggcactgcagtgggccgagtctccgccggctgacgaccaccatgtgcagaggacggctgtggagaaagatgtcgaagattttatcacaacatcctttgattctcaagaaacattaagttcacctcctcctggattagaaggaaaagctgatagaagtgagaaaagtgacggctcgggttttggagcaagactgagcccggggtcaggaggccctgaggctcaaactgctggtcctgtgacccctgcttccatctctggaaggtttcagccgctgccggaagccatgaaggagaaggaagtgcgtccgaagcacgtgaaggctttactgcagatggtgcgtgacgagagccaccagatcctggcgctgtcagaaggccttgcacccccaagcggcgagccacacccaccccggaaggaagacgagatacaggacatctcgctccatgggggaaagacgcaggaagtgcccaccgcgtgccccgattggagaggggaccttctgcaggttgtgcaagaggcctttgaaaaagagcaggagatgcagggggttgagctgcagccccgactcagtggctcagatctggggggtcacagctccctgctcgaaaggctggagaagatcatccgtgagcagggagacctgcaggaaaagtccctggagcatcttcgcttgccggaccggagcagcctgctgtccgagatccaggcgctgcgtgcccagctgcgcatgacgcacctgcagaaccaggagaagctgcagcacttgcgcacggcgctgacaagcncagaggcgcgcgggagccagcaggagcaccagctgcgcaggcaggttgaactgctggcttataaagtagagcaggagaagtgcattgctggtgacttgcagaagacgctgagtgaagagcaagagaaggcaaacagcgtgcagaagctcctggcggcggagcagactgtagtgcgagatttgaagtccgacctctgtgagagcaggcagaagagcgaacagctgtcccggtccctctgcgaggtgcagcaggaggtcctccagctgagatccatgctgagcagtaaggagaacgagctgaaggccgcgcttcaggagctggagagtgagcaggggaaggggcgtgccctgcagagccagctggaggaggagcagctgcggcacctgcagagggagagccagagtgccaaggccctggaggagctgcgggcgtctttggagacacagcgtgctcagagcagtcgactctgcgtggcactgaaacacgagcagacggccaaggacaacctgcagaaggagctgcgtatcgagcactcacgctgcgaggccttgctggctcaggagcggagccagctctctgagctccagaaggaccttgcggctgagaagagccgcaccctggagctgtcagaggccttgcggcacgagcggctcctgaccgagcagctgagccagaggacacaggaggcttgcgtgcaccaggacacacaggcccatcacgctctgctgcagaagctgaaggaggagaagtcccgggtggtggacttgcaagcgatgcttgaaaaggtgcagcagcaagccctgcattctcagcagcagcttgaggctgaggctcagaagcactgtgaggcgctcaggagagagaaggagcgagaattagaactgcagcgtcagcgtgacttgcataagatcaagcagcttcagcagacggtgagagacctggagtcgaaggacgaggtgcctggcagccgcctccacctaggttctgcccgcagggctgccggctcggatgcggaccacctccgggaacagcagcgagagctggaggcgatgaggcagcggctgctctctgccgcccggcttctcaccagcttcaccagccaggccgtggacaggacagttaatgattggacgtcatccaatgagaaagcagtgatgtctttactgcacacgttggaggagctgaagtctgacttgagcaggcccacctcctcccagaaaaaaatggcagcagagctgcagttccagtttgtggacgtcctgctgaaagacaatgtttccctcacaaaagcgctcagcacggtgacccaggagaagctggagctgagcagagccgtgtctaagcttgagaagttgctgaagcaccatctgcagaagggctgcagcccaagcaggtcggaaaggtctgcttggaagccagacgaaacggctccacagagttccctgaggcgcccagaccccggccggcttccaccagctgccagcgaggaagcacacaccagcaatgtcaagatggaaaaattgtacctgcattacttgagagcagagagctttagaaaagctctgatttatcaaaagaagtatcttttgctgttgattggtggattccaggattctgaacaagaaacactctccatgattgcccatttgggggtatttccttccaaagcagaacggaaaatcacatctcgtcctttcaccaggttccgcacggccgtcagggtggtcattgcaatattaagattacgttttttggttaagaaatggcaagaagtagatcggaaaggagctctggcacaaggcaaagcccctcgcccagggccccgagcacgacagccgcagtctccacccagaaccagagagtcccccccaacccgggatgtaccctctggccacaccagggaccctgccagaggccgcagactggcagcagcagcctccccacacagtgggggaagagccactccatccccaaattcaagattagaaagatccctgactgcttctcaagatccagaacattccttgacagagtatattcaccatttagaagtgatccagcaaagattgggaggggtactaccagattctacttcaaagaaatcctgccacccgatgattaaacagtgaataaaatgtcatggctctttcctgcgacaattctatttgaggaaaagatttgtttttcccttttcccaaggaagctcgtgggacagcatgggcactactcttcatgtgcggtgacaccagcccccagatgccttgaattaagtgtcctcacctttatgcatgactgcaaagccagctggagcattttctatggagcctccgtatgttttaggcccatgaccttcgtgaggtgacgggcactcactcccatgagccctggctgtgtgctgttgtgtgcctatcggcagatccatccttcctgcctccaaggaggatacacagagaatggcttcctgttgttttgtttattttcttaacgtgtacagatggaaacttcatttaaaaataaaaacaaaacaactcaaaaaggaataaaatttaatcactgttttgtttgtgaata

SEQ ID NO: 459580 - DNA, 7067 bp, Homo sapiens
  misc_feature (4496)..(4496): n is a, c, g, or t
gtctttgtgtccccactcgaggcctctgggttgtgctgctgtgtcctgaagctctgaactggtttggctctgctctggagaccacccagggtccggagaccaggtcgggcttatgggaccctctgagctcacagctgtttctggagcattggtgtctgtcatgctgagggtccatccgtgtgtggggggtgtctgtgcaggtctctctttgttcttttcatcaagttttgtgatttttctgtgaggaccttgccttctgtagcacttggctgtgggtgtctcgtagcttggtgctgactctctccagtcacccagaggggccctccaggacgccctgcgcaggctgctgggtttgtttggagagacgctgagggcagccgtcaccctgaggagccggatcggggagcgcgtggggctctgcctggatgacgcgggcgcaggcctggccctgtcgacagctccggcgctggaggagacatggtctgatgtggccctcccggagttggacagaactttgtctgaatgtgcagagatgtcttccgtggctgaaattagcagccacatgcgtgaaagctttctcatgagcccagaaagtgtgcgggagtgtgagcagcccatccggagggtcttccagagcctcagcctggccgtggacggcctcatggagatggccctggactccagcaggcagctggaagaagcacgccaacttcattctcgttttgaaaaagaatttagttttaagaatgaggagacagcacaggttgtcaggaagcaccaggagctgctggagtgtttgacggaggagagcgcagcaaaggcagagctggcgctggagctgcacaagactcagggtacccttgagggattcaaggtggagacagcagatctgaaggaggtgctggccgggaaggaggattccgagcaccgtctggtgctggagctggagagcctgagacggcagctgcagcaggcggcccaggagcaggcggcgctgagggaggagtgcacccgtctgtggagtcggggggaggccacagccacggacgccgaggccagagaagctgctctccggaaggaagtggaggatctgaccaaagaacagtcggagaccaggaagcaggctgagaaggaccgctcagccctgctctcccagatgaagattttggagtctgagttagaagaacagctgtctcagcatcgcgggtgtgccaagcaggcggaggccgtcactgccctggaacagcaggtggcatctctggacaagcatttgcgcaaccagcggcaattcatggatgagcaggcagccgagcgggagcacgagcgcgaggagttccagcaggagattcagaggctggaggggcagctccgccaggcggccaagccgcagccctggggccctcgcgacagccagcaggcgccgctggatggagaggttgagttgttacaacaaaagttgagagaaaagttggatgaatttaatgaattggctatacagaaagagtcggcagatagacaagtgttaatgcaggaagaagaaattaaacgtctggaggagatgaacatcaacatcaggaaaaaagtggcccagctccaggaagaagtggaaaaacagaaaaacatcgtgaaagggctggaacaggataaagaggtgttaaagaaacagcagatgagtagcttgcttctggcgtccacgttgcagtctacactagatgcaggcagatgtcccgagcctccttcgggcagccctcctgagggtccagaaatacagttagaggtgacacagagagcactcctgcggcgcgagagcgaggttttggacttaaaagaacagctagaaaagatgaaaggtgacttagaaagtaaaaatgaagaaatactacatctgaacttaaaattggacatgcagaacagccagactgctgtcagcctcagagaacttgaggaagagaacacgagcttgaaggtcatatataccagaagttctgagattgaagagctgaaagccactattgaaaatctgcaagagaatcagaaacgattacaaaaggagaaagcagaggaaattgaacaactccatgaagtcattgagaagctgcagcacgagctgtccctcatggggcctgtggtgcacgaagtcagcgacagtcaggctggcagtctgcagagcgagctgctctgctcccaggccgggggccctcgtgggcaggccctacagggcgagctcgaggctgcgctggaagccaaggaggccctgagccggctgctggctgaccaggagcgcaggcacagccaggccctggaggccctgcagcagcgcctccagggcgcagaggaggctgcggagctacagctggctgagctggagcgcaatgtagccctcagggaggctgaggtcgaagacatggcctcccggatccaggagttcgaagcggccctgaaagcaaaggaagcgacgattgccgagagaaatttagaaatcgacgctctgaaccagcggaaggcggcccactctgccgagctggaggccgtcctgttggccttggcccgcatccgccgcgccctggagcagcagcccctggcagccggggcggcgcctcccgagctgcagtggctccgagcgcagtgtgcccgcctcagccgccagctgcaggtgctgcaccagcggttcctgaggtgccaggtggagctggacaggcggcaggcccgcagagccacagctcacacacgggtgcccggggcccacccacagcctcgcatggatggtggcgccaaggcccaggtcaccggcgacgtggaggcctcccatgatgctgctttggagccggttgtccctgacccacagggtgatctgcagcctgtcctggtgacgttgaaggatgcacctctctgcaagcaagaaggcgtgatgtcagtgctcaccgtctgccagaggcagctgcagtcggagctgctcttggtgaaaaatgaaatgcgcctgagtctggaggacggcggcaagggtaaagaaaaagtactggaagattgtcagctgccgaaggtcgatctcgtagctcaggtgaaacagcttcaggaaaaactgaaccgtttgctgtattccatgaccttccagaatgtggatgctgccgacaccaaatctctgtggcccatggcctcagcacacctgttggagagcagctggagtgatgattcctgtgacggagaagagcctgacatatcaccccacatagacacatgtgatgccaatacagccacggggggtgtaactgatgttatcaaaaatcaggccatagacgcgtgtgatgccaatacaaccccagggggtgtaactgatgttatcaaaaattgggattccttgataccagatgaaatgccagattctcccattcaagaaaaatcagaatgtcaggacatgtctctttcttcaccgaccagcgtacttggtggctcccgccaccagagccacactgcagaggctgggccccggaagagcccggtcgggatgctggacctgtcttcctggagctcccctgaggtcctcaggaaggactggaccctggagccctggcccagcctccccgtgacaccccactcaggagccctgagcctgtgcagtgccgacacatccctgggggacagggcggacacctcgctgccacagacccaggggccggggctgctttgttccccaggcgtgtctgcagcagcgctggcactgcagtgggccgagtctccgccggctgacgaccaccatgtgcagaggacggctgtggagaaagatgtcgaagattttatcacaacatcctttgattctcaagaaacattaagttcacctcctcctggattagaaggaaaagctgatagaagtgagaaaagtgacggctcgggttttggagcaagactgagcccggggtcaggaggccctgaggctcaaactgctggtcctgtgacccctgcttccatctctggaaggtttcagccgctgccggaagccatgaaggagaaggaagtgcgtccgaagcacgtgaaggctttactgcagatggtgcgtgacgagagccaccagatcctggcgctgtcagaaggccttgcacccccaagcggcgagccacacccaccccggaaggaagacgagatacaggacatctcgctccatgggggaaagacgcaggaagtgcccaccgcgtgccccgattggagaggggaccttctgcaggttgtgcaagaggcctttgaaaaagagcaggagatgcagggggttgagctgcagccccgactcagtggctcagatctggggggtcacagctccctgctcgaaaggctggagaagatcatccgtgagcagggagacctgcaggaaaagtccctggagcatcttcgcttgccggaccggagcagcctgctgtccgagatccaggcgctgcgtgcccagctgcgcatgacgcacctgcagaaccaggagaagctgcagcacttgcgcacggcgctgacaagcncagaggcgcgcgggagccagcaggagcaccagctgcgcaggcaggttgaactgctggcttataaagtagagcaggagaagtgcattgctggtgacttgcagaagacgctgagtgaagagcaagagaaggcaaacagcgtgcagaagctcctggcggcggagcagactgtagtgcgagatttgaagtccgacctctgtgagagcaggcagaagagcgaacagctgtcccggtccctctgcgaggtgcagcaggaggtcctccagctgagatccatgctgagcagtaaggagaacgagctgaaggccgcgcttcaggagctggagagtgagcaggggaaggggcgtgccctgcagagccagctggaggaggagcagctgcggcacctgcagagggagagccagagtgccaaggccctggaggagctgcgggcgtctttggagacacagcgtgctcagagcagtcgactctgcgtggcactgaaacacgagcagacggccaaggacaacctgcagaaggagctgcgtatcgagcactcacgctgcgaggccttgctggctcaggagcggagccagctctctgagctccagaaggaccttgcggctgagaagagccgcaccctggagctgtcagaggccttgcggcacgagcggctcctgaccgagcagctgagccagaggacacaggaggcttgcgtgcaccaggacacacaggcccatcacgctctgctgcagaagctgaaggaggagaagtcccgggtggtggacttgcaagcgatgcttgaaaaggtgcagcagcaagccctgcattctcagcagcagcttgaggctgaggctcagaagcactgtgaggcgctcaggagagagaaggagcgagaattagaactgcagcgtcagcgtgacttgcataagatcaagcagcttcagcagacggtgagagacctggagtcgaaggacgaggtgcctggcagccgcctccacctaggttctgcccgcagggctgccggctcggatgcggaccacctccgggaacagcagcgagagctggaggcgatgaggcagcggctgctctctgccgcccggcttctcaccagcttcaccagccaggccgtggacaggacagttaatgattggacgtcatccaatgagaaagcagtgatgtctttactgcacacgttggaggagctgaagtctgacttgagcaggcccacctcctcccagaaaaaaatggcagcagagctgcagttccagtttgtggacgtcctgctgaaagacaatgtttccctcacaaaagcgctcagcacggtgacccaggagaagctggagctgagcagagccgtgtctaagcttgagaagttgctgaagcaccatctgcagaagggctgcagcccaagcaggtcggaaaggtctgcttggaagccagacgaaacggctccacagagttccctgaggcgcccagaccccggccggcttccaccagctgccagcgaggaagcacacaccagcaatgtcaagatggaaaaattgtacctgcattacttgagagcagagagctttagaaaagctctgatttatcaaaagaagtatcttttgctgttgattggtggattccaggattctgaacaagaaacactctccatgattgcccatttgggggtatttccttccaaagcagaacggaaaatcacatctcgtcctttcaccaggttccgcacggccgtcagggtggtcattgcaatattaagattacgttttttggttaagaaatggcaagaagtagatcggaaaggagctctggcacaaggcaaagcccctcgcccagggccccgagcacgacagccgcagtctccacccagaaccagagagtcccccccaacccgggatgtaccctctggccacaccagggaccctgccagaggccgcagactggcagcagcagcctccccacacagtgggggaagagccactccatccccaaattcaagattagaaagatccctgactgcttctcaagatccagaacattccttgacagagtatattcaccatttagaagtgatccagcaaagattgggaggggtactaccagattctacttcaaagaaatcctgccacccgatgattaaacagtgaataaaatgtcatggctctttcctgcgacaattctatttgaggaaaagatttgtttttcccttttcccaaggaagctcgtgggacagcatgggcactactcttcatgtgcggtgacaccagcccccagatgccttgaattaagtgtcctcacctttatgcatgactgcaaagccagctggagcattttctatggagcctccgtatgttttaggcccatgaccttcgtgaggtgacgggcactcactcccatgagccctggctgtgtgctgttgtgtgcctatcggcagatccatccttcctgcctccaaggaggatacacagagaatggcttcctgttgttttgtttattttcttaacgtgtacagatggaaacttcatttaaaaataaaaacaaaacaactcaaaaaggaataaaatttaatcactgttttgtttgtgaata

SEQ ID NO: 459581 - DNA, 10378 bp, Homo sapiens
  misc_feature (7570)..(7570): n is a, c, g, or t
aagcgcgggggagggagtgtaaatagagcgaaggctgctctgtgtcagccccgtcaccgccgggcggcccgcgcggagtctgagggagatggaagttgagcaagagcagcggcgcagaaaggtggaggccgggaggacgaagcttgctcacttccgacagagaaaaacaaaaggtgacagttcgcattcggagaaaaagacggcgaagaggaagggctcggctgtcgatgcgtctgtccaggaggagagtccggtaaccaaggaggacagcgcactctgtggaggaggggacatttgcaaaagcacatcatgtgacgacacccctgatggggcaggaggggcctttgcagctcagccggaggactgtgatggagagaagagagaggacttggaacagctgcagcagaagcaagtcaatgaccatcctccagagcagtgtgggatgttcacagtcagtgaccacccaccagaacagcatgggatgttcacagtcggtgaccacccaccagaacagcgtgggatgttcacaagtcagtgaccacccaccagaacagcgtgggatgttcacaatcagtgaccaccaaccggaacagcgtgggatgttcacagtcagtgaccacacaccagaacagcgtgggatcttcacaatcagtgaccacccagcagaacagcgtgggatgttcacaaaggagtgtgaacaagaatgtgaacttgccattactgacctggagagcggccgtgaagatgaggctggcctgcatcagagtcagaggccttttctccgccgcaggccgtgcatggccttgagctggaggcgctgcgcctgagtctgagcaacatgcacacggcgcagctggagctgacacaggccaacctccagaaggagaaggagacggcattgacggagctgcgggagatgctcaacagccggcgtgcccaggagctggccctgctacagagcaggcagcagcacgagctggagctcctcagggagcagcacgcacgggagaaggaggaggtggtgctcaggtgtggacaggaagcagctgagctgaaggagaagttacaatcagaaatggagaaaaacgcccagatagtaaagaccctgaaggaagattgggaatctgaaaaagatttatgtttagaaaatctacgcaaagaactgtctgcaaagcatcaatcagaaatggaggatttacaaaaccagtttcagaaagaattggcagaacagagagctgagttggagaagatttttcaagacaaaaaccaggctgaacgggcccttaggaacctggagagtcatcatcaagcagccattgagaagttacgtgaagacctgcagtccgagcacggccggtgtttagaagacttggagttcaagttcaaagagagcgagaaagaaaaacagctggagttagagaatcttcaagcatcatatgaagacctgaaggcacaatcacaagaagagatcaggcgcttgtggtcccagcttgattctgccaggaccagtagacaggaattgagtgagctacatgagcaactcctggcgcgcacctctcgtgtggaagatttagaacagctgaagcagcgagaaaaaacccagcatgagtccgaactggagcaactgaggatttattttgaaaagaagttaagggatgctgagaaaacttaccaagaagacctaaccctgttacagcagaggctgcagggggcgagggaagatgctcttctggactctgtggaagttgggttgtcctgtgtgggtttagaagagaaacctgagaaaggaagaaaagatcacgttgatgaactcgagcctgagcgacataaggagagcctgccacgcttccaggcggagttagaagaaagccacaggcaccagctggaagcgctggagtctcccctctgcatccagcacgaggggcatgtctcagacagatgctgcgtagagacttcagcattgggacacgagtggcgtctggaaccctctgaagggcacagccaagagcttccctgggtgcatctccagggtgtgcaggacggggacttggaggccgacacagagcgggcagccagagtcttgggtctggaaactgagcacaaggtgcaactttcgcttcttcagactgagctcaaagaagaaattgaactcctaaaaatagaaaatagaaatttgtttgagaagttgcagcatgaaactcgtctgaaggacgatttggagaaggtaaaacacaatctaattgaagaccaccagaaggaactaaataatgctaagcaaaagactgagctgatgaaacaggaattccaaagaaaagaaacggactggaaagttatgaaggaggagctacagcgggaagctgaggagaagttaacattgatgctacttgaactgagagaaaaggctgaatccgagaaacagaccatcataaacaagttggagcttcgagaagctgaaatgaggcagcttcaggaccaacaggcagcgcagatcctggatctggagaggtccttgacggagcagcaggcccgcctgcagcagctggaacaggacctcacttcagacgacgccctgcattgcagccagtgtgggcgggagccgcccacagcccaggacggggagcttgccgcgctccacgtgaaggaagactgcgccctgcagctgatgctggcccggagcaggtttttagaggaacgtaaagagatcgccgagaaattcagtgcggaacaagatgccttcctgcagctcctccaggagagacaccagcagcagctcctgtcagtgacggcggagctcgaggccagacaccaggccgcgttgggcgagctgacagcctccttagagagcaagcagggggctctgctggctgcacgtgtggccgaactgcagaccaaacacgctgccgacctcggcgctctggagaccagacatctgtccagccttgattctttggaatcctgttacctgtctgaatttcagaccatccgtgaggagcacaggcaggccctagagctcttacgagcagactttgaggaacaactgtggaaaaaggactctcttcaccaaacgattttgactcaagagttggagaaactgaagcggaaacacgaaggggagctacagtctgtgcgggaccacctgcgaaccgaagcgagcacagagctcgccggaaccgtggctcacgagctgcagggagtgcaccagggtgaatttggaagtgaaaagaaaactgctttgcatgaaaaagaggagacacttcggcttcagagtgcacaggcacagccttttcaccaagaggagaaagagtctttgtctctgcagcttcaaaagaagaatcaccaagtccagcagctgaaagaccaggttttatccttaagtcacgagatagaagagtgccgctccgagttggaggtgctgcagcagaggcgggagcgggagaaccgggaaggcgcaaacctcctctccatgctcaaggccgacgtcaacctgtcccacagcgaaagaggggccctccaggacgccctgcgcaggctgctgggtttgtttggagagacgctgagggcagccgtcaccctgaggagccggatcggggagcgcgtggggctctgcctggatgacgcgggcgcaggcctggccctgtcgacagctccggcgctggaggagacatggtctgatgtggccctcccggagttggacagaactttgtctgaatgtgcagagatgtcttccgtggctgaaattagcagccacatgcgtgaaagctttctcatgagcccagaaagtgtgcgggagtgtgagcagcccatccggagggtcttccagagcctcagcctggccgtggacggcctcatggagatggccctggactccagcaggcagctggaagaagcacgccaacttcattctcgttttgaaaaagaatttagttttaagaatgaggagacagcacaggttgtcaggaagcaccaggagctgctggagtgtttgacggaggagagcgcagcaaaggcagagctggcgctggagctgcacaagactcagggtacccttgagggattcaaggtggagacagcagatctgaaggaggtgctggccgggaaggaggattccgagcaccgtctggtgctggagctggagagcctgagacggcagctgcagcaggcggcccaggagcaggcggcgctgagggaggagtgcacccgtctgtggagtcggggggaggccacagccacggacgccgaggccagagaagctgctctccggaaggaagtggaggatctgaccaaagaacagtcggagaccaggaagcaggctgagaaggaccgctcagccctgctctcccagatgaagattttggagtctgagttagaagaacagctgtctcagcatcgcgggtgtgccaagcaggcggaggccgtcactgccctggaacagcaggtggcatctctggacaagcatttgcgcaaccagcggcaattcatggatgagcaggcagccgagcgggagcacgagcgcgaggagttccagcaggagattcagaggctggaggggcagctccgccaggcggccaagccgcagccctggggccctcgcgacagccagcaggcgccgctggatggagaggttgagttgttacaacaaaagttgagagaaaagttggatgaatttaatgaattggctatacagaaagagtcggcagatagacaagtgttaatgcaggaagaagaaattaaacgtctggaggagatgaacatcaacatcaggaaaaaagtggcccagctccaggaagaagtggaaaaacagaaaaacatcgtgaaagggctggaacaggataaagaggtgttaaagaaacagcagatgagtagcttgcttctggcgtccacgttgcagtctacactagatgcaggcagatgtcccgagcctccttcgggcagccctcctgagggtccagaaatacagttagaggtgacacagagagcactcctgcggcgcgagagcgaggttttggacttaaaagaacagctagaaaagatgaaaggtgacttagaaagtaaaaatgaagaaatactacatctgaacttaaaattggacatgcagaacagccagactgctgtcagcctcagagaacttgaggaagagaacacgagcttgaaggtcatatataccagaagttctgagattgaagagctgaaagccactattgaaaatctgcaagagaatcagaaacgattacaaaaggagaaagcagaggaaattgaacaactccatgaagtcattgagaagctgcagcacgagctgtccctcatggggcctgtggtgcacgaagtcagcgacagtcaggctggcagtctgcagagcgagctgctctgctcccaggccgggggccctcgtgggcaggccctacagggcgagctcgaggctgcgctggaagccaaggaggccctgagccggctgctggctgaccaggagcgcaggcacagccaggccctggaggccctgcagcagcgcctccagggcgcagaggaggctgcggagctacagctggctgagctggagcgcaatgtagccctcagggaggctgaggtcgaagacatggcctcccggatccaggagttcgaagcggccctgaaagcaaaggaagcgacgattgccgagagaaatttagaaatcgacgctctgaaccagcggaaggcggcccactctgccgagctggaggccgtcctgttggccttggcccgcatccgccgcgccctggagcagcagcccctggcagccggggcggcgcctcccgagctgcagtggctccgagcgcagtgtgcccgcctcagccgccagctgcaggtgctgcaccagcggttcctgaggtgccaggtggagctggacaggcggcaggcccgcagagccacagctcacacacgggtgcccggggcccacccacagcctcgcatggatggtggcgccaaggcccaggtcaccggcgacgtggaggcctcccatgatgctgctttggagccggttgtccctgacccacagggtgatctgcagcctgtcctggtgacgttgaaggatgcacctctctgcaagcaagaaggcgtgatgtcagtgctcaccgtctgccagaggcagctgcagtcggagctgctcttggtgaaaaatgaaatgcgcctgagtctggaggacggcggcaagggtaaagaaaaagtactggaagattgtcagctgccgaaggtcgatctcgtagctcaggtgaaacagcttcaggaaaaactgaaccgtttgctgtattccatgaccttccagaatgtggatgctgccgacaccaaatctctgtggcccatggcctcagcacacctgttggagagcagctggagtgatgattcctgtgacggagaagagcctgacatatcaccccacatagacacatgtgatgccaatacagccacggggggtgtaactgatgttatcaaaaatcaggccatagacgcgtgtgatgccaatacaaccccagggggtgtaactgatgttatcaaaaattgggattccttgataccagatgaaatgccagattctcccattcaagaaaaatcagaatgtcaggacatgtctctttcttcaccgaccagcgtacttggtggctcccgccaccagacctccccgtgacaccccactcaggagccctgagcctgtgcagtgccgacacatccctgggggacagggcggacacctcgctgccacagacccaggggccggggctgctttgttccccaggcgtgtctgcagcagcgctggcactgcagtgggccgagtctccgccggctgacgaccaccatgtgcagaggacggctgtggagaaagatgtcgaagattttatcacaacatcctttgattctcaagaaacattaagttcacctcctcctggattagaaggaaaagctgatagaagtgagaaaagtgacggctcgggttttggagcaagactgagcccggggtcaggaggccctgaggctcaaactgctggtcctgtgacccctgcttccatctctggaaggtttcagccgctgccggaagccatgaaggagaaggaagtgcgtccgaagcacgtgaaggctttactgcagatggtgcgtgacgagagccaccagatcctggcgctgtcagaaggccttgcacccccaagcggcgagccacacccaccccggaaggaagacgagatacaggacatctcgctccatgggggaaagacgcaggaagtgcccaccgcgtgccccgattggagaggggaccttctgcaggttgtgcaagaggcctttgaaaaagagcaggagatgcagggggttgagctgcagccccgactcagtggctcagatctggggggtcacagctccctgctcgaaaggctggagaagatcatccgtgagcagggagacctgcaggaaaagtccctggagcatcttcgcttgccggaccggagcagcctgctgtccgagatccaggcgctgcgtgcccagctgcgcatgacgcacctgcagaaccaggagaagctgcagcacttgcgcacggcgctgacaagcncagaggcgcgcgggagccagcaggagcaccagctgcgcaggcaggttgaactgctggcttataaagtagagcaggagaagtgcattgctggtgacttgcagaagacgctgagtgaagagcaagagaaggcaaacagcgtgcagaagctcctggcggcggagcagactgtagtgcgagatttgaagtccgacctctgtgagagcaggcagaagagcgaacagctgtcccggtccctctgcgaggtgcagcaggaggtcctccagctgagatccatgctgagcagtaaggagaacgagctgaaggccgcgcttcaggagctggagagtgagcaggggaaggggcgtgccctgcagagccagctggaggaggagcagctgcggcacctgcagagggagagccagagtgccaaggccctggaggagctgcgggcgtctttggagacacagcgtgctcagagcagtcgactctgcgtggcactgaaacacgagcagacggccaaggacaacctgcagaaggagctgcgtatcgagcactcacgctgcgaggccttgctggctcaggagcggagccagctctctgagctccagaaggaccttgcggctgagaagagccgcaccctggagctgtcagaggccttgcggcacgagcggctcctgaccgagcagctgagccagaggacacaggaggcttgcgtgcaccaggacacacaggcccatcacgctctgctgcagaagctgaaggaggagaagtcccgggtggtggacttgcaagcgatgcttgaaaaggtgcagcagcaagccctgcattctcagcagcagcttgaggctgaggctcagaagcactgtgaggcgctcaggagagagaaggaggtaagtgccacactgaagtcgacggtggaagccctgcacacccaaaaacgagagctgagatgctctctggagagagagagggagaaaccagcgtggttgcaggcagaattagagcagtcacacccacggttgaaagagcaagaaggacgcaaggctgcgaggaggagcgcggaggccaggcagagcccagcggctgcggagcagtggaggaagtggcagagagacaaggagaagctgcgagaattagaactgcagcgtcagcgtgacttgcataagatcaagcagcttcagcagacggtgagagacctggagtcgaaggacgaggtgcctggcagccgcctccacctaggttctgcccgcagggctgccggctcggatgcggaccacctccgggaacagcagcgagagctggaggcgatgaggcagcggctgctctctgccgcccggcttctcaccagcttcaccagccaggccgtggacaggacagttaatgattggacgtcatccaatgagaaagcagtgatgtctttactgcacacgttggaggagctgaagtctgacttgagcaggcccacctcctcccagaaaaaaatggcagcagagctgcagttccagtttgtggacgtcctgctgaaagacaatgtttccctcacaaaagcgctcagcacggtgacccaggagaagctggagctgagcagagccgtgtctaagcttgagaagttgctgaagcaccatctgcagaagggctgcagcccaagcaggtcggaaaggtctgcttggaagccagacgaaacggctccacagagttccctgaggcgcccagaccccggccggcttccaccagctgccagcgaggaagcacacaccagcaatgtcaagatggaaaaattgtacctgcattacttgagagcagagagctttagaaaagctctgatttatcaaaagaagtatcttttgctgttgattggtggattccaggattctgaacaagaaacactctccatgattgcccatttgggggtatttccttccaaagcagaacggaaaatcacatctcgtcctttcaccaggttccgcacggccgtcagggtggtcattgcaatattaagattacgttttttggttaagaaatggcaagaagtagatcggaaaggagctctggcacaaggcaaagcccctcgcccagggccccgagcacgacagccgcagtctccacccagaaccagagagtcccccccaacccgggatgtaccctctggccacaccagggaccctgccagaggccgcagactggcagcagcagcctccccacacagtgggggaagagccactccatccccaaattcaagattagaaagatccctgactgcttctcaagatccagaacattccttgacagagtatattcaccatttagaagtgatccagcaaagattgggaggggtactaccagattctacttcaaagaaatcctgccacccgatgattaaacagtgaataaaatgtcatggctctttcctgcgacaattctatttgaggaaaagatttgtttttcccttttcccaaggaagctcgtgggacagcatgggcactactcttcatgtgcggtgacaccagcccccagatgccttgaattaagtgtcctcacctttatgcatgactgcaaagccagctggagcattttctatggagcctccgtatgttttaggcccatgaccttcgtgaggtgacgggcactcactcccatgagccctggctgtgtgctgttgtgtgcctatcggcagatccatccttcctgcctccaaggaggatacacagagaatggcttcctgttgttttgtttattttcttaacgtgtacagatggaaacttcatttaaaaataaaaacaaaacaactcaaaaaggaataaaatttaatcactgttttgtttgtgaata

SEQ ID NO: 459582 - DNA, 9682 bp, Homo sapiens
aagcgcgggggagggagtgtaaatagagcgaaggctgctctgtgtcagccccgtcaccgccgggcggcccgcgcggagtctgagggagatggaagttgagcaagagcagcggcgcagaaaggtggaggccgggaggacgaagcttgctcacttccgacagagaaaaacaaaaggtgacagttcgcattcggagaaaaagacggcgaagaggaagggctcggctgtcgatgcgtctgtccaggaggagagtccggtaaccaaggaggacagcgcactctgtggaggaggggacatttgcaaaagcacatcatgtgacgacacccctgatggggcaggaggggcctttgcagctcagccggaggactgtgatggagagaagagagaggacttggaacagctgcagcagaagcaagtcaatgaccatcctccagagcagtgtgggatgttcacagtcagtgaccacccaccagaacagcatgggatgttcacagtcggtgaccacccaccagaacagcgtgggatgttcacaagtcagtgaccacccaccagaacagcgtgggatgttcacaatcagtgaccaccaaccggaacagcgtgggatgttcacagtcagtgaccacacaccagaacagcgtgggatcttcacaatcagtgaccacccagcagaacagcgtgggatgttcacaaaggagtgtgaacaagaatgtgaacttgccattactgacctggagagcggccgtgaagatgaggctggcctgcatcagagtcagaggccttttctccgccgcaggccgtgcatggccttgagctggaggcgctgcgcctgagtctgagcaacatgcacacggcgcagctggagctgacacaggccaacctccagaaggagaaggagacggcattgacggagctgcgggagatgctcaacagccggcgtgcccaggagctggccctgctacagagcaggcagcagcacgagctggagctcctcagggagcagcacgcacgggagaaggaggaggtggtgctcaggtgtggacaggaagcagctgagctgaaggagaagttacaatcagaaatggagaaaaacgcccagatagtaaagaccctgaaggaagattgggaatctgaaaaagatttatgtttagaaaatctacgcaaagaactgtctgcaaagcatcaatcagaaatggaggatttacaaaaccagtttcagaaagaattggcagaacagagagctgagttggagaagatttttcaagacaaaaaccaggctgaacgggcccttaggaacctggagagtcatcatcaagcagccattgagaagttacgtgaagacctgcagtccgagcacggccggtgtttagaagacttggagttcaagttcaaagagagcgagaaagaaaaacagctggagttagagaatcttcaagcatcatatgaagacctgaaggcacaatcacaagaagagatcaggcgcttgtggtcccagcttgattctgccaggaccagtagacaggaattgagtgagctacatgagcaactcctggcgcgcacctctcgtgtggaagatttagaacagctgaagcagcgagaaaaaacccagcatgagtccgaactggagcaactgaggatttattttgaaaagaagttaagggatgctgagaaaacttaccaagaagacctaaccctgttacagcagaggctgcagggggcgagggaagatgctcttctggactctgtggaagttgggttgtcctgtgtgggtttagaagagaaacctgagaaaggaagaaaagatcacgttgatgaactcgagcctgagcgacataaggagagcctgccacgcttccaggcggagttagaagaaagccacaggcaccagctggaagcgctggagtctcccctctgcatccagcacgaggggcatgtctcagacagatgctgcgtagagacttcagcattgggacacgagtggcgtctggaaccctctgaagggcacagccaagagcttccctgggtgcatctccagggtgtgcaggacggggacttggaggccgacacagagcgggcagccagagtcttgggtctggaaactgagcacaaggtgcaactttcgcttcttcagactgagctcaaagaagaaattgaactcctaaaaatagaaaatagaaatttgtttgagaagttgcagcatgaaactcgtctgaaggacgatttggagaaggtaaaacacaatctaattgaagaccaccagaaggaactaaataatgctaagcaaaagactgagctgatgaaacaggaattccaaagaaaagaaacggactggaaagttatgaaggaggagctacagcgggaagctgaggagaagttaacattgatgctacttgaactgagagaaaaggctgaatccgagaaacagaccatcataaacaagttggagcttcgagaagctgaaatgaggcagcttcaggaccaacaggcagcgcagatcctggatctggagaggtccttgacggagcagcaggcccgcctgcagcagctggaacaggacctcacttcagacgacgccctgcattgcagccagtgtgggcgggagccgcccacagcccaggacggggagcttgccgcgctccacgtgaaggaagactgcgccctgcagctgatgctggcccggagcaggtttttagaggaacgtaaagagatcgccgagaaattcagtgcggaacaagatgccttcctgcagctcctccaggagagacaccagcagcagctcctgtcagtgacggcggagctcgaggccagacaccaggccgcgttgggcgagctgacagcctccttagagagcaagcagggggctctgctggctgcacgtgtggccgaactgcagaccaaacacgctgccgacctcggcgctctggagaccagacatctgtccagccttgattctttggaatcctgttacctgtctgaatttcagaccatccgtgaggagcacaggcaggccctagagctcttacgagcagactttgaggaacaactgtggaaaaaggactctcttcaccaaacgattttgactcaagagttggagaaactgaagcggaaacacgaaggggagctacagtctgtgcgggaccacctgcgaaccgaagcgagcacagagctcgccggaaccgtggctcacgagctgcagggagtgcaccagggtgaatttggaagtgaaaagaaaactgctttgcatgaaaaagaggagacacttcggcttcagagtgcacaggcacagccttttcaccaagaggagaaagagtctttgtctctgcagcttcaaaagaagaatcaccaagtccagcagctgaaagaccaggttttatccttaagtcacgagatagaagagtgccgctccgagttggaggtgctgcagcagaggcgggagcgggagaaccgggaaggcgcaaacctcctctccatgctcaaggccgacgtcaacctgtcccacagcgaaagaggggccctccaggacgccctgcgcaggctgctgggtttgtttggagagacgctgagggcagccgtcaccctgaggagccggatcggggagcgcgtggggctctgcctggatgacgcgggcgcaggcctggccctgtcgacagctccggcgctggaggagacatggtctgatgtggccctcccggagttggacagaactttgtctgaatgtgcagagatgtcttccgtggctgaaattagcagccacatgcgtgaaagctttctcatgagcccagaaagtgtgcgggagtgtgagcagcccatccggagggtcttccagagcctcagcctggccgtggacggcctcatggagatggccctggactccagcaggcagctggaagaagcacgccaacttcattctcgttttgaaaaagaatttagttttaagaatgaggagacagcacaggttgtcaggaagcaccaggagctgctggagtgtttgacggaggagagcgcagcaaaggcagagctggcgctggagctgcacaagactcagggtacccttgagggattcaaggtggagacagcagatctgaaggaggtgctggccgggaaggaggattccgagcaccgtctggtgctggagctggagagcctgagacggcagctgcagcaggcggcccaggagcaggcggcgctgagggaggagtgcacccgtctgtggagtcggggggaggccacagccacggacgccgaggccagagaagctgctctccggaaggaagtggaggatctgaccaaagaacagtcggagaccaggaagcaggctgagaaggaccgctcagccctgctctcccagatgaagattttggagtctgagttagaagaacagctgtctcagcatcgcgggtgtgccaagcaggcggaggccgtcactgccctggaacagcaggtggcatctctggacaagcatttgcgcaaccagcggcaattcatggatgagcaggcagccgagcgggagcacgagcgcgaggagttccagcaggagattcagaggctggaggggcagctccgccaggcggccaagccgcagccctggggccctcgcgacagccagcaggcgccgctggatggagaggttgagttgttacaacaaaagttgagagaaaagttggatgaatttaatgaattggctatacagaaagagtcggcagatagacaagtgttaatgcaggaagaagaaattaaacgtctggaggagatgaacatcaacatcaggaaaaaagtggcccagctccaggaagaagtggaaaaacagaaaaacatcgtgaaagggctggaacaggataaagaggtgttaaagaaacagcagatgagtagcttgcttctggcgtccacgttgcagtctacactagatgcaggcagatgtcccgagcctccttcgggcagccctcctgagggtccagaaatacagttagaggtgacacagagagcactcctgcggcgcgagagcgaggttttggacttaaaagaacagctagaaaagatgaaaggtgacttagaaagtaaaaatgaagaaatactacatctgaacttaaaattggacatgcagaacagccagactgctgtcagcctcagagaacttgaggaagagaacacgagcttgaaggtcatatataccagaagttctgagattgaagagctgaaagccactattgaaaatctgcaagagaatcagaaacgattacaaaaggagaaagcagaggaaattgaacaactccatgaagtcattgagaagctgcagcacgagctgtccctcatggggcctgtggtgcacgaagtcagcgacagtcaggctggcagtctgcagagcgagctgctctgctcccaggccgggggccctcgtgggcaggccctacagggcgagctcgaggctgcgctggaagccaaggaggccctgagccggctgctggctgaccaggagcgcaggcacagccaggccctggaggccctgcagcagcgcctccagggcgcagaggaggctgcggagctacagctggctgagctggagcgcaatgtagccctcagggaggctgaggtcgaagacatggcctcccggatccaggagttcgaagcggccctgaaagcaaaggaagcgacgattgccgagagaaatttagaaatcgacgctctgaaccagcggaaggcggcccactctgccgagctggaggccgtcctgttggccttggcccgcatccgccgcgccctggagcagcagcccctggcagccggggcggcgcctcccgagctgcagtggctccgagcgcagtgtgcccgcctcagccgccagctgcaggtgctgcaccagcggttcctgaggtgccaggtggagctggacaggcggcaggcccgcagagccacagctcacacacgggtgcccggggcccacccacagcctcgcatggatggtggcgccaaggcccaggtcaccggcgacgtggaggcctcccatgatgctgctttggagccggttgtccctgacccacagggtgatctgcagcctgtcctggtgacgttgaaggatgcacctctctgcaagcaagaaggcgtgatgtcagtgctcaccgtctgccagaggcagctgcagtcggagctgctcttggtgaaaaatgaaatgcgcctgagtctggaggacggcggcaagggtaaagaaaaagtactggaagattgtcagctgccgaaggtcgatctcgtagctcaggtgaaacagcttcaggaaaaactgaaccgtttgctgtattccatgaccttccagaatgtggatgctgccgacaccaaatctctgtggcccatggcctcagcacacctgttggagagcagctggagtgatgattcctgtgacggagaagagcctgacatatcaccccacatagacacatgtgatgccaatacagccacggggggtgtaactgatgttatcaaaaatcaggccatagacgcgtgtgatgccaatacaaccccagggggtgtaactgatgttatcaaaaattgggattccttgataccagatgaaatgccagattctcccattcaagaaaaatcagaatgtcaggacatgtctctttcttcaccgaccagcgtacttggtggctcccgccaccagagccacactgcagaggctgggccccggaagagcccggtcgggatgctggacctgtcttcctggagctcccctgaggtcctcaggaaggactggaccctggagccctggcccagcctccccgtgacaccccactcaggagccctgagcctgtgcagtgccgacacatccctgggggacagggcggacacctcgctgccacagacccaggggccggggctgctttgttccccaggcgtgtctgcagcagcgctggcactgcagtgggccgagtctccgccggctgacgaccaccatgtgcagaggacggctgtggagaaagatgtcgaagattttatcacaacatcctttgattctcaagaaacattaagttcacctcctcctggattagaaggaaaagctgatagaagtgagaaaagtgacggctcgggttttggagcaagactgagcccggggtcaggaggccctgaggctcaaactgctggtcctgtgacccctgcttccatctctggaaggtttcagccgctgccggaagccatgaaggagaaggaagtgcgtccgaagcacgtgaaggctttactgcagatggtgcgtgacgagagccaccagatcctggcgctgtcagaaggccttgcacccccaagcggcgagccacacccaccccggaaggaagacgagatacaggacatctcgctccatgggggaaagacgcaggaagtgcccaccgcgtgccccgattggagaaggagctgcgtatcgagcactcacgctgcgaggccttgctggctcaggagcggagccagctctctgagctccagaaggaccttgcggctgagaagagccgcaccctggagctgtcagaggccttgcggcacgagcggctcctgaccgagcagctgagccagaggacacaggaggcttgcgtgcaccaggacacacaggcccatcacgctctgctgcagaagctgaaggaggagaagtcccgggtggtggacttgcaagcgatgcttgaaaaggtgcagcagcaagccctgcattctcagcagcagcttgaggctgaggctcagaagcactgtgaggcgctcaggagagagaaggaggtaagtgccacactgaagtcgacggtggaagccctgcacacccaaaaacgagagctgagatgctctctggagagagagagggagaaaccagcgtggttgcaggcagaattagagcagtcacacccacggttgaaagagcaagaaggacgcaaggctgcgaggaggagcgcggaggccaggcagagcccagcggctgcggagcagtggaggaagtggcagagagacaaggagaagctgcgagaattagaactgcagcgtcagcgtgacttgcataagatcaagcagcttcagcagacggtgagagacctggagtcgaaggacgaggtgcctggcagccgcctccacctaggttctgcccgcagggctgccggctcggatgcggaccacctccgggaacagcagcgagagctggaggcgatgaggcagcggctgctctctgccgcccggcttctcaccagcttcaccagccaggccgtggacaggacagttaatgattggacgtcatccaatgagaaagcagtgatgtctttactgcacacgttggaggagctgaagtctgacttgagcaggcccacctcctcccagaaaaaaatggcagcagagctgcagttccagtttgtggacgtcctgctgaaagacaatgtttccctcacaaaagcgctcagcacggtgacccaggagaagctggagctgagcagagccgtgtctaagcttgagaagttgctgaagcaccatctgcagaagggctgcagcccaagcaggtcggaaaggtctgcttggaagccagacgaaacggctccacagagttccctgaggcgcccagaccccggccggcttccaccagctgccagcgaggaagcacacaccagcaatgtcaagatggaaaaattgtacctgcattacttgagagcagagagctttagaaaagctctgatttatcaaaagaagtatcttttgctgttgattggtggattccaggattctgaacaagaaacactctccatgattgcccatttgggggtatttccttccaaagcagaacggaaaatcacatctcgtcctttcaccaggttccgcacggccgtcagggtggtcattgcaatattaagattacgttttttggttaagaaatggcaagaagtagatcggaaaggagctctggcacaaggcaaagcccctcgcccagggccccgagcacgacagccgcagtctccacccagaaccagagagtcccccccaacccgggatgtaccctctggccacaccagggaccctgccagaggccgcagactggcagcagcagcctccccacacagtgggggaagagccactccatccccaaattcaagattagaaagatccctgactgcttctcaagatccagaacattccttgacagagtatattcaccatttagaagtgatccagcaaagattgggaggggtactaccagattctacttcaaagaaatcctgccacccgatgattaaacagtgaataaaatgtcatggctctttcctgcgacaattctatttgaggaaaagatttgtttttcccttttcccaaggaagctcgtgggacagcatgggcactactcttcatgtgcggtgacaccagcccccagatgccttgaattaagtgtcctcacctttatgcatgactgcaaagccagctggagcattttctatggagcctccgtatgttttaggcccatgaccttcgtgaggtgacgggcactcactcccatgagccctggctgtgtgctgttgtgtgcctatcggcagatccatccttcctgcctccaaggaggatacacagagaatggcttcctgttgttttgtttattttcttaacgtgtacagatggaaacttcatttaaaaataaaaacaaaacaactcaaaaaggaataaaatttaatcactgttttgtttgtgaata

SEQ ID NO: 459583 - DNA, 10952 bp, Homo sapiens
  misc_feature (7682)..(7682): n is a, c, g, or t
aagcgcgggggagggagtgtaaatagagcgaaggctgctctgtgtcagccccgtcaccgccgggcggcccgcgcggagtctgagggagatggaagttgagcaagagcagcggcgcagaaaggtggaggccgggaggacgaagcttgctcacttccgacagagaaaaacaaaaggtgacagttcgcattcggagaaaaagacggcgaagaggaagggctcggctgtcgatgcgtctgtccaggaggagagtccggtaaccaaggaggacagcgcactctgtggaggaggggacatttgcaaaagcacatcatgtgacgacacccctgatggggcaggaggggcctttgcagctcagccggaggactgtgatggagagaagagagaggacttggaacagctgcagcagaagcaagtcaatgaccatcctccagagcagtgtgggatgttcacagtcagtgaccacccaccagaacagcatgggatgttcacagtcggtgaccacccaccagaacagcgtgggatgttcacaagtcagtgaccacccaccagaacagcgtgggatgttcacaatcagtgaccaccaaccggaacagcgtgggatgttcacagtcagtgaccacacaccagaacagcgtgggatcttcacaatcagtgaccacccagcagaacagcgtgggatgttcacaaaggagtgtgaacaagaatgtgaacttgccattactgacctggagagcggccgtgaagatgaggctggcctgcatcagagtcagaggccttttctccgccgcaggccgtgcatggccttgagctggaggcgctgcgcctgagtctgagcaacatgcacacggcgcagctggagctgacacaggccaacctccagaaggagaaggagacggcattgacggagctgcgggagatgctcaacagccggcgtgcccaggagctggccctgctacagagcaggcagcagcacgagctggagctcctcagggagcagcacgcacgggagaaggaggaggtggtgctcaggtgtggacaggaagcagctgagctgaaggagaagttacaatcagaaatggagaaaaacgcccagatagtaaagaccctgaaggaagattgggaatctgaaaaagatttatgtttagaaaatctacgcaaagaactgtctgcaaagcatcaatcagaaatggaggatttacaaaaccagtttcagaaagaattggcagaacagagagctgagttggagaagatttttcaagacaaaaaccaggctgaacgggcccttaggaacctggagagtcatcatcaagcagccattgagaagttacgtgaagacctgcagtccgagcacggccggtgtttagaagacttggagttcaagttcaaagagagcgagaaagaaaaacagctggagttagagaatcttcaagcatcatatgaagacctgaaggcacaatcacaagaagagatcaggcgcttgtggtcccagcttgattctgccaggaccagtagacaggaattgagtgagctacatgagcaactcctggcgcgcacctctcgtgtggaagatttagaacagctgaagcagcgagaaaaaacccagcatgagtccgaactggagcaactgaggatttattttgaaaagaagttaagggatgctgagaaaacttaccaagaagacctaaccctgttacagcagaggctgcagggggcgagggaagatgctcttctggactctgtggaagttgggttgtcctgtgtgggtttagaagagaaacctgagaaaggaagaaaagatcacgttgatgaactcgagcctgagcgacataaggagagcctgccacgcttccaggcggagttagaagaaagccacaggcaccagctggaagcgctggagtctcccctctgcatccagcacgaggggcatgtctcagacagatgctgcgtagagacttcagcattgggacacgagtggcgtctggaaccctctgaagggcacagccaagagcttccctgggtgcatctccagggtgtgcaggacggggacttggaggccgacacagagcgggcagccagagtcttgggtctggaaactgagcacaaggtgcaactttcgcttcttcagactgagctcaaagaagaaattgaactcctaaaaatagaaaatagaaatttgtttgagaagttgcagcatgaaactcgtctgaaggacgatttggagaaggtaaaacacaatctaattgaagaccaccagaaggaactaaataatgctaagcaaaagactgagctgatgaaacaggaattccaaagaaaagaaacggactggaaagttatgaaggaggagctacagcgggaagctgaggagaagttaacattgatgctacttgaactgagagaaaaggctgaatccgagaaacagaccatcataaacaagttggagcttcgagaagctgaaatgaggcagcttcaggaccaacaggcagcgcagatcctggatctggagaggtccttgacggagcagcaggcccgcctgcagcagctggaacaggacctcacttcagacgacgccctgcattgcagccagtgtgggcgggagccgcccacagcccaggacggggagcttgccgcgctccacgtgaaggaagactgcgccctgcagctgatgctggcccggagcaggtttttagaggaacgtaaagagatcgccgagaaattcagtgcggaacaagatgccttcctgcagctcctccaggagagacaccagcagcagctcctgtcagtgacggcggagctcgaggccagacaccaggccgcgttgggcgagctgacagcctccttagagagcaagcagggggctctgctggctgcacgtgtggccgaactgcagaccaaacacgctgccgacctcggcgctctggagaccagacatctgtccagccttgattctttggaatcctgttacctgtctgaatttcagaccatccgtgaggagcacaggcaggccctagagctcttacgagcagactttgaggaacaactgtggaaaaaggactctcttcaccaaacgattttgactcaagagttggagaaactgaagcggaaacacgaaggggagctacagtctgtgcgggaccacctgcgaaccgaagcgagcacagagctcgccggaaccgtggctcacgagctgcagggagtgcaccagggtgaatttggaagtgaaaagaaaactgctttgcatgaaaaagaggagacacttcggcttcagagtgcacaggcacagccttttcaccaagaggagaaagagtctttgtctctgcagcttcaaaagaagaatcaccaagtccagcagctgaaagaccaggttttatccttaagtcacgagatagaagagtgccgctccgagttggaggtgctgcagcagaggcgggagcgggagaaccgggaaggcgcaaacctcctctccatgctcaaggccgacgtcaacctgtcccacagcgaaagaggggccctccaggacgccctgcgcaggctgctgggtttgtttggagagacgctgagggcagccgtcaccctgaggagccggatcggggagcgcgtggggctctgcctggatgacgcgggcgcaggcctggccctgtcgacagctccggcgctggaggagacatggtctgatgtggccctcccggagttggacagaactttgtctgaatgtgcagagatgtcttccgtggctgaaattagcagccacatgcgtgaaagctttctcatgagcccagaaagtgtgcgggagtgtgagcagcccatccggagggtcttccagagcctcagcctggccgtggacggcctcatggagatggccctggactccagcaggcagctggaagaagcacgccaacttcattctcgttttgaaaaagaatttagttttaagaatgaggagacagcacaggttgtcaggaagcaccaggagctgctggagtgtttgacggaggagagcgcagcaaaggcagagctggcgctggagctgcacaagactcagggtacccttgagggattcaaggtggagacagcagatctgaaggaggtgctggccgggaaggaggattccgagcaccgtctggtgctggagctggagagcctgagacggcagctgcagcaggcggcccaggagcaggcggcgctgagggaggagtgcacccgtctgtggagtcggggggaggccacagccacggacgccgaggccagagaagctgctctccggaaggaagtggaggatctgaccaaagaacagtcggagaccaggaagcaggctgagaaggaccgctcagccctgctctcccagatgaagattttggagtctgagttagaagaacagctgtctcagcatcgcgggtgtgccaagcaggcggaggccgtcactgccctggaacagcaggtggcatctctggacaagcatttgcgcaaccagcggcaattcatggatgagcaggcagccgagcgggagcacgagcgcgaggagttccagcaggagattcagaggctggaggggcagctccgccaggcggccaagccgcagccctggggccctcgcgacagccagcaggcgccgctggatggagaggttgagttgttacaacaaaagttgagagaaaagttggatgaatttaatgaattggctatacagaaagagtcggcagatagacaagtgttaatgcaggaagaagaaattaaacgtctggaggagatgaacatcaacatcaggaaaaaagtggcccagctccaggaagaagtggaaaaacagaaaaacatcgtgaaagggctggaacaggataaagaggtgttaaagaaacagcagatgagtagcttgcttctggcgtccacgttgcagtctacactagatgcaggcagatgtcccgagcctccttcgggcagccctcctgagggtccagaaatacagttagaggtgacacagagagcactcctgcggcgcgagagcgaggttttggacttaaaagaacagctagaaaagatgaaaggtgacttagaaagtaaaaatgaagaaatactacatctgaacttaaaattggacatgcagaacagccagactgctgtcagcctcagagaacttgaggaagagaacacgagcttgaaggtcatatataccagaagttctgagattgaagagctgaaagccactattgaaaatctgcaagagaatcagaaacgattacaaaaggagaaagcagaggaaattgaacaactccatgaagtcattgagaagctgcagcacgagctgtccctcatggggcctgtggtgcacgaagtcagcgacagtcaggctggcagtctgcagagcgagctgctctgctcccaggccgggggccctcgtgggcaggccctacagggcgagctcgaggctgcgctggaagccaaggaggccctgagccggctgctggctgaccaggagcgcaggcacagccaggccctggaggccctgcagcagcgcctccagggcgcagaggaggctgcggagctacagctggctgagctggagcgcaatgtagccctcagggaggctgaggtcgaagacatggcctcccggatccaggagttcgaagcggccctgaaagcaaaggaagcgacgattgccgagagaaatttagaaatcgacgctctgaaccagcggaaggcggcccactctgccgagctggaggccgtcctgttggccttggcccgcatccgccgcgccctggagcagcagcccctggcagccggggcggcgcctcccgagctgcagtggctccgagcgcagtgtgcccgcctcagccgccagctgcaggtgctgcaccagcggttcctgaggtgccaggtggagctggacaggcggcaggcccgcagagccacagctcacacacgggtgcccggggcccacccacagcctcgcatggatggtggcgccaaggcccaggtcaccggcgacgtggaggcctcccatgatgctgctttggagccggttgtccctgacccacagggtgatctgcagcctgtcctggtgacgttgaaggatgcacctctctgcaagcaagaaggcgtgatgtcagtgctcaccgtctgccagaggcagctgcagtcggagctgctcttggtgaaaaatgaaatgcgcctgagtctggaggacggcggcaagggtaaagaaaaagtactggaagattgtcagctgccgaaggtcgatctcgtagctcaggtgaaacagcttcaggaaaaactgaaccgtttgctgtattccatgaccttccagaatgtggatgctgccgacaccaaatctctgtggcccatggcctcagcacacctgttggagagcagctggagtgatgattcctgtgacggagaagagcctgacatatcaccccacatagacacatgtgatgccaatacagccacggggggtgtaactgatgttatcaaaaatcaggccatagacgcgtgtgatgccaatacaaccccagggggtgtaactgatgttatcaaaaattgggattccttgataccagatgaaatgccagattctcccattcaagaaaaatcagaatgtcaggacatgtctctttcttcaccgaccagcgtacttggtggctcccgccaccagagccacactgcagaggctgggccccggaagagcccggtcgggatgctggacctgtcttcctggagctcccctgaggtcctcaggaaggactggaccctggagccctggcccagcctccccgtgacaccccactcaggagccctgagcctgtgcagtgccgacacatccctgggggacagggcggacacctcgctgccacagacccaggggccggggctgctttgttccccaggcgtgtctgcagcagcgctggcactgcagtgggccgagtctccgccggctgacgaccaccatgtgcagaggacggctgtggagaaagatgtcgaagattttatcacaacatcctttgattctcaagaaacattaagttcacctcctcctggattagaaggaaaagctgatagaagtgagaaaagtgacggctcgggttttggagcaagactgagcccggggtcaggaggccctgaggctcaaactgctggtcctgtgacccctgcttccatctctggaaggtttcagccgctgccggaagccatgaaggagaaggaagtgcgtccgaagcacgtgaaggctttactgcagatggtgcgtgacgagagccaccagatcctggcgctgtcagaaggccttgcacccccaagcggcgagccacacccaccccggaaggaagacgagatacaggacatctcgctccatgggggaaagacgcaggaagtgcccaccgcgtgccccgattggagaggggaccttctgcaggttgtgcaagaggcctttgaaaaagagcaggagatgcagggggttgagctgcagccccgactcagtggctcagatctggggggtcacagctccctgctcgaaaggctggagaagatcatccgtgagcagggagacctgcaggaaaagtccctggagcatcttcgcttgccggaccggagcagcctgctgtccgagatccaggcgctgcgtgcccagctgcgcatgacgcacctgcagaaccaggagaagctgcagcacttgcgcacggcgctgacaagcncagaggcgcgcgggagccagcaggagcaccagctgcgcaggcaggttgaactgctggcttataaagtagagcaggagaagtgcattgctggtgacttgcagaagacgctgagtgaagagcaagagaaggcaaacagcgtgcagaagctcctggcggcggagcagactgtagtgcgagatttgaagtccgacctctgtgagagcaggcagaagagcgaacagctgtcccggtccctctgcgaggtgcagcaggaggtcctccagctgagatccatgctgagcagtaaggagaacgagctgaaggccgcgcttcaggagctggagagtgagcaggggaaggggcgtgccctgcagagccagctggaggaggagcagctgcggcacctgcagagggagagccagagtgccaaggccctggaggagctgcgggcgtctttggagacacagcgtgctcagagcagtcgactctgcgtggcactgaaacacgagcagacggccaaggacaacctgcagaaggagctgcgtatcgagcactcacgctgcgaggccttgctggctcaggagcggagccagctctctgagctccagaaggaccttgcggctgagaagagccgcaccctggagctgtcagaggccttgcggcacgagcggctcctgaccgagcagctgagccagaggacacaggaggcttgcgtgcaccaggacacacaggcccatcacgctctgctgcagaagctgaaggaggagaagtcccgggtggtggacttgcaagcgatgcttgaaaaggtgcagcagcaagccctgcattctcagcagcagcttgaggctgaggctcagaagcactgtgaggcgctcaggagagagaaggaggtaagtgccacactgaagtcgacggtggaagccctgcacacccaaaaacgagagctgagatgctctctggagagagagagggagaaaccagcgtggttgcaggcagaattagagcagtcacacccacggttgaaagagcaagaaggacgcaaggctgcgaggaggagcgcggaggccaggcagagcccagcggctgcggagcagtggaggaagtggcagagagacaaggagaagctgcgagaattagaactgcagcgtcagcgtgacttgcataagatcaagcagcttcagcagacggtgagagacctggagtcgaaggacgaggtgcctggcagccgcctccacctaggttctgcccgcagggctgccggctcggatgcggaccacctccgggaacagcagcgagagctggaggcgatgaggcagcggctgctctctgccgcccggcttctcaccagcttcaccagccaggccgtggacaggacagttaatgattggacgtcatccaatgagaaagcagtgatgtctttactgcacacgttggaggagctgaagtctgacttgagcaggcccacctcctcccagaaaaaaatggcagcagagctgcagttccagtttgtggacgtcctgctgaaagacaatgtttccctcacaaaagcgctcagcacggtgacccaggagaagctggagctgagcagagccgtgtctaagcttgagaagttgctgaagcaccatctgcagaagggctgcagcccaagcaggtcggaaaggtctgcttggaagccagacgaaacggctccacagagttccctgaggcgcccagaccccggccggcttccaccagctgccagcgaggaagcacacaccagcaatgtcaagatggaaaaattgtacctgcattacttgagagcagagagctttagaaaagctctgatttatcaaaagaagtatcttttgctgttgattggtggattccaggattctgaacaagaaacactctccatgattgcccatttgggggtatttccttccaaagcagaacggaaaatcacatctcgtcctttcaccaggttccgcacggccgtcagggtggtcattgcaatattaagattacgttttttggttaagaaatggcaagaagtagatcggaaaggagctctggcacaaggcaaagcccctcgcccagggccccgagcacgacagccgcagtctccacccagaaccagagagtcccccccaacccgggatgtaccctctggccacaccagggaccctgccagaggccgcagactggcagcagcagcctccccacacagtgggggaagagccactccatccccaaattcaagattagaaagatccctgactgcttctcaagatccagaacattccttgacagagtatattcaccatttagaagtgatccagcaaagattgggaggggtactaccaggtaatgcaagtcctcgccgagtatttattaagctgattatcactgtaccctggaaacgtagggtctgttgaaagatggctggtattcagcttagtaaccaaagtttcagtctgaacaatcagtgtcactaatagtattagaatagaggctacaagtgaagaatctcacagaagtctaagccagtgtactcagtgatacgtgctgaggtcagtttgacttaatcaccgtctggacttttttgtcctttctcttacattgatagcgaacataaagattatatttcgaccaggatataatttgttcagtgtttcttaaatatcataatttaaaccactgtataattcatatttttaccaaaatttacatgaattcagtgatagtgtttcaaaattgtggaattcttttcaaaaaatctgtgaagccttgtaaccaatttgctgcctcatttttatttatatgcagattctacttcaaagaaatcctgccacccgatgattaaacagtgaataaaatgtcatggctctttcctgcgacaattctatttgaggaaaagatttgtttttcccttttcccaaggaagctcgtgggacagcatgggcactactcttcatgtgcggtgacaccagcccccagatgccttgaattaagtgtcctcacctttatgcatgactgcaaagccagctggagcattttctatggagcctccgtatgttttaggcccatgaccttcgtgaggtgacgggcactcactcccatgagccctggctgtgtgctgttgtgtgcctatcggcagatccatccttcctgcctccaaggaggatacacagagaatggcttcctgttgttttgtttattttcttaacgtgtacagatggaaacttcatttaaaaataaaaacaaaacaactcaaaaaggaataaaatttaatcactgttttgtttgtgaata

SEQ ID NO: 459584 - DNA, 11129 bp, Homo sapiens
  misc_feature (7682)..(7682): n is a, c, g, or t
  misc_feature (10930)..(10931): n is a, c, g, or t
  misc_feature (10951)..(10951): n is a, c, g, or t
  misc_feature (10960)..(10960): n is a, c, g, or t
  misc_feature (11045)..(11045): n is a, c, g, or t
aagcgcgggggagggagtgtaaatagagcgaaggctgctctgtgtcagccccgtcaccgccgggcggcccgcgcggagtctgagggagatggaagttgagcaagagcagcggcgcagaaaggtggaggccgggaggacgaagcttgctcacttccgacagagaaaaacaaaaggtgacagttcgcattcggagaaaaagacggcgaagaggaagggctcggctgtcgatgcgtctgtccaggaggagagtccggtaaccaaggaggacagcgcactctgtggaggaggggacatttgcaaaagcacatcatgtgacgacacccctgatggggcaggaggggcctttgcagctcagccggaggactgtgatggagagaagagagaggacttggaacagctgcagcagaagcaagtcaatgaccatcctccagagcagtgtgggatgttcacagtcagtgaccacccaccagaacagcatgggatgttcacagtcggtgaccacccaccagaacagcgtgggatgttcacaagtcagtgaccacccaccagaacagcgtgggatgttcacaatcagtgaccaccaaccggaacagcgtgggatgttcacagtcagtgaccacacaccagaacagcgtgggatcttcacaatcagtgaccacccagcagaacagcgtgggatgttcacaaaggagtgtgaacaagaatgtgaacttgccattactgacctggagagcggccgtgaagatgaggctggcctgcatcagagtcagaggccttttctccgccgcaggccgtgcatggccttgagctggaggcgctgcgcctgagtctgagcaacatgcacacggcgcagctggagctgacacaggccaacctccagaaggagaaggagacggcattgacggagctgcgggagatgctcaacagccggcgtgcccaggagctggccctgctacagagcaggcagcagcacgagctggagctcctcagggagcagcacgcacgggagaaggaggaggtggtgctcaggtgtggacaggaagcagctgagctgaaggagaagttacaatcagaaatggagaaaaacgcccagatagtaaagaccctgaaggaagattgggaatctgaaaaagatttatgtttagaaaatctacgcaaagaactgtctgcaaagcatcaatcagaaatggaggatttacaaaaccagtttcagaaagaattggcagaacagagagctgagttggagaagatttttcaagacaaaaaccaggctgaacgggcccttaggaacctggagagtcatcatcaagcagccattgagaagttacgtgaagacctgcagtccgagcacggccggtgtttagaagacttggagttcaagttcaaagagagcgagaaagaaaaacagctggagttagagaatcttcaagcatcatatgaagacctgaaggcacaatcacaagaagagatcaggcgcttgtggtcccagcttgattctgccaggaccagtagacaggaattgagtgagctacatgagcaactcctggcgcgcacctctcgtgtggaagatttagaacagctgaagcagcgagaaaaaacccagcatgagtccgaactggagcaactgaggatttattttgaaaagaagttaagggatgctgagaaaacttaccaagaagacctaaccctgttacagcagaggctgcagggggcgagggaagatgctcttctggactctgtggaagttgggttgtcctgtgtgggtttagaagagaaacctgagaaaggaagaaaagatcacgttgatgaactcgagcctgagcgacataaggagagcctgccacgcttccaggcggagttagaagaaagccacaggcaccagctggaagcgctggagtctcccctctgcatccagcacgaggggcatgtctcagacagatgctgcgtagagacttcagcattgggacacgagtggcgtctggaaccctctgaagggcacagccaagagcttccctgggtgcatctccagggtgtgcaggacggggacttggaggccgacacagagcgggcagccagagtcttgggtctggaaactgagcacaaggtgcaactttcgcttcttcagactgagctcaaagaagaaattgaactcctaaaaatagaaaatagaaatttgtttgagaagttgcagcatgaaactcgtctgaaggacgatttggagaaggtaaaacacaatctaattgaagaccaccagaaggaactaaataatgctaagcaaaagactgagctgatgaaacaggaattccaaagaaaagaaacggactggaaagttatgaaggaggagctacagcgggaagctgaggagaagttaacattgatgctacttgaactgagagaaaaggctgaatccgagaaacagaccatcataaacaagttggagcttcgagaagctgaaatgaggcagcttcaggaccaacaggcagcgcagatcctggatctggagaggtccttgacggagcagcaggcccgcctgcagcagctggaacaggacctcacttcagacgacgccctgcattgcagccagtgtgggcgggagccgcccacagcccaggacggggagcttgccgcgctccacgtgaaggaagactgcgccctgcagctgatgctggcccggagcaggtttttagaggaacgtaaagagatcgccgagaaattcagtgcggaacaagatgccttcctgcagctcctccaggagagacaccagcagcagctcctgtcagtgacggcggagctcgaggccagacaccaggccgcgttgggcgagctgacagcctccttagagagcaagcagggggctctgctggctgcacgtgtggccgaactgcagaccaaacacgctgccgacctcggcgctctggagaccagacatctgtccagccttgattctttggaatcctgttacctgtctgaatttcagaccatccgtgaggagcacaggcaggccctagagctcttacgagcagactttgaggaacaactgtggaaaaaggactctcttcaccaaacgattttgactcaagagttggagaaactgaagcggaaacacgaaggggagctacagtctgtgcgggaccacctgcgaaccgaagcgagcacagagctcgccggaaccgtggctcacgagctgcagggagtgcaccagggtgaatttggaagtgaaaagaaaactgctttgcatgaaaaagaggagacacttcggcttcagagtgcacaggcacagccttttcaccaagaggagaaagagtctttgtctctgcagcttcaaaagaagaatcaccaagtccagcagctgaaagaccaggttttatccttaagtcacgagatagaagagtgccgctccgagttggaggtgctgcagcagaggcgggagcgggagaaccgggaaggcgcaaacctcctctccatgctcaaggccgacgtcaacctgtcccacagcgaaagaggggccctccaggacgccctgcgcaggctgctgggtttgtttggagagacgctgagggcagccgtcaccctgaggagccggatcggggagcgcgtggggctctgcctggatgacgcgggcgcaggcctggccctgtcgacagctccggcgctggaggagacatggtctgatgtggccctcccggagttggacagaactttgtctgaatgtgcagagatgtcttccgtggctgaaattagcagccacatgcgtgaaagctttctcatgagcccagaaagtgtgcgggagtgtgagcagcccatccggagggtcttccagagcctcagcctggccgtggacggcctcatggagatggccctggactccagcaggcagctggaagaagcacgccaacttcattctcgttttgaaaaagaatttagttttaagaatgaggagacagcacaggttgtcaggaagcaccaggagctgctggagtgtttgacggaggagagcgcagcaaaggcagagctggcgctggagctgcacaagactcagggtacccttgagggattcaaggtggagacagcagatctgaaggaggtgctggccgggaaggaggattccgagcaccgtctggtgctggagctggagagcctgagacggcagctgcagcaggcggcccaggagcaggcggcgctgagggaggagtgcacccgtctgtggagtcggggggaggccacagccacggacgccgaggccagagaagctgctctccggaaggaagtggaggatctgaccaaagaacagtcggagaccaggaagcaggctgagaaggaccgctcagccctgctctcccagatgaagattttggagtctgagttagaagaacagctgtctcagcatcgcgggtgtgccaagcaggcggaggccgtcactgccctggaacagcaggtggcatctctggacaagcatttgcgcaaccagcggcaattcatggatgagcaggcagccgagcgggagcacgagcgcgaggagttccagcaggagattcagaggctggaggggcagctccgccaggcggccaagccgcagccctggggccctcgcgacagccagcaggcgccgctggatggagaggttgagttgttacaacaaaagttgagagaaaagttggatgaatttaatgaattggctatacagaaagagtcggcagatagacaagtgttaatgcaggaagaagaaattaaacgtctggaggagatgaacatcaacatcaggaaaaaagtggcccagctccaggaagaagtggaaaaacagaaaaacatcgtgaaagggctggaacaggataaagaggtgttaaagaaacagcagatgagtagcttgcttctggcgtccacgttgcagtctacactagatgcaggcagatgtcccgagcctccttcgggcagccctcctgagggtccagaaatacagttagaggtgacacagagagcactcctgcggcgcgagagcgaggttttggacttaaaagaacagctagaaaagatgaaaggtgacttagaaagtaaaaatgaagaaatactacatctgaacttaaaattggacatgcagaacagccagactgctgtcagcctcagagaacttgaggaagagaacacgagcttgaaggtcatatataccagaagttctgagattgaagagctgaaagccactattgaaaatctgcaagagaatcagaaacgattacaaaaggagaaagcagaggaaattgaacaactccatgaagtcattgagaagctgcagcacgagctgtccctcatggggcctgtggtgcacgaagtcagcgacagtcaggctggcagtctgcagagcgagctgctctgctcccaggccgggggccctcgtgggcaggccctacagggcgagctcgaggctgcgctggaagccaaggaggccctgagccggctgctggctgaccaggagcgcaggcacagccaggccctggaggccctgcagcagcgcctccagggcgcagaggaggctgcggagctacagctggctgagctggagcgcaatgtagccctcagggaggctgaggtcgaagacatggcctcccggatccaggagttcgaagcggccctgaaagcaaaggaagcgacgattgccgagagaaatttagaaatcgacgctctgaaccagcggaaggcggcccactctgccgagctggaggccgtcctgttggccttggcccgcatccgccgcgccctggagcagcagcccctggcagccggggcggcgcctcccgagctgcagtggctccgagcgcagtgtgcccgcctcagccgccagctgcaggtgctgcaccagcggttcctgaggtgccaggtggagctggacaggcggcaggcccgcagagccacagctcacacacgggtgcccggggcccacccacagcctcgcatggatggtggcgccaaggcccaggtcaccggcgacgtggaggcctcccatgatgctgctttggagccggttgtccctgacccacagggtgatctgcagcctgtcctggtgacgttgaaggatgcacctctctgcaagcaagaaggcgtgatgtcagtgctcaccgtctgccagaggcagctgcagtcggagctgctcttggtgaaaaatgaaatgcgcctgagtctggaggacggcggcaagggtaaagaaaaagtactggaagattgtcagctgccgaaggtcgatctcgtagctcaggtgaaacagcttcaggaaaaactgaaccgtttgctgtattccatgaccttccagaatgtggatgctgccgacaccaaatctctgtggcccatggcctcagcacacctgttggagagcagctggagtgatgattcctgtgacggagaagagcctgacatatcaccccacatagacacatgtgatgccaatacagccacggggggtgtaactgatgttatcaaaaatcaggccatagacgcgtgtgatgccaatacaaccccagggggtgtaactgatgttatcaaaaattgggattccttgataccagatgaaatgccagattctcccattcaagaaaaatcagaatgtcaggacatgtctctttcttcaccgaccagcgtacttggtggctcccgccaccagagccacactgcagaggctgggccccggaagagcccggtcgggatgctggacctgtcttcctggagctcccctgaggtcctcaggaaggactggaccctggagccctggcccagcctccccgtgacaccccactcaggagccctgagcctgtgcagtgccgacacatccctgggggacagggcggacacctcgctgccacagacccaggggccggggctgctttgttccccaggcgtgtctgcagcagcgctggcactgcagtgggccgagtctccgccggctgacgaccaccatgtgcagaggacggctgtggagaaagatgtcgaagattttatcacaacatcctttgattctcaagaaacattaagttcacctcctcctggattagaaggaaaagctgatagaagtgagaaaagtgacggctcgggttttggagcaagactgagcccggggtcaggaggccctgaggctcaaactgctggtcctgtgacccctgcttccatctctggaaggtttcagccgctgccggaagccatgaaggagaaggaagtgcgtccgaagcacgtgaaggctttactgcagatggtgcgtgacgagagccaccagatcctggcgctgtcagaaggccttgcacccccaagcggcgagccacacccaccccggaaggaagacgagatacaggacatctcgctccatgggggaaagacgcaggaagtgcccaccgcgtgccccgattggagaggggaccttctgcaggttgtgcaagaggcctttgaaaaagagcaggagatgcagggggttgagctgcagccccgactcagtggctcagatctggggggtcacagctccctgctcgaaaggctggagaagatcatccgtgagcagggagacctgcaggaaaagtccctggagcatcttcgcttgccggaccggagcagcctgctgtccgagatccaggcgctgcgtgcccagctgcgcatgacgcacctgcagaaccaggagaagctgcagcacttgcgcacggcgctgacaagcncagaggcgcgcgggagccagcaggagcaccagctgcgcaggcaggttgaactgctggcttataaagtagagcaggagaagtgcattgctggtgacttgcagaagacgctgagtgaagagcaagagaaggcaaacagcgtgcagaagctcctggcggcggagcagactgtagtgcgagatttgaagtccgacctctgtgagagcaggcagaagagcgaacagctgtcccggtccctctgcgaggtgcagcaggaggtcctccagctgagatccatgctgagcagtaaggagaacgagctgaaggccgcgcttcaggagctggagagtgagcaggggaaggggcgtgccctgcagagccagctggaggaggagcagctgcggcacctgcagagggagagccagagtgccaaggccctggaggagctgcgggcgtctttggagacacagcgtgctcagagcagtcgactctgcgtggcactgaaacacgagcagacggccaaggacaacctgcagaaggagctgcgtatcgagcactcacgctgcgaggccttgctggctcaggagcggagccagctctctgagctccagaaggaccttgcggctgagaagagccgcaccctggagctgtcagaggccttgcggcacgagcggctcctgaccgagcagctgagccagaggacacaggaggcttgcgtgcaccaggacacacaggcccatcacgctctgctgcagaagctgaaggaggagaagtcccgggtggtggacttgcaagcgatgcttgaaaaggtgcagcagcaagccctgcattctcagcagcagcttgaggctgaggctcagaagcactgtgaggcgctcaggagagagaaggaggtaagtgccacactgaagtcgacggtggaagccctgcacacccaaaaacgagagctgagatgctctctggagagagagagggagaaaccagcgtggttgcaggcagaattagagcagtcacacccacggttgaaagagcaagaaggacgcaaggctgcgaggaggagcgcggaggccaggcagagcccagcggctgcggagcagtggaggaagtggcagagagacaaggagaagctgcgagaattagaactgcagcgtcagcgtgacttgcataagatcaagcagcttcagcagacggtgagagacctggagtcgaaggacgaggtgcctggcagccgcctccacctaggttctgcccgcagggctgccggctcggatgcggaccacctccgggaacagcagcgagagctggaggcgatgaggcagcggctgctctctgccgcccggcttctcaccagcttcaccagccaggccgtggacaggacagttaatgattggacgtcatccaatgagaaagcagtgatgtctttactgcacacgttggaggagctgaagtctgacttgagcaggcccacctcctcccagaaaaaaatggcagcagagctgcagttccagtttgtggacgtcctgctgaaagacaatgtttccctcacaaaagcgctcagcacggtgacccaggagaagctggagctgagcagagccgtgtctaagcttgagaagttgctgaagcaccatctgcagaagggctgcagcccaagcaggtcggaaaggtctgcttggaagccagacgaaacggctccacagagttccctgaggcgcccagaccccggccggcttccaccagctgccagcgaggaagcacacaccagcaatgtcaagatggaaaaattgtacctgcattacttgagagcagagagctttagaaaagctctgatttatcaaaagaagtatcttttgctgttgattggtggattccaggattctgaacaagaaacactctccatgattgcccatttgggggtatttccttccaaagcagaacggaaaatcacatctcgtcctttcaccaggttccgcacggccgtcagggtggtcattgcaatattaagattacgttttttggttaagaaatggcaagaagtagatcggaaaggagctctggcacaaggcaaagcccctcgcccagggccccgagcacgacagccgcagtctccacccagaaccagagagtcccccccaacccgggatgtaccctctggccacaccagggaccctgccagaggccgcagactggcagcagcagcctccccacacagtgggggaagagccactccatccccaaattcaagattagaaagatccctgactgcttctcaagatccagaacattccttgacagagtatattcaccatttagaagtgatccagcaaagattgggaggggtactaccaggtaatgcaagtcctcgccgagtatttattaagctgattatcactgtaccctggaaacgtagggtctgttgaaagatggctggtattcagcttagtaaccaaagtttcagtctgaacaatcagtgtcactaatagtattagaatagaggctacaagtgaagaatctcacagaagtctaagccagtgtactcagtgatacgtgctgaggtcagtttgacttaatcaccgtctggacttttttgtcctttctcttacattgatagcgaacataaagattatatttcgaccaggatataatttgttcagtgtttcttaaatatcataatttaaaccactgtataattcatatttttaccaaaatttacatgaattcagtgatagtgtttcaaaattgtggaattcttttcaaaaaatctgtgaagccttgtaaccaatttgctgcctcatttttatttatatgcagattctacttcaaagaaatcctgccacccgatgattaaacagtgaataaaatgtcatggctctttcctgcgacaattctatttgaggaaaagatttgtttttcccttttcccaaggaagctcgtgggacagcatgggcactactcttcatgtgcggtgacaccagcccccagatgccttgaattaagtgtcctcacctttatgcatgactgcaaagccagctggagcattttctatggagcctccgtatgttttaggcccatgaccttcgtgaggtgacgggcactcactcccatgagccctggctgtgtgctgttgtgtgcctatcggcagatccatccttcctgcctccaaggaggatacacagagaatggcttcctgttgttttgtttattttcttaacgtgtacagatggaaacttcatttaaaaataaaaacaaaacaactcaaaaaggaataaaatacnntaaaaaatattttaaataantaattcaanttttttataattattttttattttataataatattaatttttataaatatattataaattatttttatattttttttttaactanttaattattatttattttacttttatatttaattttattatttatttatttactatattatatctttattccttctcttttttt

SEQ ID NO: 459585 - DNA, 1756 bp, Homo sapiens
  misc_feature (28)..(31): n is a, c, g, or t
ttttatataatcaagacagacagaagannnntttgcaagcctcggccactttcgcgagaattagaactgcagcgtcagcgtgacttgcataagatcaagcagcttcagcagacggtgagagacctggagtcgaaggacgaggtgcctggcagccgcctccacctaggttctgcccgcagggctgccggctcggatgcggaccacctccgggaacagcagcgagagctggaggcgatgaggcagcggctgctctctgccgcccggcttctcaccagcttcaccagccaggccgtggacaggacagttaatgattggacgtcatccaatgagaaagcagtgatgtctttactgcacacgttggaggagctgaagtctgacttgagcaggcccacctcctcccagaaaaaaatggcagcagagctgcagttccagtttgtggacgtcctgctgaaagacaatgtttccctcacaaaagcgctcagcacggtgacccaggagaagctggagctgagcagagccgtgtctaagcttgagaagttgctgaagcaccatctgcagaagggctgcagcccaagcaggtcggaaaggtctgcttggaagccagacgaaacggctccacagagttccctgaggcgcccagaccccggccggcttccaccagctgccagcgaggaagcacacaccagcaatgtcaagatggaaaaattgtacctgcattacttgagagcagagagctttagaaaagctctgatttatcaaaagaagtatcttttgctgttgattggtggattccaggattctgaacaagaaacactctccatgattgcccatttgggggtatttccttccaaagcagaacggaaaatcacatctcgtcctttcaccaggttccgcacggccgtcagggtggtcattgcaatattaagattacgttttttggttaagaaatggcaagaagtagatcggaaaggagctctggcacaaggcaaagcccctcgcccagggccccgagcacgacagccgcagtctccacccagaaccagagagtcccccccaacccgggatgtaccctctggccacaccagggaccctgccagaggccgcagactggcagcagcagcctccccacacagtgggggaagagccactccatccccaaattcaagattagaaagatccctgactgcttctcaagatccagaacattccttgacagagtatattcaccatttagaagtgatccagcaaagattgggaggggtactaccagattctacttcaaagaaatcctgccacccgatgattaaacagtgaataaaatgtcatggctctttcctgcgacaattctatttgaggaaaagatttgtttttcccttttcccaaggaagctcgtgggacagcatgggcactactcttcatgtgcggtgacaccagcccccagatgccttgaattaagtgtcctcacctttatgcatgactgcaaagccagctggagcattttctatggagcctccgtatgttttaggcccatgaccttcgtgaggtgacgggcactcactcccatgagccctggctgtgtgctgttgtgtgcctatcggcagatccatccttcctgcctccaaggaggatacacagagaatggcttcctgttgttttgtttattttcttaacgtgtacagatggaaacttcatttaaaaataaaaacaaaacaactcaaaaaggaataaaatttaatcactgttttgtttgtgaata

SEQ ID NO: 459586 - DNA, 1575 bp, Homo sapiens
  misc_feature (42)..(42): n is a, c, g, or t
tttattattaatctcgattatcccagataatattgaaataangggaaaatttcacgagaattagaactgcagcgtcagcgtgacttgcataagatcaagcagcttcagcagacggtgagacagttaatgattggacgtcatccaatgagaaagcagtgatgtctttactgcacacgttggaggagctgaagtctgacttgagcaggcccacctcctcccagaaaaaaatggcagcagagctgcagttccagtttgtggacgtcctgctgaaagacaatgtttccctcacaaaagcgctcagcacggtgacccaggagaagctggagctgagcagagccgtgtctaagcttgagaagttgctgaagcaccatctgcagaagggctgcagcccaagcaggtcggaaaggtctgcttggaagccagacgaaacggctccacagagttccctgaggcgcccagaccccggccggcttccaccagctgccagcgaggaagcacacaccagcaatgtcaagatggaaaaattgtacctgcattacttgagagcagagagctttagaaaagctctgatttatcaaaagaagtatcttttgctgttgattggtggattccaggattctgaacaagaaacactctccatgattgcccatttgggggtatttccttccaaagcagaacggaaaatcacatctcgtcctttcaccaggttccgcacggccgtcagggtggtcattgcaatattaagattacgttttttggttaagaaatggcaagaagtagatcggaaaggagctctggcacaaggcaaagcccctcgcccagggccccgagcacgacagccgcagtctccacccagaaccagagagtcccccccaacccgggatgtaccctctggccacaccagggaccctgccagaggccgcagactggcagcagcagcctccccacacagtgggggaagagccactccatccccaaattcaagattagaaagatccctgactgcttctcaagatccagaacattccttgacagagtatattcaccatttagaagtgatccagcaaagattgggaggggtactaccagattctacttcaaagaaatcctgccacccgatgattaaacagtgaataaaatgtcatggctctttcctgcgacaattctatttgaggaaaagatttgtttttcccttttcccaaggaagctcgtgggacagcatgggcactactcttcatgtgcggtgacaccagcccccagatgccttgaattaagtgtcctcacctttatgcatgactgcaaagccagctggagcattttctatggagcctccgtatgttttaggcccatgaccttcgtgaggtgacgggcactcactcccatgagccctggctgtgtgctgttgtgtgcctatcggcagatccatccttcctgcctccaaggaggatacacagagaatggcttcctgttgttttgtttattttcttaacgtgtacagatggaaacttcatttaaaaataaaaacaaaacaactcaaaaaggaataaaatttaatcactgttttgtttgtgaata

SEQ ID NO: 459587 - DNA, 1582 bp, Homo sapiens
agttcgacggagactctctccgtgagtcagaagcactgtgaggcgctcaggagagagaaggcgagaattagaactgcagcgtcagcgtgacttgcataagatcaagcagcttcagcagacggtgagacagttaatgattggacgtcatccaatgagaaagcagtgatgtctttactgcacacgttggaggagctgaagtctgacttgagcaggcccacctcctcccagaaaaaaatggcagcagagctgcagttccagtttgtggacgtcctgctgaaagacaatgtttccctcacaaaagcgctcagcacggtgacccaggagaagctggagctgagcagagccgtgtctaagcttgagaagttgctgaagcaccatctgcagaagggctgcagcccaagcaggtcggaaaggtctgcttggaagccagacgaaacggctccacagagttccctgaggcgcccagaccccggccggcttccaccagctgccagcgaggaagcacacaccagcaatgtcaagatggaaaaattgtacctgcattacttgagagcagagagctttagaaaagctctgatttatcaaaagaagtatcttttgctgttgattggtggattccaggattctgaacaagaaacactctccatgattgcccatttgggggtatttccttccaaagcagaacggaaaatcacatctcgtcctttcaccaggttccgcacggccgtcagggtggtcattgcaatattaagattacgttttttggttaagaaatggcaagaagtagatcggaaaggagctctggcacaaggcaaagcccctcgcccagggccccgagcacgacagccgcagtctccacccagaaccagagagtcccccccaacccgggatgtaccctctggccacaccagggaccctgccagaggccgcagactggcagcagcagcctccccacacagtgggggaagagccactccatccccaaattcaagattagaaagatccctgactgcttctcaagatccagaacattccttgacagagtatattcaccatttagaagtgatccagcaaagattgggaggggtactaccagattctacttcaaagaaatcctgccacccgatgattaaacagtgaataaaatgtcatggctctttcctgcgacaattctatttgaggaaaagatttgtttttcccttttcccaaggaagctcgtgggacagcatgggcactactcttcatgtgcggtgacaccagcccccagatgccttgaattaagtgtcctcacctttatgcatgactgcaaagccagctggagcattttctatggagcctccgtatgttttaggcccatgaccttcgtgaggtgacgggcactcactcccatgagccctggctgtgtgctgttgtgtgcctatcggcagatccatccttcctgcctccaaggaggatacacagagaatggcttcctgttgttttgtttattttcttaacgtgtacagatggaaacttcatttaaaaataaaaacaaaacaactcaaaaaggaataaaatttaatcactgttttgtttgtgaata

SEQ ID NO: 459588 - DNA, 1284 bp, Homo sapiens
tgcatttttagttctggctttggcccagcccagggcaaggcaggaaactctccagcgtgagtccgtgagggccaagaagtcccgccctgttctgggggaggacctggcttttctggtgtctctggtgcccgagagcccggtgctgccatctttagtgaaagagtaaatggtggccgagggctccttttgtgagggatgtgccttggtgaagaaggcatgttccctgccgtgaagatacttggaagctctgggtggagagggaaaagggatacccctggtgctccctgggcctggcggaaggctaggaggaaggacagctgaggtgaggactgagtggggcaggtatcaccctgacaaacagtttgggaagatcaggaaaggcaggtgagacctggtgcagaatccaggttgggtaatagatacatcgtcgaagatgtagcaagcaaagtaatatactcaactctggaacattgcacagaagcttttaaagcactctgtgacactttttgtaatgagggatctaaaggaaacggccccagagtcacccatccccacgggtctggttggcggggctggtgcctttcttctgcactcagtcaccatggctccgtctgtcaaactcaactcttttttttttttttcttctcttggtgtggtaatttgtttgaagagccactccatccccaaattcaagattagaaagatccctgactgcttctcaagatccagaacattccttgacagagtatattcaccatttagaagtgatccagcaaagattgggaggggtactaccagattctacttcaaagaaatcctgccacccgatgattaaacagtgaataaaatgtcatggctctttcctgcgacaattctatttgaggaaaagatttgtttttcccttttcccaaggaagctcgtgggacagcatgggcactactcttcatgtgcggtgacaccagcccccagatgccttgaattaagtgtcctcacctttatgcatgactgcaaagccagctggagcattttctatggagcctccgtatgttttaggcccatgaccttcgtgaggtgacgggcactcactcccatgagccctggctgtgtgctgttgtgtgcctatcggcagatccatccttcctgcctccaaggaggatacacagagaatggcttcctgttgttttgtttattttcttaacgtgtacagatggaaacttcatttaaaaataaaaacaaaacaactcaaaaaggaataaaatttaatcactgttttgtttgtgaata

SEQ ID NO: 459589 - DNA, 1746 bp, Homo sapiens
tgcatttttagttctggctttggcccagcccagggcaaggcaggaaactctccagcgtgagtccgtgagggccaagaagtcccgccctgttctgggggaggacctggcttttctggtgtctctggtgcccgagagcccggtgctgccatctttagtgaaagagtaaatggtggccgagggctccttttgtgagggatgtgccttggtgaagaaggcatgttccctgccgtgaagatacttggaagctctgggtggagagggaaaagggatacccctggtgctccctgggcctggcggaaggctaggaggaaggacagctgaggtgaggactgagtggggcaggtatcaccctgacaaacagtttgggaagatcaggaaaggcaggtgagacctggtgcagaatccaggttgggtaatagatacatcgtcgaagatgtagcaagcaaagtaatatactcaactctggaacattgcacagaagcttttaaagcactctgtgacactttttgtaatgagggatctaaaggaaacggccccagagtcacccatccccacgggtctggttggcggggctggtgcctttcttctgcactcagtcaccatggctccgtctgtcaaactcaactcttttttttttttttcttctcttggtgtggtaatttgtttgaagagccactccatccccaaattcaagattagaaagatccctgactgcttctcaagatccagaacattccttgacagagtatattcaccatttagaagtgatccagcaaagattgggaggggtactaccaggtaatgcaagtcctcgccgagtatttattaagctgattatcactgtaccctggaaacgtagggtctgttgaaagatggctggtattcagcttagtaaccaaagtttcagtctgaacaatcagtgtcactaatagtattagaatagaggctacaagtgaagaatctcacagaagtctaagccagtgtactcagtgatacgtgctgaggtcagtttgacttaatcaccgtctggacttttttgtcctttctcttacattgatagcgaacataaagattatatttcgaccaggatataatttgttcagtgtttcttaaatatcataatttaaaccactgtataattcatatttttaccaaaatttacatgaattcagtgatagtgtttcaaaattgtggaattcttttcaaaaaatctgtgaagccttgtaaccaatttgctgcctcatttttatttatatgcagattctacttcaaagaaatcctgccacccgatgattaaacagtgaataaaatgtcatggctctttcctgcgacaattctatttgaggaaaagatttgtttttcccttttcccaaggaagctcgtgggacagcatgggcactactcttcatgtgcggtgacaccagcccccagatgccttgaattaagtgtcctcacctttatgcatgactgcaaagccagctggagcattttctatggagcctccgtatgttttaggcccatgaccttcgtgaggtgacgggcactcactcccatgagccctggctgtgtgctgttgtgtgcctatcggcagatccatccttcctgcctccaaggaggatacacagagaatggcttcctgttgttttgtttattttcttaacgtgtacagatggaaacttcatttaaaaataaaaacaaaacaactcaaaaaggaataaaatttaatcactgttttgtttgtgaata

SEQ ID NO: 459590 - DNA, 453 bp, Homo sapiens
agtgcgtccgaagcacgtgaaggtatggctggcaggggcggccctcacagcttcacatgtgcagcctcggggcatcccccaagccctgtgtcctgccttgccggggagagccttggagggccagcttttcctgggtgcctctgagcacctgcattttaatgactcacgggaggcagccccacggtggccccggaagccgcccacccagccctgcactggccccttaggtggccgcctcccatctgggcagggagggtcctgtgagcccgtgggcaggtggtgttgccccgagtcgcagagccggcctgtgcctctctcccgcctgtgcctccctcctgcctgtgccctgtagagaagccgaggcaccagacgccgcagtgctctaggactgagccgagttctcttcagacgatgggagagaagccactcagcctccttggaatcaaccttgaa

SEQ ID NO: 459591 - DNA, 489 bp, Homo sapiens
gagagtctaagccgtaggggtccctcatccctctccggttctgggatgggcccttttccgagttctgcccccaccacaggtaaccaggctcttgcctctcgcctggcttgttgtgggtgtcccattttaagacgattgcctgactccgttatgttgcagagctacatgagcaactcctggcgcgcacctctcgtgtggaagatttagaacagctgaagcagcgagaaaaaacccagcatgagtccgaactggagcaactgaggatttattttgaaaagaagttaagggatgctgagaaaacttaccaagaagacctaaccctgttacagcagaggctgcagggggcgagggaagatgctcttctggactctgtggaagttgggtaagcaaagcagttccagcctcagtgagtttctgccatacaggggccaggctctgagttcaggggtagttttgttggtgatttcatgctagtaggcaccaatggcc

SEQ ID NO: 459592 - DNA, 476 bp, Homo sapiens
ccacctcctcagctgagacagacctggaagttcctgagattctgaaagtgcctggccttgtggggtcagcgctgaccgatccctcttgtcacggacagagctctctcggtctctgctgtggctggctttctccgagctgcaggtttgggatgtgagcttttacccttaggatcgcagtggcagggataaaaccgcacacgtcactgctggggtgggggccttgagctcattagggtttcacctggacactttgctttttccagttagagaatcttcaagcatcatatgaagacctgaaggcacaatcacaagaagagatcaggcgcttgtggtcccagcttgattctgccaggaccagtagacaggaattgagtggtgaggaattgtattggaaaattcagatcctcaaaagctgaagctgtgtgtttttcattgttgtaacaccaagccagaatttaacaattctagcaaacaca

SEQ ID NO: 459593 - DNA, 421 bp, Homo sapiens
tgcatttgtgaggacgccacgtttcttccttcttcctttaggaagtgcccaccgcgtgccccgattggagaggggaccttctgcaggttgtgcaagaggcctttgaaaaagagcaggagatgcagggggttgagctgcagccccgactcagtggctcagatctggggggtcacagctccctgctcgaaaggctggagaagatcatccgtgagcaggtgagtgtcagctctgccaccaggcctcagtttgccccaggggtccagccctggcagagagggtgacacagactgttttgtgtgtgaatttcggtttgtgtgtttctctcgaccgctggaatgtggctgtcacttacccaggtgttgacgctcagtccatgcaggatgctgcacttttccacctgcagctgtaacaggacaggtgt

SEQ ID NO: 459594 - DNA, 417 bp, Homo sapiens
gatgtaagccttggttctgtttctcatagaattaaataaacttgaaatgtgcagggctcattgtggaatcacccgagtgctccgaaactccctgaaatccactcattaacaccagacaggtgcgactcctggtgagccaggtattccaccgtgcacctgttctgtttcacctgcagggtaaagaaaaagtactggaagattgtcagctgccgaaggtcgatctcgtagctcaggtgaaacagcttcaggaaaaactgaaccgtttgctgtattccatgaccttccagaatgtggatgctgccgacaccaaatctctgtggcccatggcctcagcacacctgttggagagcagctggagtgatgattcctgtgacggagaagagcctgacatatcaccccacatagacacatgtgatg

SEQ ID NO: 459595 - DNA, 272 bp, Homo sapiens
gctctgcagaagcgtccagccacaggcctgttgcccccgtgggcccctggctctgcctcacggctggacgaagtgattcacacacaggctcctcagaaacctgtcttgtctctcttgagccgtgagctcttgtttagttttgcataatggtcacttggggcgcgtatgcaactttgagtgcccatttatttttacagacagttaatgattggacgtcatccaatgagaaagcagtgatgtctttactgcacacgttggaggagctgaagtct

SEQ ID NO: 459596 - DNA, 252 bp, Homo sapiens
ggcagtgcacacagaaagtatttttctagcttactggtattttttattgttattgatgtgtacagggtgaatttggaagtgaaaagaaaactgctttgcatgaaaaagaggagacacttcggcttcagagtgcacaggcacagccttttcaccaagaggagaaagagtctttgtctctgcagcttcaaaagaagaatcaccaagtccagcaggtgtgtggaatacgctgttcccttgtgataagacgtgtat

SEQ ID NO: 459597 - DNA, 379 bp, Homo sapiens
ctccggcgctggaggagacatggtctgatgtggccctcccggagttggacagaactttgtctgaatgtgcagagatgtcttccgtggctgaaattagcagccacatgcgtgaaagctttctcatgagcccagaaagtgtgcgggagtgtgagcagcccatccggagggtcttccagagcctcagcctggccgtggacggcctcatggagatggccctggactccagcaggcaggtgaggcccaggctcccggggtcctgtggagatgtgaacaactgagtagctgatgatgccacacgagcctggtggatgccggtgccaacgacgctcgcacgggtttctccccaaggaggaggcttttctgaaccagatctttgagg

SEQ ID NO: 459598 - DNA, 307 bp, Homo sapiens
atgccctttaacaacaaattcttacaaatttattttcttttctccaagaaaaaaatggcagcagagctgcagttccagtttgtggacgtcctgctgaaagacaatgtttccctcacaaaagcgctcagcacggtgacccaggagaagctggagctgagcagagccgtgtctaagcttgagaagttgctgaagcaccatctgcagaagggctgcagcccaagcgtaggtgtctgtgcttaactcttacctgcctcagcctaacccaccatggtccagagcagctccaccccacaagaggccgggctcc

SEQ ID NO: 459599 - DNA, 462 bp, Homo sapiens
aaaagacattttttaaaatgtggcttagccattcaatgatattgaggaactactgtgaattttattaggtgctttactaatggcatgggatcatgtttaaaagatgtctttctcagatatgcagactgagatatttacaggagaaatgttatctgggatttgctttaaaatattatttgggccgggtgtggtggctcacacctgtaatcccagcactttgggaggccaaggtgggcggatcacctgaggtcgggagttcgagaccaacctgaccaacatggagaaaccccgtctctactaaaaatacaaaattagccaggtgtggtggtgcatgcctgtagtcccagctactgaggaggctgaggcaggagaatggcttgaatccaagaggccgaggttgtggtgagccaagattttaccattgcactccagcctggacaacaagagggaaactccgtctca

SEQ ID NO: 459600 - DNA, 4349 bp, Homo sapiens
agccttaagatgatgggacacctagttgacaatgttgattgcaggctcgcctgggcttctctggctgcagccccaaccttgccatctgctatagtttggatgtgctgcccaacgtttctgtgttggaaactcaatccccaatgcagcagtgttggaagaattgtgttttcaaaaaagatgatgcagttagaaaattataggacagttttgattttcacacagattaggagaggatgcatttggagaatagacgccaaggatgttaaatcttctgcaatgagtgagagagccccacacaactttagggtgtttctggatattcatctaaaagaaattaattgttgctcattgaatatcccacatacttctgtaattatacctttgcttactcttatacataaatcttactggaatttccttcccacaatgtctgtggtccagaatccttgacttgaggtggagaatactataatttttttatgtcattttgtgttaaagcactgattgctgtaaataaggtggtgctagctcctaaacatagggtaaggttttggattaacatgttattctctattaatgggtggaagcggataagcaggaaaacttctgccacaactctagtgctagagtggagtaggtctgagaatggggttgggccttccatggcggaaagaagtcaggggtggagactaagttgagctgattttcctgttgctgctaagagaaggccaattaatggaagaaaatcggggataggatttaggataaatattttttgaggttctcatgtattagaggatgagaggaatcgtgctatggctaaaatgaagtcaatgtcaccaatgcgattacgtaggattgcttggagggctgctgtattagcatctgctcagccatgtcatcagccaattagtaaaaaagacaaaattcctacaccttctcatctgataaaaagttgaaaaaggttgttggcagtaaccagaattaatactgtggttaggaagataagtaaatatttgaaaaaactggctaatgttaggatctgactttatatataatattgagaattctataatagatcaggtgacgaatagtgctactgtaataaatatcatggagaagtagtctagtttgaagcttaatgagagtttaagggtttgaattgttattcaatgtcagtttgaggtgatggcttctaggttggtatacataaacgttgtgggaatgaggctaatagtgaacgtgcacgcgatagctatttttacataatatggctacaagtttttcttgcgagggttgatgaaggtaataatgattggtaaggttaaggagattaaggttattatagtaatggaaaaatgcatgattattacttttatttggagttgcaccaatatttttggttcctaagaccaatgggtcgctcttatactttaaaagttgagaaagccatgttgttaggcatgggggcatgagttagcagttcttgcatagtttctcagtaaataagaagttacagacttctattatcagatccacaatctaatattttgactaaactatatttacagggtataaagcctataattattttagggtttagagataaaaagaataggtgaaagatgtataaatattaatatattttctcttgtaaaggagggtttaatactgttaatatagcatgtacatgttcctcgttgtattgtgacaagtatataaagggaataaagggctgtggttaatatattaagtcctataagcataatggtaatgtttgatcaggagaatgaagctattattacaaggagtcctcctattagattaatggtggggggtaaggcaaggttggtaagatttgctgtaagtcatcaaaaagctattagtggaagtaatggttgaaggcgttaagagagcagtataattcggctgtggactcactcgtaatttgaatttgctaagcagaatagtaaggacagattattttgttttctgcagcaatcacaagaatatctaagttcctcatactacattcttcccctgctgattcacaaatctattataatcagaaagcatgtgaaaaactgagaaatgggagaaaacaatcactgactgccatttggtaataggagtaattattaggagtcaattcgagcattgcttttaatcttttgagttgctttgctggttgtcattctctataactactaaaaagtccaactagaatttgttttcttgctcacacaggcaaagatgatgtttggagttcagtggtcaagaaaaccccgatgactgcacttctgtgaattttgaagtcttcatcagtatatccatgtaaaaaggagatgacaaaaaccaaaataaaataattatgggctgacaggacaactggattaaaataagcatcagtttcagtaaaaagggctaacttgaagacaaatcttttgaagataaattttgacaccagttctttagaggatctaaagtgaccttgatggagaatgaaagaaatcacaagatggaattcctcgaataaaaatttattgactttaaataattttgcctaatgttacatacacacaattaaaaaaaaaacacctctttatgctgttaagaaagaaagaaagaaagaaagaaaagaaaagaaagaaagaaagaaagaaagaaagaaagaaagaaagaaagaaagaaagaaagaaaggaaaccctgatgaagccacacctgtttggggtacaagaggacacacgtgttccatgtcatgagggtcgaagcaagagtctgcctcacatgaacacagatattttcctttaagctagaagatgatctttattttcattttttaagattctcaagtctttttatccttccttattaaatatttgaaattttaaaattgataacaaataataaaagacaacaaataatcattttgtataatttaccaatttaccataaattgttactcaagttgccctacttcactctgatcttgcatgctacaaaagtcatcctataagatgcttcaatttatgcaggcagtaagatgtttgtaacactaagaaaactcagattatattgacaatcagatttatttatgaaaataagtattcatattcacaacttgttatggagacagaaaacacatctgctaaaattggcactcccatttcaaatgactcatggacagggagtgataaactatgatttgccaacaggttcatgtaccagtttgtggcttgggttgacatcacatgatctttcttttgcaatctctggcacatgcttctcacatagaatgccagctatagttcagtggacatttctcagaaaaggacacaatgtcagagagaagcttgccacttctcaaaatgtgttagaattgatgaatgtgttagaattgatgaacactaagaattgatgaacgggttacactggttaaattcttctttagcttcttttcttcttttttgctgttagtcaagatgggagtcttaatttttgtttcagcaaatgtacatcattgtcacacagaaaaacaagcaacatcataaatagcagtgttaataaattaactcatgatcatgcttttaaatctaaatataaaataaagaaaaatattttaaaaataggaaaataaaaatatgaatatatttatatttaaagaaagagttacacttattatattttatgatctatatattccttactgtaaaaataaactgtgaacatattcagtttagaaaataaagtccttatagttgagcctaaaaagctgtgttttcatttccaaattgaggcaatttacaagtaggtgtcaaagcaaaccattttcttttaattatgtagtaaatcatgtaccatgaaaacttcctaggagattattgagaaaggatgttcttggcacagagacagccacatgaaaaattgattagcattgcagaacagaaacaagcatgagaaatggaaaagaaatattgaaagaggacagataattatgacaactgggtgtcttggctaagtgactattacagtcagtattagaaacttgtcacctattggttgattaatttgtagagatctccagggagacactagaatatatcaagctctgggacccggctacctggtacatatggtggctctgctattttcttcctatgtggccatgggtagcctccttaatctctttgtgcatccattccctcatctgcaaaatgggaataataatcataccttctatgtaggcttgtgatgagaattaagtgagtccatgtaaaacactataaaaagttcctggaatacagtaaacatccaaatgtttgctcttatgaatattactggttgtaaa

SEQ ID NO: 459601 - DNA, 2573 bp, Homo sapiens
agccttaagatgatgggacacctagttgacaatgttgattgcaggctcgcctgggcttctctggctgcagccccaaccttgccatctgctatagtttggatgtgctgcccaacgtttctgtgttggaaactcaatccccaatgcagcagtgttggaagaattgtgttttcaaaaaagatgatgcagttagaaaattataggacagttttgattttcacacagattaggagaggatgcatttggagaatagacgccaaggatgttaaatcttctgcaatgagtgagagagccccacacaactttagggtgtttctggatattcatctaaaagaaattaattgttgctcattgaatatcccacatacttctgtaattatacctttgcttactcttatacataaatcttactggaatttccttcccacaatgtctgtggtccagaatccttgacttgaggtggagaatactataatttttttatgtcattttgtgttaaagcactgattgctgtaaataaggtggtgctagctcctaaacatagggtaaggttttggattaacatgttattctctattaatgggtggaagcggataagcaggaaaacttctgccacaactctagtgctagagtggagtaggtctgagaatggggttgggccttccatggcggaaagaagtcaggggtggagactaagttgagctgattttcctgttgctgctaagagaaggccaattaatggaagaaaatcggggataggatttaggataaatattttttgaggttctcatgtattagaggatgagaggaatcgtgctatggctaaaatgaagtcaatgtcaccaatgcgattacgtaggattgcttggagggctgctgtattagcatctgctcagccatgtcatcagccaattagtaaaaaagacaaaattcctacaccttctcatctgataaaaagttgaaaaaggttgttggcagtaaccagaattaatactgtggttaggaagataagtaaatatttgaaaaaactggctaatgttaggatctgactttatatataatattgagaattctataatagatcaggtgacgaatagtgctactgtaataaatatcatggagaagtagtctagtttgaagcttaatgagagtttaagggtttgaattgttattcaatgtcagtttgaggtgatggcttctaggttggtatacataaacgttgtgggaatgaggctaatagtgaacgtgcacgcgatagctatttttacataatatggctacaagtttttcttgcgagggttgatgaaggtaataatgattggtaaggttaaggagattaaggttattatagtaatggaaaaatgcatgattattacttttatttggagttgcaccaatatttttggttcctaagaccaatgggtcgctcttatactttaaaagttgagaaagccatgttgttaggcatgggggcatgagttagcagttcttgcatagtttctcagtaaataagaagttacagacttctattatcagatccacaatctaatattttgactaaactatatttacagggtataaagcctataattattttagggtttagagataaaaagaataggtgaaagatgtataaatattaatatattttctcttgtaaaggagggtttaatactgttaatatagcatgtacatgttcctcgttgtattgtgacaagtatataaagggaataaagggctgtggttaatatattaagtcctataagcataatggtaatgtttgatcaggagaatgaagctattattacaaggagtcctcctattagattaatggtggggggtaaggcaaggttggtaagatttgctgtaagtcatcaaaaagctattagtggaagtaatggttgaaggcgttaagagagcagtataattcggctgtggactcactcgtaatttgaatttgctaagcagaatagtaaggacagattattttgttttctgcagcaatcacaagaatatctaagttcctcatactacattcttcccctgctgattcacaaatctattataatcagaaagcatgtgaaaaactgagaaatgggagaaaacaatcactgactgccatttggtaataggagtaattattaggagtcaattcgagcattgcttttaatcttttgagttgctttgctggttgtcattctctataactactaaaaagtccaactagaatttgttttcttgctcacacaggcaaagatgatgtttggagttcagtggtcaagaaaaccccgatgactgcacttctggagccaatgagggcccagccattgcgcaagtctggattcgtaggagatcaccttttattccaaatcacatcctagtttttgtcttggtctgaatggaaacattaggggaaacacagaggaaaatcagaaaggaatctccagcaactagtgggaatattaatattttaagatcccatctctacctttaatgacgtggcgtggtactgatggtggtgtgtcgtccattctttcagacacgtatttcacataaatgcactaaataaaacctga

SEQ ID NO: 459602 - DNA, 974 bp, Homo sapiens
tggctgcaaaccacccagaggatggcccactggctgcagccagatatggaagaagcagattctcagtgcacgagccagttcttccagaagctaagcagatacaggcgccagcccaccaagacctttgccaaagccgaattcctgagaatcacagggtccacggctttcaggtgcatctgtggggaggtgccttcccttgtgaataggtcccgtgtcaagagtctcgtggacaccactgaggccatggagctgagtactgggcggattaatcagagattcaagtcctcagtccagagggctggctccaaaggacatgcagtcaaccagatatggaagaagaggaaaggcttctgtcaagggaaacagcctttcgtggaccgcaggaagctcagagaagccagggaacgctactcccagactacagggagccgttctgaaatggatctcctcttcaacgctgtggttggggcagcaagggatggctgggaacatgattccagagggcactgtgacctagccagccacagggggaagaaccccaggtcctgagcgtgctctttgaggagaaggttctgacagagtaggaagtgggctgtggggtcacgttgttcccacttcaccacagtgaaagcctgccaggaaacacatcccggaaatgagatctactctagaaaatacaaggaaggtactgggaaggtaacaaaccaggcagacacctgtcctccatgatctcatatggacgtgggagctgatcactgcatatgtgtagacacaaagggaacaaggactgccgcgcctacctgagggcagaagatggagcatgaggattaaaaactacccatggggtattgtgcttattccttattagagacaaagtaatctgtacgtcaaacccccacaacacgcaatttacccgtgtaaaaaacctgcacttgtaccccttgagccgaaaataaaagttgtaaagaaaaaaa

SEQ ID NO: 459603 - DNA, 334 bp, Homo sapiens
aaagaacataaggacaaaagactaaactttgaaggttattgagaggtactgggaaggtaacaaaccaggcagacacctgtcctccatgatctcatatggacgtgggagctgatcactgcatatgtgtagacacaaagggaacaaggactgccgcgcctacctgagggcagaagatggagcatgaggattaaaaactacccatggggtattgtgcttattccttattagagacaaagtaatctgtacgtcaaacccccacaacacgcaatttacccgtgtaaaaaacctgcacttgtaccccttgagccgaaaataaaagttgtaaagaaaaaaa

SEQ ID NO: 459604 - DNA, 869 bp, Homo sapiens
ttttgggtgcaggcgctcccggggaaagcagtttgtgctcagtgcgttctgcagcataaggaatcctaacgcgaatccgtgaacagtctattccgacggcgcagagaaatctcacgcggggatccccacgatgtgccggcgcttaacgcagacgcccgaacccaggggaaggctgcgactccgcgatgagtgacatgcgggcttgagacgttctaaaggaacgtggaccgagttagggaacgtaactgaagctcattttgtcttagttatggactatgagtccttaataaatgtatgtcattatgtttaaagaatgacaaatgtctgcaaagagtggtccctgtcccaagccctttccagactatgtgaaattcttttttgccagttgtttccaagacacgtgaaagcaatcaagctcccctggaagaagaagaggaggaagaggaagaagtggaaaaagaaggagaaggagaaggaggaggaggagaggaagaggaagaggaagaggaagaagaaggaagaagaagaagaagaagaagaagaagaagaagaagaagaagaagaagaagaagaagaagaagaagcagcagctgatgccttaaggagacatgcatggagcaggactttcacggttaccacctgctctgctcagggttccagcacatattccatcccctcctatccgggcccttttctctcgccggatgtcttccttctgctgagttatttgcctggggtggccctagaggatctgcccaacctgttctccaaaatcccagaatgattcagactttccctccctccctccctccctccctccctccctcccttcttccctccctccttccctccttccctccctcccttcc

SEQ ID NO: 459605 - DNA, 1187 bp, Homo sapiens
ttttgggtgcaggcgctcccggggaaagcagtttgtgctcagtgcggtgagtcccctcctcaccgccccggaggctccagcccgagcctctccgcccgcggggactcgagcctgcagcttgctcggctgggtttctgccctgcccgctccctagctctgctgcagggccggcagcggcagttctgcctgaaacgcaagaattaatagtctgctctggggagacagtggggaagccgtgagcgaccgggccttttccagaggccactatttaccttgaagtttcctgttgaccctctgctgacccacccgcttaaatagattagaacttaaacatcgcaattctgatacatttatttctttgaagttctgcagcataaggaatcctaacgcgaatccgtgaacagtctattccgacggcgcagagaaatctcacgcggggatccccacgatgtgccggcgcttaacgcagacgcccgaacccaggggaaggctgcgactccgcgatgagtgacatgcgggcttgagacgttctaaaggaacgtggaccgagttagggaacgtaactgaagctcattttgtcttagttatggactatgagtccttaataaatgtatgtcattatgtttaaagaatgacaaatgtctgcaaagagtggtccctgtcccaagccctttccagactatgtgaaattcttttttgccagttgtttccaagacacgtgaaagcaatcaagctcccctggaagaagaagaggaggaagaggaagaagtggaaaaagaaggagaaggagaaggaggaggaggagaggaagaggaagaggaagaggaagaagaaggaagaagaagaagaagaagaagaagaagaagaagaagaagaagaagaagaagaagaagaagaagaagcagcagctgatgccttaaggagacatgcatggagcaggactttcacggttaccacctgctctgctcagggttccagcacatattccatcccctcctatccgggcccttttctctcgccggatgtcttccttctgctgagttatttgcctggggtggccctagaggatctgcccaacctgttctccaaaatcccagaatgattcagactttccctccctccctccctccctccctccctccctcccttcttccctccctccttccctccttccctccctcccttcc

SEQ ID NO: 459606 - DNA, 1286 bp, Homo sapiens
  misc_feature (4)..(4): n is a, c, g, or t
  misc_feature (7)..(7): n is a, c, g, or t
  misc_feature (10)..(11): n is a, c, g, or t
  misc_feature (16)..(16): n is a, c, g, or t
  misc_feature (18)..(19): n is a, c, g, or t
ccanccnccnntgccncnnaagcagccctctgttctgcctgacaatgctgcaacattgcctcctgctcgaggggggcatcttgcaaaaggaagtctgttctgctgacaatttcctccccctgtcccattctgcatggggagaaaactttgctgagaatcccaatcagaccctcaggatcccaggaatcagcctgttccgtggaaacaagagctccccaaggctgggccgggccctgctgcaagcacctccacccccacgtcccacctgcggcctcctcacaggccaagccctctcctacatccaactcaccttccagaaccagatcaagaaattgagcaacacgttcaggaaagacagagcatggctgctgggcagccaggtcaaccggacggcaaggcaggggttggccggggaagcactgcgccgcccctgcatgccctgcatcctcgggtcctgggagggctgctcagtaactggaaggaaaatgaaactgaaaaagagcaagggtcccgtaggattgaacacagttggtgaaacttgggccgtctgcctcaagtccccgcttggcaaaaccactccctcctggtggacgccctcaccatgaagagttatagtaaggtgttggtgaggctggctgctctggttgctaagagagacccggcctgccacactcctaagagacacagaagaccagcctacccttcccttgcctcccgtgacactgccctgcaggtggctggccaagagaagcctgcccggcgacgctgaggcaccgaacatgagcaggggaggaaggaatgcctgggagcagctgagccgagcccctgccaccagcctcctccgcacgcccgtggaatcagcactttctgcttcccgcccctgagagccttgctctggggccactcacagccaattaagtggggatgttgtaagagactctaaaatacgtggagctggctgaggacgcgggaccgaccccattatgtgtgtgtgaggctgattaaagtgttacctgtcaccaggtgtcgccaattcttggtgaagctctctccatgtgacctccatgctacttattttttattttattgttcatcctggactccaaaggctgatgctatttttttttttaatgtgatcttttggaagagttctaactgcaactcttcacatagtggtagtagaatataccatgggtattaaaaactaaagcatttcttaatctgtggggtccagattaggaagacatgtattaggaaaatgattactttaaaaaaaataaaaaatt

SEQ ID NO: 459607 - DNA, 1160 bp, Homo sapiens
  misc_feature (4)..(4): n is a, c, g, or t
  misc_feature (7)..(7): n is a, c, g, or t
  misc_feature (10)..(11): n is a, c, g, or t
  misc_feature (16)..(16): n is a, c, g, or t
  misc_feature (18)..(19): n is a, c, g, or t
ccanccnccnntgccncnnaagcagccctctgttctgcctgacaatgctgcaacattgcctcctgctcgaggggggcatcttgcaaaaggaagtctgttctgctgacaatttcctccccctgtcccattctgcatggggagaaaactttgctgagaatcccaatcagaccctcaggatcccaggaatcagcctgttccgtggaaacaagagctccccaaggctgggccgggccctgctgcaagcacctccacccccacgtcccacctgcggcctcctcacaggccaagccctctcctacatccaactcaccttccagaaccagatcaagaaattgagcaacacgttcaggaaagacagagcatggctgctgggcagccaggtcaaccggacggcaaggcaggggttggccggggaagcactgcgccgcccctgcatgccctgcatcctcgggtcctgggagggctgctcagtaactggaaggaaaatgaaactgaaaaagagcaagggtcccgtaggattgaacacagttggtgaaacttgggccgtctgcctcaagtccccgcttggcaaaaccactccctcctggtggacgccctcaccatgaaggtggctggccaagagaagcctgcccggcgacgctgaggcaccgaacatgagcaggggaggaaggaatgcctgggagcagctgagccgagcccctgccaccagcctcctccgcacgcccgtggaatcagcactttctgcttcccgcccctgagagccttgctctggggccactcacagccaattaagtggggatgttgtaagagactctaaaatacgtggagctggctgaggacgcgggaccgaccccattatgtgtgtgtgaggctgattaaagtgttacctgtcaccaggtgtcgccaattcttggtgaagctctctccatgtgacctccatgctacttattttttattttattgttcatcctggactccaaaggctgatgctatttttttttttaatgtgatcttttggaagagttctaactgcaactcttcacatagtggtagtagaatataccatgggtattaaaaactaaagcatttcttaatctgtggggtccagattaggaagacatgtattaggaaaatgattactttaaaaaaaataaaaaatt

SEQ ID NO: 459608 - DNA, 674 bp, Homo sapiens
aataaccaacacctctaacaacagatgtattgttgctcattgcttgtcaaacttagccaatctgaaatcactgtcaccacagacaacaggcttctaaagatttgggacagacaaaaaagccaaaaatccaccatctattcagcaccaagagccctgtgggtgcttaagcacagtggacaatcagtgattgagacactgctggccagtggctgtcctgttcatgtgactgtagaatctaaacaatgcaattggagatacatacacatgtggacaattatggccataatatacacaaaattcacggtttcatggaagggaggaatgggatcttggaagaacacaaagatagcttctcaacttgagtgcgatgttggggaagcagcccacggctgatctagaggctcaacaccgtcaccaagaccaggccccatgagtagtcctgccccgccgtcctcagagtgaggctcctgtgctgggatcacaggatggctgctgtgctcccagcatttccaggggccaagatgggaggaagaagatggacggcagaggaaggacagaggccaaaggcacaagcgagcattgtcagatcaccaaaaagatttttttgctttaagccccacccctagtgacttctgattccatccaaacacccaaaattgggtcatatgtccccc

SEQ ID NO: 459609 - DNA, 2494 bp, Homo sapiens
acccaacagctcattgagaacgggccatgatgacgatggcggttttgtggaatagaaaagggggcaagagagcagccgctctcaacatctaccgtatcccaccgtctagcaggaagcccgctctctgtccaactccgcgggaccgactagagtacgacgaggaccgactagagcacagtgaggaccgtccagagcgccccctcggagagccccagggcttccaggacggcgcccgcgcatgcgcggacgccgacgggcgtggcgaggggctcgcctacgtgcgcgcccgggagctgcacactcttgaagtgaccggcctggagacggttgcccagagcaaggcccatgtagcatccctggagggcctcatccctgaagataaggtcgtgcttctggcaggttctcccttacagaatgaagccaccctgggtcagtgtggggtggaagccctgacaaccctggaagtggttggccgcaggctaggagttcacaatgtctaaaagtcagctgattttgtgttaaaattcagtgtctggctttgcttcaaaaattgggaagatcggccggacgcggtggctcacgcctgtaatctcagcactttgggaggccgaggtgggtggatcacgaggtcaggagatcgagaccatcctggctaacatggtgaaaccctgtctctactaaaaatacaaaaaaaaaaaaaaaaaaaaaaattagccgggcgtggtggcgggcgcctatagtcccagctactccggaggctgaggcaggagaatggcgtgaacccaggaggcagagcttgcaatgagccgagatcgcaccactgaactgcagcctgggcaacagagagagactccgtctcaaaaaaaaaaaaaatgggggagatcagggccagccaccatttatcatcaggcttgcgctgttgtttctcttaaagaaaagtgaattctctttttgttcctatgtctctatcaaaagtgggaaaatgaaagatggattgatagcgccgcgtgtttcaagagaagtgggagcaagcatatttctttgtggaagtatagtcctatgtgtttaatatgtaaccaaactttgtctgtgtcaaaagaatacaactgaagatgccattatgaaacaaaccatgctcccgtcttcccctctttcccctctgactcttgacgaacaccctcctccaccatggtatgcatgccccttccttttgagaaatgcaacaagctctccagtggtcatctcctgatctgttggccttactggccctcaaatttcctattcatgcattacatatttatttatttactttgagacaggagtgagactctgccaaaaaaaaaaaaaagtaatttagcaatgttgcaagttgtaagatcaatacaaaaatcaatattatttctatatactgtcaatgaaacactggaaattgaaaatcttaaaacataatacagccaaatgtggtggctcatggctataatcctgtactttgggaggctgctgttggaggattgtttgaggctgggagttcaagctcagcctgggaaacatagtgagacccttgtctctaccaaaaagaaaaagaaaaagaaaaaaattataattctgtctctcaacaaaatcataattttttttttaatttggccaggtttggtggcgggcatctgtagtcccagctcctgagctgaggctgaggtaggaggatcgcttgagcccaggagtttgaggctgcagtgagctatgataatgccactgcactcttgcctgggggacaagactgagaccttctctctctctcaaaaaaacacacacaaaaaaacatatatatatatatatatagccacttacaatatcatttaaaaatgaaatacttaggaatgaatttgaaaagcagttgacctgttctctgaaaattacaaagcattactgagagattaccagatagagatttaccatctcaatattgagctgagatataccaaactcaatattgttaatatgatgattcttccaaaataaactattcaatgcaataccagtcaaaatcccagtaggctttttaatacaagttaacaagctcattccaaaattcttgtggtaatgcaaaggacctagaatagtcaagacaatgttgaaaataataaaactggaaaagttaaactacgtgacttatataaccaagacttaatataaaattacagaaattagccaggcgtggtggctcacgcctgtaatcccagcactttaggaggccgaggtgggcggatcacctgaggtcaggagttcaagaccagcctggccaacatggtgaaaccccgtctctactaaaaatacaaaaattagccgggcatggtggttggcgcctgtaatcccagctactcgggagactgaagcaggagaatcacttgaacccaggaggcggaggttgcagtgagccgagatcacgccgttgcactccaccctgggggacaagaatgagacttcgtctcaaaaa

SEQ ID NO: 459610 - DNA, 2350 bp, Homo sapiens
acccaacagctcattgagaacgggccatgatgacgatggcggttttgtggaatagaaaagggggcaagagagcagccgctctcaacatctaccgtatcccaccgtctagcaggaagcccgctctctgtccaactccgcgggaccgactagagtacgacgaggaccgactagagcacagtgaggaccgtccagagcgccccctcggagagccccagggcttccaggacggcgcccgcgcatgcgcggacgccgacgggcgtggcgaggggctcgcctacgtgcgcgcccgggagctgcacactcttgaagtgaccggcctggagacggttgcccagagcaagttcacaatgtctaaaagtcagctgattttgtgttaaaattcagtgtctggctttgcttcaaaaattgggaagatcggccggacgcggtggctcacgcctgtaatctcagcactttgggaggccgaggtgggtggatcacgaaggtacgagcccgcaatcgtccgggctcaaaggcacctgccgacctaatcacttacacgcacgccgggcactccgggcggtcgccctgacaagtacgttggcgggcgcctatagtcccagctactccggaggctgaggcaggagaatggcgtgaacccaggaggcagagcttgcaatgagccgagatcgcaccactgaactgcagcctgggcaacagagagagactccgtctcaaaaaaaaaaaaaatgggggagatcagggccagccaccatttatcatcaggcttgcgctgttgtttctcttaaagaaaagtgaattctctttttgttcctatgtctctatcaaaagtgggaaaatgaaagatggattgatagcgccgcgtgtttcaagagaagtgggagcaagcatatttctttgtggaagtatagtcctatgtgtttaatatgtaaccaaactttgtctgtgtcaaaagaatacaactgaagatgccattatgaaacaaaccatgctcccgtcttcccctctttcccctctgactcttgacgaacaccctcctccaccatggtatgcatgccccttccttttgagaaatgcaacaagctctccagtggtcatctcctgatctgttggccttactggccctcaaatttcctattcatgcattacatatttatttatttactttgagacaggagtgagactctgccaaaaaaaaaaaaaagtaatttagcaatgttgcaagttgtaagatcaatacaaaaatcaatattatttctatatactgtcaatgaaacactggaaattgaaaatcttaaaacataatacagccaaatgtggtggctcatggctataatcctgtactttgggaggctgctgttggaggattgtttgaggctgggagttcaagctcagcctgggaaacatagtgagacccttgtctctaccaaaaagaaaaagaaaaagaaaaaaattataattctgtctctcaacaaaatcataattttttttttaatttggccaggtttggtggcgggcatctgtagtcccagctcctgagctgaggctgaggtaggaggatcgcttgagcccaggagtttgaggctgcagtgagctatgataatgccactgcactcttgcctgggggacaagactgagaccttctctctctctcaaaaaaacacacacaaaaaaacatatatatatatatatatagccacttacaatatcatttaaaaatgaaatacttaggaatgaatttgaaaagcagttgacctgttctctgaaaattacaaagcattactgagagattaccagatagagatttaccatctcaatattgagctgagatataccaaactcaatattgttaatatgatgattcttccaaaataaactattcaatgcaataccagtcaaaatcccagtaggctttttaatacaagttaacaagctcattccaaaattcttgtggtaatgcaaaggacctagaatagtcaagacaatgttgaaaataataaaactggaaaagttaaactacgtgacttatataaccaagacttaatataaaattacagaaattagccaggcgtggtggctcacgcctgtaatcccagcactttaggaggccgaggtgggcggatcacctgaggtcaggagttcaagaccagcctggccaacatggtgaaaccccgtctctactaaaaatacaaaaattagccgggcatggtggttggcgcctgtaatcccagctactcgggagactgaagcaggagaatcacttgaacccaggaggcggaggttgcagtgagccgagatcacgccgttgcactccaccctgggggacaagaatgagacttcgtctcaaaaa

SEQ ID NO: 459611 - DNA, 827 bp, Homo sapiens
tccccagagtgtgatgttccacttcctgtgtccatgtgttctcattgttcaattcccacctatgagtcttaataaaagaccaataactatgttgcaaaagcacatgcaggaactgagacctaataagctactaaccaaaaatagttttcactctgaatgctttatgatatttatagagacattaatgctttatagttctcagaatgggtccacatgttccacaaaggagatatttccttattttctaggggttaaacatctttcttcaaccaacgaccatactttgagcttctcaataactttatttaaaaccaaccaattaaaggaaccaaccaaggaagctccattactgaagctagagagtcacacattcattcgtcctggcaccgaaagtggtgaacatagaaaatacgtttttaaagaatatcacaaggagatcccttcttacatttttgtaatatacatagtaagaatgtgagcaattcagagttttaccaacgcaggaaaagctttcttggtactaacataatattgaaacttggtgaatcgtattttttcagccataaaacttgcaatcatgacaggagggatatttccttttctctgaaattaatttgctcatttctaacattcagaaatacgttctcatttttctgaaataccaccaacattttcctggaactttacttcggcctctttccctgtaatgtgagacagtctgatacatctgcagtgcccttgctatatgcattacacgctatgactaggcaccgggctgggtcaactctacgccaaggttatattcagggtcgtatacttgattgaaa

SEQ ID NO: 459612 - DNA, 237 bp, Homo sapiens
gtgacattcccccaaattcatcagaagtggacccggaagagatccaaatacgttctcatttttctgaaataccaccaacattttcctggaactttacttcggcctctttccctgtaatgtgagacagtctgatacatctgcagtgcccttgctatatgcattacacgctatgactaggcaccgggctgggtcaactctacgccaaggttatattcagggtcgtatacttgattgaaa

SEQ ID NO: 459613 - DNA, 1778 bp, Homo sapiens
tataaactcaggacctgattgaggtgaaaggataacagcaacagagccacagatcactggattgtttcagtgggctcagtctcctgcctgtctcagttttccccagtcgccatcgtgttactgacccaatagagaagagagactcctaagagagagggaatcacctttgtgcctgggagcccccagctgactgccaagaaaattcgctatcaattacgcatgtctaaggcccagtgcattgtggctaatgaagctatggccccagttgtaaactctgccgtgtccgactgccccaccttgaaaaccaagctcctggtgtcagataagagctatgatgggtggttggatttcaagaagttgattcaagttgcccctccaaagcagacctacatgaggaccaaaagccaagatccaatggccatattcttcaccaagggtacaacaggagctcccaaaatggtcgagtattcccagtatggtttgggaatgggattcagccaggcttccagacggtggatggatctccagccaacagatgtcttgtggagtctgggtgatgcctttggtggatctttatccctgagcgctgtcttgggaacttggttccaaggagcctgtgtgtttctgtgtcacatgccaaccttctgccctgagactgttctaaatgtcctgtccagatttcccatcaccactctatctgcaaatccagagatgtaccaggaactgcttcagcacaagtgtttcaccagctacagattcaagagtctgaagcagtgtgtggctgcaggaggacccatcagccctggggtgattgaggactggaaacgcatcactaagttggacatctatgaaggctatgggcagacggaaactggtctactctgtgccacttccaaaacaataaaattgaagccaagctctctggggaagccattgccaccttatattgtccagattgtggatgaaaactcaaatctcctgcctccaggggaagaaggaaatattgcaatccgcataaaactaaaccaacctgcttctctgtactgtccacacatggtgagctgggaggaatatgcttcagcaagaggccacatgctttacctcacaggtgacagagggatcatggatgaagacggctacttctggtggtctggtagagttgatgatgttgccaatgcattgggtcagagattgtgaatgctttggttattgctattgagcctggggctgtgggagtttgaagaagactctggactgcttccaatacgtaggaattatatttctaaagtttagaaaatgcaaacaaccaaaaataaaaaaataaaactcatccataatctcatattgtggagtatattcttctaatcttctttcttcttatacataaacttttttttttggtagaattgagttcagggagaaatgctctagcgtaacttgcctttttcactcaacaatgtaacagaaatatttttctgtgcaattaaatataaaaattcattttttaaattagtttatcacgaccaataagtacacagatcttacatgaatactgtcaggcctctgagcccaagctaagccatcatatcccctgtgacctgcacgtacacatccagatggccggttcctgccttaactaatgacattctaccacaaaagaagtgaaaatggcctgttcctgccctaactgatgacattatcttgtgaaattccttctcctggctcatcctggctcaaaagctcccctactgagcacctcgtgacccccattcctgccc

SEQ ID NO: 459614 - DNA, 1567 bp, Homo sapiens
ctggtaccggtcggaccttgctttgcattgtggctaatgaagctatggccccagttgtaaactctgccgtgtccgactgccccaccttgaaaaccaagctcctggtgtcagataagagctatgatgggtggttggatttcaagaagttgattcaagttgcccctccaaagcagacctacatgaggaccaaaagccaagatccaatggccatattcttcaccaagggtacaacaggagctcccaaaatggtcgagtattcccagtatggtttgggaatgggattcagccaggcttccagacggtggatggatctccagccaacagatgtcttgtggagtctgggtgatgcctttggtggatctttatccctgagcgctgtcttgggaacttggttccaaggagcctgtgtgtttctgtgtcacatgccaaccttctgccctgagactgttctaaatgtcctgtccagatttcccatcaccactctatctgcaaatccagagatgtaccaggaactgcttcagcacaagtgtttcaccagctacagattcaagagtctgaagcagtgtgtggctgcaggaggacccatcagccctggggtgattgaggactggaaacgcatcactaagttggacatctatgaaggctatgggcagacggaaactggtctactctgtgccacttccaaaacaataaaattgaagccaagctctctggggaagccattgccaccttatattgtccagattgtggatgaaaactcaaatctcctgcctccaggggaagaaggaaatattgcaatccgcataaaactaaaccaacctgcttctctgtactgtccacacatggtgagctgggaggaatatgcttcagcaagaggccacatgctttacctcacaggtgacagagggatcatggatgaagacggctacttctggtggtctggtagagttgatgatgttgccaatgcattgggtcagagattgtgaatgctttggttattgctattgagcctggggctgtgggagtttgaagaagactctggactgcttccaatacgtaggaattatatttctaaagtttagaaaatgcaaacaaccaaaaataaaaaaataaaactcatccataatctcatattgtggagtatattcttctaatcttctttcttcttatacataaacttttttttttggtagaattgagttcagggagaaatgctctagcgtaacttgcctttttcactcaacaatgtaacagaaatatttttctgtgcaattaaatataaaaattcattttttaaattagtttatcacgaccaataagtacacagatcttacatgaatactgtcaggcctctgagcccaagctaagccatcatatcccctgtgacctgcacgtacacatccagatggccggttcctgccttaactaatgacattctaccacaaaagaagtgaaaatggcctgttcctgccctaactgatgacattatcttgtgaaattccttctcctggctcatcctggctcaaaagctcccctactgagcacctcgtgacccccattcctgccc

SEQ ID NO: 459615 - DNA, 972 bp, Homo sapiens
tgacattgaaggattgcttgctagggaaagtttggttaagtatgaagtctaattattccaatttagcaaacaaaaccttatctgcagtcattccccctcctccccaagcgttctcaggcctggctcctgtcacacagagctcacctccatgcctctgcccctgctgtccccggacaagccccccagccaggcggctctcaacctggtggcctcagtatgatcttcctgatttgcaagctttgtctcttaataatctgcctttgtctgttgatgttcagcaaacctttgggaaggtttcccttggcccctacagtgttggcgtcacagacaggatcctaaagctgctctacttttctggaagccacagtccagggaacccaggacctgacaaagcatcagaaggagccctcatgacccaatcgcctcttaaaggccctgcccctcacgactgccacactggggattcagttccaacacctggcatttgccagacacattaaaccatgaatctcacttagttgatctatattactattttaatgtacttttaaattatctttatgaatattttattgagaattttggctctcatatttaaaaatgaaattgtctgtaatactttcccactctccggcacctgagtccatggctttggcagccatagtgatcatgaacttccggctatgtcctagagtcatttatctccgaggatgtcaggaggaaccccaaaatgtcatcaagacactggctacaggtctaaactccaataaaatccagctgggttacatcaattcagacatctggataaaaggatgaatgaaaccatgtacataatacagaattatgcatgccaggaaaaaaaattatactgcctaaaagctgcaaccttcatgacatcaaatctattttaacactggctggttatgtgaggaaaaggctaataaaaaaaaattctggctgaccaaagaagta

SEQ ID NO: 459616 - DNA, 2125 bp, Homo sapiens
agttaagaaacattctaaagaaaggaggaggaggaacccttctaagacagccctgctaatatttagggaacaaattgtgaggcctcgccagccatgtggaactgcagatgttggaacagtttggagggctcagaagaagacacgaaaatgtgggaaagtttggaacttcctagagacttgaatggctttgaccaaaatgctgataaggacatggaaaatgaaatccaggatgagatggtctcagatggagatgaggaacttgttgggaactggaatccagaggcctatgaggaaaacgtggttttgtgggctgggcccaaggtccctgtgctgtgtgcttggtcccctgcatcccagccactccagccgactgaaaggggtcaacatagagctcgggccgtagcttcagagggtgcaagcatcaagccttggcagcttccacatggtgttgagcctgcgagtgcagagaagtcaagaattgaggtttggaaacctctgcctagatttcagaagatgtatggaaacatctggatgcccaggcagaagtttgctgtaggagcagggtcttcatggagaacctctgctagggcaatacagaagggaaatgtgaggtcagagcccccacacagagtccctactggagcaccgcctagtggagctgtgagaagagggccaccgtccagacaccagaatgacagattcaccaacagcttgcaccatgcacctggaagacccacagacactcaacagcaggccatgaaagcacctggaagggaggctgtatcctgcaaagccacaggagtggagctgcccaagaccatgggaaccctcctcttgcatcggtgtgatctggatgtcagacatggagtcaaaggaggtcattttggagctttaagatttgaccgccctgctgaatttcggacttgcatggggcctgtagcccctttgttttggcaagtttctcccatttagaatggctgtatttacccaatgcttgtacccccattgtatctaggaagaattttttagttttaaatcttgtgtttaggtcatgaatccattttgaattattttttgtacatggcataaggaagaacatgggctcctgaacactcctggattttaatctggttctatcacctttcctgtgaccttgggcaagtaacttaacctcttcacatctcaattagctctactatcaaataagataatatttccccacaaggttgttatgtaagatagaatgacacaagtgccttgcatataacagattcttaaaaaaaaaaaaaaaaaaaagccagtttacctcttttccatgttcattattgaggcaagaacaaaaggcaccaaggaagagaaaggagtggactgggtagaaaagaaggatgccaaagagaaactcctgaaaattcctccttgaaaatcaggttcaatcaagagaagagacaggatcttgctgtactgcccagcctggagtgcaatgccacaatcatggcttacagcagcctcaaactactgggctcaagtgatccttccaccaccgtcttccaaggagctggtactataggtacatgccaccatgtccagctaatttttcaatttttttggtagagacagggccttgctatattgcctaggctagtcttgaactactggcctcaaccgatcctcccacctcagcctcccaaagtgctaagattacaagcatgagccactgcacctggcttctttttactttttaatgcagttaaaaattacgtatatgtattacatctgtagcccacattataattccattgaagagtgctgagatataatattgacatattatttccatcatagaaacttggaacatttttattatttagaaacatgctattttatacatacactgttatctatacttccaaagatagtaagtacgtactcataagaagctatatgtacaagttttcttattaatttgcttgctacttggtcatttattttatctcttactgcttgctaagggacaagtggtagcagtctctaaaggtttaaaaataattatgtaaaaacaccagtatgctatggcctgttagtctgacaaacaatgaattgatgtctaaaataaagaacacattgt

SEQ ID NO: 459617 - DNA, 1857 bp, Homo sapiens
gcctacgtgcgcgcccgggagctgcacactcttgaagtgaccggcctggagacggttgcccagagcaaggcccatgtagcatccctggagggcctcatccctgaagataaggttgtgcttctggcaggttctcccttacagaatgaagccaccctgggtcagtgtggggtggaagccctgacaaccctggaagtggttggccgcaggctaggagttcacaatgtctaaaagtcagctgattttgtgttaaaattcagtgtctggctttgcttcaaaaattgggaagatcggccggacgcggtggctcacgcctgtaatctcagcactttgggaggccgaggtgggtggatcacgaggtcaggagatcgagaccatcctggctaacatggtgaaacccttgtgggttcccgcggtctgttcggcgcagccacagggtcctcccaccaccctcgcggcccttcgccagcccagataccgttttcccgactttggaacggagaccacaacacccgccccggaactactgaaggctcaagttagtcaacccggcaggaaaccggccaccgccgccgggtctccagcccccaggagcgcggcctcctcccggactctctccgatgcggtcctgccctggggacacggcaggaagaagggacctggctgggggacgtggccccggcgcgggggcaggggaggcagcgcgggactcccagcggcccctgcgcgggtgcccacccgccgtcacgtgacacgccgggcgctgagtcaccgggaagcatctggctgggcggccgggattggccaatctgcgggaccgtctggagcggaagggcggtggtagctggccctgcttctccctccccaggatctctgcactggccttacgaactggggagtccaagggaacatgtacagtgctcattcactaggattgttacccgaatcctctgctagaatgtaagctccaggaaggtggaattcttgcctttttcctgccttatttttactagctgtaccttgcataaagggtgtttgttgagtgaatgaagttctgtcctagatcaagttaggaattgaagctagaagtcaggaaaactaggtctttctctgctactaatattttttttatttttcttttctttttcgtgtttgtttttggttttcgtttgtttggtttttgttttgaggtggagtctcaatctgtcacccaggctggaaatagcatgaacccgggaggcggagcttgcagtgagctgagattgcgccaccgcactccagcctgggcgacagagcaagattccgtctcaaaaataaataaataaataaatatgaaataaaataagaatcaagcagagaaaattcatgcatacctaaaagataagaccaaggaaaaaggccagagtcctgtacgactgccagagttgtgcctcagttattgctttgagcttctgtgagccaaagagaaaggaagaggaacaaaggtagttgcatgattcttcttgcctctagggaaaaagcatcccagttcctcagagaaaggaaattttttgctggcagttaatatctaaggaatttctcatacaggtctccatatagggatgtggtggctgatgagaacagactgcagctttcctaactaagggcattgttcactgagcatccaaatcagcagcatcagcagagagtgggatgccaaggaatgactcagcaagggcagctctgcaaggctacagaagagctttgtgggggctctggccagacccaggggcgatggctaaaaccaaagaggaatggatgtactgaattcccatcagagaagtgtggctcccggctttctggtttacattttttttaatc

SEQ ID NO: 459618 - DNA, 4639 bp, Homo sapiens
cagatgccatgagtccaaaggaatcatcccgcccccagcagacaagcgtggagccagcctgctcctctggccaaagcattccacccccggacctctcctccaggaagaagagatgtggaagaagagatgtgggtatggtggattctgacccttggctccccaaagttccacagagcccagctcccactgaaggcatatgacccagatcctgagaaccagatgcaccggcctgagctttcgtcagaagcaaggacacacagaacctttcttagaggcatcattagaggaccggacatggtggccagaggctgcagggacagaagtcccagggccatgtccaggaactgggctcaggggacctcctggtgccacctgcatatctgagcccatggagttcctctggtctattcagttctctcattttaacttaattttgtttttgtaggctttcttaaaaaattgcccagttcatttacctgatcacgtttattgttcagagttgagtgtggttctctcgtaattatttagtctccactgggtctgtgattatatttcctttcttattgctaatgctgtttgtgtttgattttcttcttttttttcttggcctgacttaaagaggtttgtctgttttatctttattttaaaaataaccaactgtttatttttacttctccactgtgatttccccctttatttctttaattagacaagtgggggcacccagttgagcactggaaatggggctctggacccttgaagagaagccagcagttgggtcattgcatgagaggtggttgtggtgatgatgggaactggtaagattgctcaggttaaaatgaagaaaacaagccaaggaaaaacgatggtcaaggcaaatacagtaaggatcgacggcatccttgaagtacttctttgtctccaagagcattcattctatttcatgtgcaatgagaattctagcattttagcactgtttaaaattaatgactcagagggaattctggccccacacaagcgcctgctagatggaatggaatgcgaccacagatcgacatgtgacgagcctctatcgcctcaagggagaagaactgtggcaggaacgcaatctgtcccgttctcctgctcctgtgggtttttccattgcatggatatgggttgtgagggaatggagtccctctacagagatatcagatgcagatggagggcagagcaggctggcttacagcatcaagccccatgggatgagtgctccatcctgactgccatgtctgcactgtgtctgcacagtgtctgtgaggccccatctgtcatgacccgatgctggccagcctggcctgggcagagctccgaggagcattataaaaatgtcgaagccatctgctagaaaatcacagctctgcgatataaaacacccagagctgtgttgctcaaactaatttaatcacaaaataccatttccttgatccgaagggaaacatttctacttggccactagagctttctggagaaaggcacttatatttgcagtaaggtatattagtaattttgaatttcaaagagaaaacagagcagggattttggaaaacatatgttgaaagggtaatttcaattctttgcagatgagaaaagtttttgttaaaacaactgacagacactgagaaacatggccatcagtttgaaggaaagtaattgagttgtgcagtttgcattttattttgcacacgtttaacaattaaaagcttttctgtactatgagaacaaaaccccccaaacaccaatgcaatggcagaaagttgggagtcaaatcaggcagcacacacacgaacactgtgttcacatgatgaggaccacatttttgagacattttctgaaaagaacctgtatatgtgtgtgtgtgtatgtatatattcttttttcctgccagaatctcttgttgaatgatcatcaagttagttctggaaaataggttccaatattgctccattcattggcataggttgactttatcttattccaatttaattggcagctgttttcttagatagttttgcataaaatggtgctcagagaacaagtagagttttaaacatgacacagtcgtgtatttgaggatgtttatgttatatatgtgcttgttaatttagtagttatgagtttaataataactttgagctctttagacatggatcctcatatatattaacaaaatcagctgtgtgccttaaccaacagtgagcatattttttaaaatgggcctctgaattgaaaatttaaaaaaacccttcagcatcctattaggattgattaacccacaggagggtaatcctggtaagcaaacgtaaccaagattctccttccccagtgattccaagtgcagcctggctctcctggtcaggtgcttcctttactcaatatttcctgatctgttcctagatcctaataccaccctctgcgtcaacctgtgaatgcatcctcactaccagggctcaggacttggagccgggattttgctgacatggtcttttctctggttgtcaccttccatttcttctttggtttgcctttcattttaatgccagattttctaagtgtaagaaaggagggtggagagtgggcagaagtcattgtttccatcatgaaagtcaacatcagtatttcctgtcctggggacaaaccagtgcctcatgtttctggaaacgctgcagcatttaacttcaattttaatctggataacgccaaagcttttcctcaaattcacccctggagtcagctcatagatgctctgattttgtctaccattgctcctccttaatatctctcgcacaggtgccattgacctttagatgggctgtacggtgtggggttcggtgccatggatctgcttctccagggaccaggatcttgagatcttcaggctgggtttccatggaggcatggagctgcttttcctccttcataactgcactcaaaacagccctgttgctctagaatggagacttgggcaactccttctggcacagatttgttcacctcaggtgaaattcagatagaagcaagctgcaggcagtttcacctctaagtccatgggttctcaactggtaacgtcctcttatggatgttagcccatgaggtcaatcctgtagcaatctaaggcttgagaaaaattaatcttctggaaaattccaagaatacatcttagggaaactggctctacctttatgacttggatcacacaaggatatgcttttcatcttggactagaactgagagccaatggatgtgttatctaaaactatcccagtgtgttcactatacagaggaagattctgagattcaagactcaagactgaagaagatcattatttttattattttagtcttatgcacaaaatgatatctactgaataagcaggtttttaataggtgacttatatatgttagcaaaaataaacactttgtcttttagatctattctagtttttcagtagctgtagacttaagtgctaacttttagcccataggataagaagaaaccaagtcctaaaagtaggccagcaccagggttcaggcctctgacttcaagccaagggctcatcatcttgaattgcgcacgaatttttacacagcgccaaaggaaactgcctgtacttactgttgtaggtaagacaaacctttgcttatttttacttctcatgaataaatagttgcaagaagaactgctgaaacaaagggcattaatgagcttttgctacatataaatagggagtgtgaaccagcagtgtggcggaagaacattttcccctcaactacggcaggactatgcgatgttctccaatgagctcatcttgtcaataatgtgtagaccttcatgtgctttttaattatgtgctgattttattacaagtgaacctgtcctcttgtttgttcccttatacatattcactgtctttatacctttcctttccctccacgaactgtctgctcatatcttttgccctttcagagggaatagtctgttttttcttataggcttataatattttaaatgtaatgataatgttaagatttttttgacatgtactttatactttcccagttcattatgtatatttaaatgtttcactaatattttaaaacatacatcttttcttaaattttccatggttttatctcttagccattatgcttttgctttctgtggtatattcctggggagtgtctcactgagacccttcggtttctctaagttggtaactttatctcccgtgatgagaaagcttttcaaagggagagcgtgaccatttccatatagagtacagtgttgttttggggtttaagattctattcccgggtgtcatcacttctttttaaatttaactttgttatggaaaatcttaagcatatgtagaagtagaacaaatagtctaatgaaacctcacttgttcataacctggcttcaataatgatcagtacttagctattcttacttcatctacccctttactctgtgttttatttttcctggagtattttgaagcaaattctagaaatatatatatatatatatatatatataaataccaatatagtatatatatacacacacaccgtattggtattgatatatatatatata

SEQ ID NO: 459619 - DNA, 991 bp, Homo sapiens
acgcaattaaagtcataattaaagaaacccccctctccacccaccctgatcaagacactgtctgaagtttccccctcatgatttaaaaaaaagaaatttatctgacagaggttctgctgaggaggccagctctcacatcagagggtgatggcagtttgtgctggatgaggataagacaatgctgtcctagggctggccatctgataaagcttcccagaaagtgcagtaatggacccctgggaggctttctgctctcctgtctgcgggttcctgagctgccaaaagtaccttgatgttttctgaaagcagagccaatgaccacactccagggactgagttctcaaatatttacctttggagtccaacccttctgaccatccagaggcaagcacaatattcctgagaaaatctcaaatagatggtgagacaacattgttttttctgccaagaaaaaaaataaaagtcttgttctttgatcagctgctgtacaagcatggcttcaacatctgcttctggtgagagcttcagcaaacttacaatcatgatggaaggcaaaggggaagcaggtggttccacatgtacaagaaaaaagaaaaagcaactatacagagcgtgtacagtggaagaagtcagtggttgggcattggcgtccaacgggtactggacctttgatgtcacttttactttaattaaaaatggcagctggctcctgacttggagacacctcccagcaggggttgatagacacctcatacaggaaagctggcatttggcgggtgcccctctgggacgaagcttccagaggaaggagcaggcagcaatctttgctgttctgcagcctctgctggtgatacccaggaaaacggtctggagtggacctccagcaaactccagcagacctgcagaagaggcctctgagtgttagaaggaaaactagcaaacagaaagcaataacatcaacatcaacatcaacaaaaaggacaacaatgca

SEQ ID NO: 459620 - DNA, 797 bp, Homo sapiens
tgcttcagtctgtaggtgactgcagaaggaggaggagctccatctgtactctcttcaggcagttgtgtctctcagtgcttgttgggttcacacctattaaataagctggctggtcttcaccctccaagagaagtcaactcatgggaggtggcagggtacaggcattggcccaagctgtggctggggccaggctgtggtgtcggcaggcaagcagcagacaagaccatctctgcaagtgcagcacagcctcagcctagggcaacgggagtgtgaggccaaagctgtgagcagaggcatagatttacctttggagtccaacccttctgaccatccagaggcaagcacaatattcctgagaaaatctcaaatagatgtgtgaccttggtgatatattaacatatcaagcaaagagatgcagatagatctttgggcatatttgatgaacggttacacccatttacatgagaagacgttttggaggaatattttaaatatgatccttaacacaaattggttttcagttttgtttgtattctgtttaaagccataaggctaacagctgaatttgcaattgtaagtttggaatgagttggaaagggaattcttgaagctaattaattacaatatcagcgttactggcagtgtttatagcagattctacttcaatcttcgaaccatggcacatgacaacagcctgtattcgctagtttatcttcttgacagagaaagagcatggaagctggaggctttttcaaggatggaacaagacaaagttttctatagtgctgccaagaaca

SEQ ID NO: 459621 - DNA, 931 bp, Homo sapiens
gtagataccgtggaggccagaagagacgaataattcaaaaacctgaatggcgaatctgacaactgaaaatgcgagtcgggcctcgatgagtcgtcccggtcgaacgctggcgcaggctgcggcgttgcagaggacgcgtgtcccggagcgccctgcggggccagcccaactctccctaggtgctttctcccagaaagaaacaagactacgtaataataataggaatggtaccgcgctgccaatgcggagcagccttgcacctgaggccagtaaccagaggtttttgtcttcgctgtggcctgcaggacgaggacctcgccggctttttttctcgctgaccgagcagctgagaccgcctttcaggggtcggcagtgtggactggctggtcccgatcgtggggaccagggacttattccctcgagggtcgactgttggaagtaatgtaggttttgatagtgaagtgtgtggagaggaagaaggaagcacacctataggatgtggagaagggatttcccctagagaaatttttaaaggttgagcatgtatgttttgaaacttcccaaagatccattgaaaagtaaaccttccatccctaataccctgtatctcggtgatccccagtagtcactactgttaatactctcttaggttttcttccaaatcttattaatacctttgcatattatgtttttatttatggtagagattttcatccattcaacagaagcttatggactgcctttttagtttattttaaaagaatttttctagctttaaataaaaattgtatatatttacagtgtaccatgtgatgttttcatagttgtatatgttgtgaaatgataacatacccatcacctcacatagtcgtgtgtgcttgtgtgtatatgtttattttgtgctaagaatatttaaggtcggccaggtgtc

SEQ ID NO: 459622 - DNA, 720 bp, Homo sapiens
gcaggctgcggcgttgcagaggacgcgtgtcccggagcgccctgcggggccagcccaactctccctaggtgctttctcccagaaagaaacaagactacgtaataataataggaatggtaccgcgctgccaatgcggagcagccttgcacctgaggccagtaaccagaggtttttgtcttcgctgtggcctgcaggacgaggacctcgccggctttttttctcgctgaccgagcagctgagaccgcctttcaggggtcggcagtgtggactggctggtcccgatcgtggggaccagggacttattccctcgagggtcgactgttggaagtaatgtaggttttgatagtgaagtgtgtggagaggaagaaggaagcacacctataggatgtggagaagggatttcccctagagaaatttttaaaggttgagcatgtatgttttgaaacttcccaaagatccattgaaaagtgaaccttccggccgggcgcggtggctcacgcctgtaatcccagcactttgggaggccgaggcgggcggatcacgaggtcaggagatcgagaccatcgtggctaacacggtgaaaccccgtctctactaaaaatacagaaaattcaccaggcgtggtggcgggcgcctgtagtcccagctactcaggaggctgaggcaggagaatcacttgaactcaggaggcagaagttgcagtgagtcgagatcgtgcca

SEQ ID NO: 459623 - DNA, 1414 bp, Homo sapiens
tctccccaaccccccctgttcctccacatcacccttccagcataaccctctcccaactcccctcccttccccaaaccacaggtccccctcatgcagaaagaagcccatgaggcgcacccctcccgagcgtggcgtggggaaggaccccccgaagaagcacaacctcaacccagccagaaagcaccccccccagtgggaggctcccaccctggtagatgaacagcccctggagaactacctggatatggagtacttcggcactatcggcatcggaactcctgcccaggatttcaccgtcgtctttgacaccggctcctccaacctgtgggtgccctcagtctactgctccagtcttgcctgcaataaccacccaaccaacctctcaccctccttcaccactcaatcccttcaaacctcaacatccccacttccacattcaaccatatcctcaacaccaatccacctttccccaacccaaccttcaaccatctctgacaccaatcagatcttcggcctgagcgagacggaaccttgctccttcctgtattatgctcccttcgatggcatcctggggctggcctaccccagcatttcctcctccggggccacacccgtctttgacaacatctggaaccagggcctggtttctcaggacctcttctctgtctacctcagcgccgatgaccagagtggcagcgtggtgatctttggtggcattgactcttcttactacactggaagtctgaactgggtgcctgttaccgtcgagggttactggcagatcaccgtggacagcatcaccatgaacggagaggccatcgcctgcgctgagggctgccaggccattgttgacaccggcacctctctgctgaccggcccaaccagccccattgccaacatccagagcgacatcggagccagcgagaactcagatggcgacatggtggtcagctgctcagccatcagcagcctgcccgacatcgtcttcaccatcaatggagtccagtaccccgtgccacccagtgcctacatcctgcagagcgaggggagctgcatcagtggcttccagggcatgaacctccccaccgaatctggagagctttggatcctgggtgatgtcttcatccgccagtactttaccgtcttcgacagggcaaacaaccaggtcggcctggcccccgtggcttaagcctaagtctcttcagccacctcccaggaagatctggcctctgtcctgtgcccactttagatgtatctaattctcctgactgttcttcccaggggagtgtggaggtcttggccctgttccctgtcctaccaataacgtagaataaaaacataacccactgaaacaggttttgtggagctgcttctctttgctggtctttttccttcacattactggggttagaac

SEQ ID NO: 459624 - DNA, 368 bp, Homo sapiens
tctccccaaccccccctgttcctccacatcacccttccagcataaccctctcccaactcccctcccttccccaaaccacaggtccccctcatgcagaaagaagcccatgaggcgcacccctcccgagcgtggcgtggggaaggaccccccgaagaagcacaacctcaacccagccagaaagcaccccccccagtgggaggctcccaccctggtagatgaacagcccctggagaactacctggatatggagtacttcggcactatcggcatcggaactcctgcccaggatttcaccgtcgtctttgacaccggctcctcctagccctggagtctactgcctccggtacctaatcgagtcgtatcatgta

SEQ ID NO: 459625 - DNA, 247 bp, Homo sapiens
atcactgttgagctgcaccaagttgaggctgtgtccactgtcttcagtaattccctggggcacactattcctacacaactcagtccagtcctattcaggatcctttgaagggaccctttccctagaagatgtttaaggtttgttctgaccccaggagagcaacctgtgggtgccctcagtctactgctccagtcttgcctgcaccaaccacaaccgcttcaaccctgaggattcttccacctaccag

SEQ ID NO: 459626 - DNA, 1417 bp, Homo sapiens
tctccccaaccccccctgttcctccacatcacccttccagcataaccctctcccaactcccctcccttccccaaaccacaggtccccctcatgcagaaagaagcccatgaggcgcacccctcccgagcgtggcgtggggaaggaccccccgaagaagcacaacctcaacccagccagaaagcaccccccccagtgggaggctcccaccctggtagatgaacagcccctggagaactacctggatatggagtacttcggcactatcggcatcggaactcctgcccaggatttcaccgtcgtctttgacaccggctcctccaacctgtgggtgccctcagtctactgctccagtcttgcctgcaccaaccacaaccgcttcaaccctgaggattcttccacctaccagtccaccagcgagacagtctccatcacctacggcaccggcagcatgacaggcatcctcggatacgacactgtccaggttggaggcatctctgacaccaatcagatcttcggcctgagcgagacggaaccttgctccttcctgtattatgctcccttcgatggcatcctggggctggcctaccccagcatttcctcctccggggccacacccgtctttgacaacatctggaaccagggcctggtttctcaggacctcttctctgtctacctcagcgccgatgaccagagtggcagcgtggtgatctttggtggcattgactcttcttactacactggaagtctgaactgggtgcctgttaccgtcgagggttactggcagatcaccgtggacagcatcaccatgaacggagaggccatcgcctgcgctgagggctgccaggccattgttgacaccggcacctctctgctgaccggcccaaccagccccattgccaacatccagagcgacatcggagccagcgagaactcagatggcgacatggtggtcagctgctcagccatcagcagcctgcccgacatcgtcttcaccatcaatggagtccagtaccccgtgccacccagtgcctacatcctgcagagcgaggggagctgcatcagtggcttccagggcatgaacctccccaccgaatctggagagctttggatcctgggtgatgtcttcatccgccagtactttaccgtcttcgacagggcaaacaaccaggtcggcctggcccccgtggcttaagcctaagtctcttcagccacctcccaggaagatctggcctctgtcctgtgcccactttagatgtatctaattctcctgactgttcttcccaggggagtgtggaggtcttggccctgttccctgtcctaccaataacgtagaataaaaacataacccactgaaacaggttttgtggagctgcttctctttgctggtctttttccttcacattactggggttagaac

SEQ ID NO: 459627 - DNA, 1235 bp, Homo sapiens
  misc_feature (33)..(33): n is a, c, g, or t
  misc_feature (36)..(36): n is a, c, g, or t
gtcgagttctgtaccctctctccacactggtanatnaacagcccctggagaactacctggatatggagtacttcggcactatcggcatcggaactcctgcccaggatttcaccgtcgtctttgacaccggctcctccaacctgtgggtgccctcagtctactgctccagtcttgcctgcaccaaccacaaccgcttcaaccctgaggattcttccacctaccagtccaccagcgagacagtctccatcacctacggcaccggcagcatgacaggcatcctcggatacgacactgtccaggttggaggcatctctgacaccaatcagatcttcggcctgagcgagacggaaccttgctccttcctgtattatgctcccttcgatggcatcctggggctggcctaccccagcatttcctcctccggggccacacccgtctttgacaacatctggaaccagggcctggtttctcaggacctcttctctgtctacctcagcgccgatgaccagagtggcagcgtggtgatctttggtggcattgactcttcttactacactggaagtctgaactgggtgcctgttaccgtcgagggttactggcagatcaccgtggacagcatcaccatgaacggagaggccatcgcctgcgctgagggctgccaggccattgttgacaccggcacctctctgctgaccggcccaaccagccccattgccaacatccagagcgacatcggagccagcgagaactcagatggcgacatggtggtcagctgctcagccatcagcagcctgcccgacatcgtcttcaccatcaatggagtccagtaccccgtgccacccagtgcctacatcctgcagagcgaggggagctgcatcagtggcttccagggcatgaacctccccaccgaatctggagagctttggatcctgggtgatgtcttcatccgccagtactttaccgtcttcgacagggcaaacaaccaggtcggcctggcccccgtggcttaagcctaagtctcttcagccacctcccaggaagatctggcctctgtcctgtgcccactttagatgtatctaattctcctgactgttcttcccaggggagtgtggaggtcttggccctgttccctgtcctaccaataacgtagaataaaaacataacccactgaaacaggttttgtggagctgcttctctttgctggtctttttccttcacattactggggttagaac

SEQ ID NO: 459628 - DNA, 2105 bp, Homo sapiens
ggcggttttgtggaatagaaaagggggaaaggttgattgaaaaactccactgataaggaaggaaatgaagaagaagtacctggaaccgtgtccctcatcctctctagaagactgtggctactccatcattttaaactattacttacaactcacattttcaatgggcccttctccaattgaattaaatatgatccacattataaacacccaattatctcactttcttcaaatatatgcaatttattttaagtacatctatggaaaaggagtgtgtgtgtgtgtgttgtggtgtgtgtgtgtgtggtgtggtgtgtgtgtgtgtgtctcaacatattttcctgcagaggtgattgtgccaaatttatggcaagtgaaaaaactgggagagggagggcatgcttattcaagtttcatccagtattgcaagtcttttttcgttcctcctctcgtgtatcttctgtgtgtccagtacaccgtgagttaagtaagagcaatcttcaatagttaactgaatatcatattaatgatctgcttcattttgagtaaactagtgcttctattccagaaagtggtataaaaaaaacctggtgaatataatataatataataaatataatactttctgtatataatgtgcccgactgaaaaatttatgattatattttccaagtaaattactagatttgcacagctaggtttaaaagagaaaaaggtcagcaaaaaaggtggggtgggttatggtaatttccatacaccacaccccaaactggcaaaggtatatcacaattaatcatcttatgacgttagaagagtgtctgtttccacccgagttacacattggcagagatatgcatgcattgaattctgctacactttaaacaaaggatacaaattgctaaggaaaggacagtctcagccagcaatatcaattctcagaaccagaagagaaacaatgagattctttctctttagccacggcaccaaactctgaaccggctgagcctggttagcccttgattcattgtataagttgacccccctaaaacaagaaaaacgatgaagatgaacaacctgaactggactcctgccaagtccacaaaccgattttgcaagacctgacacttttgaagagtattggacagctattttgaagaatgtcctgcaattctgcctaatgtgtttcaatgaataaatgttacacgtgcattgttggccaagagtaccacagaaatgataagcccttcttagtgtatcaaatcagatggcattgttttatgtaccttatagcaagagttaatatttctctaaagaaatgacaggtcacacttcgtaaggaatacctgtttttaaaaaattcttgatgtgttgtagttttaaagggaatatttaaaaccaagtattataagaaactcgaaatagagtttgcatatggataggctaagatacaaatttaagattaataatatatttactaaatctattactatctctaggcattgttgtaggattttccatctattaacatatataatcctcactgcaaccttataaatgctgaccctattgttatcttgtgtgtaggaagaggtattgctgtaaggtatgtgaagaggtgtatctatgaggaactttacttaagttctgattggttatgaaacttactccaggaacccagtgcaataggctttataaaccttttacatttaacagtcaactttgtggcaataaacattcattaaccacaatattcttaactaattaatgtattcatttctttctcaagcactgtctataatattcctgttgtgtgtcgcgtattgttctagacatggcagatacctagataggcaggagcaaacattagctatcaacagcaacaatttcatagacaaaaactgatggaattcgcttggtttatgtagactgaatcgtatctataaaaacatattttaaatcattaaaagtgtgagatgtttgccttctaaaatgacctttctcaatttaaaaagctgtgaatgtaaactgatctataaattattcttttcaaatatatgaccattttttgtaaacatagaggtctatttgtattatacctgtgtttaccc

SEQ ID NO: 459629 - DNA, 1185 bp, Homo sapiens
tcgtgccttgcccgagctggtcggaagcaaggggaaaggcctccatggtcatacagcttcagggccagatccgaaaccagccagtgctgcccgaggacagaggcctctgcctgctgacaacacggaataactggggaccagagggcctggatgaaactgattttaagactaccaccagttctgaaatcccaggagtcaggagacccgtgttgtgcgttcctgtctcagctctgccactgaccagcaacgtgaccttgatggcattgctgcagctcattttggggggttctctctcctcatcggtagacggcagtgagatggagcccctgcccctgccaccagaggccctttacccatccctacagtggccctcaggaggtgcagaccggcctctagacctgcaccaggaggctgccacagcctcagaatgcagtgagcatagtcggtcttggggcatggaggctttttccagcatccgcaggaggaaggagaaacagccacccaagcgacatttgctgtctgcctcctgtggcagggaggcagaggccaaccctggattccagtggggtggaggaggcagcacgctcacggataaggacaactcggtgctccaagattttgagcgttattacaaacacaacagaggtctaaggagaatttatcaggacccctgagtctccccgcatgacactcagctaagcaggggaaagtggtatttggaggacacatatgtggtgaatcataagacctgcagcatctgacctcctgagctgcctctccgggcgcttggcctcaaatgcaagagacagatcatagaagtgatgtgcatgaaccaagatacccaaggagcatcacacctttggacaagagcagtccgggagagggaaaaacaaaccagccagcattctgcagctcattcattcaacacgcttccactaagtgcctgctgccactgctgtggcagatgatgacaaagatgatgatgatgatgaccaagtattaagtaaagatgccatttacagatggacataatccctgtcctcacagaatacttgatttagtgggggactaaagcaataatgacacaaataaatacatcctttacaaattgtgagactgctgtgaaggagaaggaaaggttgtgaagaaacgtgtctcagactcagattttaataaagcgccccc

SEQ ID NO: 459630 - DNA, 699 bp, Homo sapiens
ttattattcccattttactggcacgggagcagaggcacagaaacatgaagtgactttcagcgaatggagaagtcagacatggaagtttccaatcagatcaccctcgtggaagacgtcttagccaagctctgtaaaaccatttacctgctggccaacctcctggccaggccactcccggagggggtcgatcctctgaagcttgagatctatctcaccgacgaagacttcgagagaaaggatgttgggctgctccagacctctgacaatggatgcacccccaggattagatcagaaagatggacctgccaggggaaagcgtcagaggcttctgttcctaccatcagtaccatggatgcgctattaacagaccagcgtcccttgtttctaatactgaactggcctctactgagcttttgcctctactgagcttttgtcgcgcagctgagattggaaaggaagcctcaggagcagaagcgaatgcaagctaacagaaagaaaggcagcgcggaggacgccacagccccagcgccctcccagcctcagcagagctgtggggattgttcttcacatctgacgccatggggttctggaagtctcttaagggatatattggaactgacttgtattatttggaaatcgacataaattgtctattattaaatctcactgaattaagtccaactttaccatctgaacacc

SEQ ID NO: 459631 - DNA, 5911 bp, Homo sapiens
  misc_feature (3713)..(3713): n is a, c, g, or t
ctacccaagattcccaatgccccagagccgcagtttgcacaactatatctcatggcgtttctcttgtgtgtctgaggagctgtccagctctgacatcctggaacaaggaccgtctaatgcccgtgaggagaggatgagactgggcttcgtattctttccgtctgccccggaccgccgcggtgttgagtccggagctgacgccctcgagccgccagcaagcggaaaacccggagtggatctccacgccttttggatcggagccaaagggcacctcggaggaggtggccggctctgcggccctgcccggtgccaggccgcggccatcgggggagcacgggctgggggtgggtcgcgcagcggagccggatcccctggccggacgagcccggccgtggggctcggcggccctccccgcggggactgcgaggcgggcggggcgcggggcggcggccgtgccctcggggcggcttcgggcggcggcgggcgcgggtgcagtgcggcgcgcggccggcagcgggcgcaggcggtggctgtggccgcggcgttcggcggctggcgggcggcgccggcggtgccccgggcgcgctcacacacgcgctcacacacacacatacacacggcctcgtacacacacacacgctccggcgcgcacacgcggcgcgcaggccggagggaggcggctcggcgctgttcggcggcggcggcagcgtgctccgcgggcgggcgggagggctggcgggcggcccccgctccccggctccgcggctaggtgcagcccgctcggcccccgccctcggacccgcccccgggggtcgcccggccccatgcccagcggcggcggcggagcagcgcgcggccgcgggcggctctgaggagcccggagggaaccggcgacgaggggaccatgtaccgggacccggaggcggccagcccaggtaagcgcggccccggcgggctggggcgccccgcaccggcgggcaggacagcggcagcgccggacgccgtctcggagccccagcctggggctgttgtccgcccggagccgcacgggctcccccaggggtcatcccagccccgggggcgcgggatcgagcggcagcggctcggaccccggtcccccgcagtctggacactgccaggctggatgtctgggaccggcttcgcagtgtccccacaaggacctctcccccacccctcaacagcccaaggacaacgtgtgtggcggagcgaggagccgctgcccctgtgggagccgggcagtgccctcagaggcacccgaggctccccagcaccggtgccccgggggtgccagcgctggcggaccccagggcgaggatcccggcagctcttggccaaggttgcgggcacaggggagcggagtggcatcgcagtgccaactgtgaattgagagggtgccagggggcaagtgggaatctggtctggccagctgggttgaggctgcactgtgacccaggcagccccaaagcggccaggatgcagtcagacaggctggagtgtgcgggtgtcgggcaacgccgcaagctctgagcgccagattgccccgggagcggtgagggggcggcgggggccggagaaccgtctgccgctgcttcgccgctggcccaggccgccgctggggaccgtctgtgcgcccgccggggtgcagtgcccgcgccagccaccaggaggcagtgcggcgggcccccgggagggaatggggcgtggtatttaccacgttcgcggggcggccctttttgtcctgagtcaggactggggtcttcagcatccgaggacctaactcgaggaaagggggctcttgaggtcactgggtgctgccatagcttcagctgagggttgatcagggaggcattggcagaggaaggcggaatcactatgcacagtctctcggatcctgctcgctgggagctgcgcaaagggcgacctggaagagggcgcagccccaggactgagttctgtttcagcaccaaggacaaggagccgcgtggccgacagctgaaggacctgcttcctgccttctgctccctgcagaagctccctgtcaccaacagggctgcccatgggctttgtgcatccctggggcctgacttcatgactttcaaggtcccttctagctggagacacagtgactccatatgcagggaatggttcactctggctggggcgccctcgcgcgacgtcctgctggtctctgccatcatcaccgtcagccttagcgtcactgtcgtcctctgcggcctctgccactggtgtcagcgcaaactggagggacattcatcccctgagggcgccggtagggggagcggggctgagccgcccgccccgcatcgcgccgccccgcccagcccgcagcccacagctccccgagccgctgctccgcaagacctccactcccgtccccactcctgccgcccggcccagaagtgtggtgggactttgggggcagcagggggcgaggggggcgacggtgggcccgggggtgtccgagatgtgtggaaccgggctggctgccctgctttgttcctgggtcccctgtgtctgcgtctgtctcagaatttcaggaaaggtggtggaggaggctgggccatgtgcctctgtgtgtgcgaggctccagtctgccgcctgccgcttgcctcctttctgtgtggcttcccggccctcgagtgcgtgcgtgtgtgcattggtatgtttgcacatgtgtgcgtgtgcgttgatctagacagagacttttggaataacaatgagagcacagtgcagcagaaatggagctcctaccctcccaaggagtttattctaaacatttcaccctacgccccttatggcgacccacgactgtccctcaaggccagccttgcaggagagccccctcggcagccatacctggcccccccagctggtcccggggcccaccccaccttctgtgcagtcaggatggggttgcccgtttgggtcccgccccctcggttgtggtcgcttcttcctccccgctgtgtgctgccgtggctgctcggtggtcggtgtggcaccctcctgtcgggcgccaaagtggccgccgcggcggggctggcggtggagcgggaaggccggctgggggagaagccggcaccggtgccgccacccggagaggacgccttgagaagcggcggggctgcccccagcgagccgggcagcggtggcaaggcggggagaggccgctggcggacggtgcagagccacctggccgcagggaagctcaacttgtccaaggagctgtgggcctacctggccggccaggcctgggccggcccctggagcctcctgggcgaggcagtggcggcgacggcggtggcgacagctccgatggaggcctggcgaggtccggcagcgcgcaccctgcactggggcctcctagtcctggccctcggcttctttctcttccactgtgatcccttcatctgcttctcctttctctcctctcctccacctgccccaagtttcgaggactccaccctgtccacggccactacccttgagtctatccccagctccacgggagagccgaaatgccagcgaccccgcaccctgatgcggcagcagagcctgcaacagccgctgagccagcaccagcggggccggcagcccagccagcccaccaccagccagagcctgggccagctgcaggcccacatggcctcggcaccaggccccaacccccnggcctatggccggggccaggctcggcagggcacctcggccggctccaagtaccgggcggcagggggccgcagccgctccaacccaggcagctgggaccacgtggtggggcagattcgaaaccgaggcttggacatgaaatccttcctggaaggccggatggtggtgctatccttggtcttagggctttcggaacaggatgactttgccaatatccctgacctgcaaaacccaggaacccagcagaaccagaacgctcagggggacaagaggtacgagcacaggcgagggcctgcggcggcggcggcagagaaggaggcgcggagaggccgcctgcctcgaccggccccggctgctggacgagctgtttcgggctcctttccttccccctgcctgcccgtgttgcctgcaggagggaaggcggtgaacacagcccccgtgccaggccagacaccccacgatgagtccgaccgccggaccgagccacgttcctccgtctcagacctcgtcaactccctcaccagcgagatgctcatggctgacttctgctggtgcaagcgctcaggaagcaccttccctgactgtgatggggtggccaacctggctgccacagagatggctctgtcccagctgagctccgaggaggatgaggcccacgagggttgcagccgagagaacctgggccggatccagttcagtgtcggctacaacttccaggagtccacgctcaccgtgaagatcatgaaggcccaggagctgccggccaaggacttcagcggcaccagcgaccccttcgtcaagatctacctgctgcccgacaagaagcacaagctggagaccaaggtgaagcggaagaacctgaacccccactggaacgagaccttcctctttgaaggttttccctatgagaaggtggtgcagaggatcctctacctccaagtcctggactatgaccgcttcagccgcaacgaccccattggggaggtgtccatcccccttaacaaggtggacctgacccagatgcagaccttctggaaggatctgaagccatgcagcgatgggagtgggagccgaggggagctgctcttgtctctctgctacaacccctctgccaactccatcatcgtgaacatcatcaaagcccggaacctcaaagccatggacatcgggggcacatcagacccctacgtgaaggtatggctgatgtacaaggacaagcgggtggagaagaagaagacggtgacgatgaagaggaacctgaaccccatcttcaatgagtccttcgccttcgatatccccacggagaagctgagggagacgaccatcatcatcactgtcatggacaaggacaagctcagccgcaatgacgtcatcggcaagttcccactccatctgccgataaacaaccatatcaccttgggcaagtggctcggcctctccaagctttagtgttctcatctgtaaaatggagcaactaatactgtccctgtagaactttacagggtggcgtaagaattgcttgaggaggcagaggttgtagtgagccaagattgcaagactgcactccagcctgcgcaacagagaaaactctgcctgaaaaaaaaaaaaaaaaaaaaagtgatctcttcatatcacgtaaccaaaaaattcatacctgaccttgagttttcccaggacgggattctgtgacataaacccttccatgcttctaccttaaaatgtctactcctgtgtttatttatggtttagtgttgaaagcatgggctcgggagtcagattgcctgggtccaaatcctagcgttactttttaacgctgtaacctctctgagcctcattttctcctctcaaaatgagagtgggatggtcctacccttacaatgtgctgagaggattaagtaagatcacacaggtgagctgtttagcataggacttggaacatatgttagctagtatgataataaaggggcatgtatatccattcaggcaggacagtttgaccaggagtatgtgaggaaccagtgctcagggcagtcatggaggaaggggagatgccaggagtgagtgaggggcacatacctgggcattatcctgtgtgggggaaagggaaagggggactggatacccacagggaagggagctgagttggaggcaaccctcagacagatgggaatggagaactcacctgctggggtgagggaag

SEQ ID NO: 459632 - DNA, 862 bp, Homo sapiens
agcttcctgaatttcctattatattccagagcacagctgcagtgtgcatcagcatggctgcatgatacctattatttctacatgggctggcctctaaagaagaaaaaagctctgcagtggctgggccctcacattcctgcagaagccacatgtcaagaagatgatgaggagaagaaggatgacaatgttgatgatgccatcctttggcttcctcagcttttctgtggagccctttgctcacaagaaaatctaactgtgctatgtcctttcctttctctctggcctccgtggctcctaccgtgggcagctgaagggtcttcagatgcaagggagggggctcttttggctcaacccaaagtgtctggcactggtagccctgcacgttctagcagtggcaccaaggacccggcgtgggcaggagcacgcaggctggagctgccctgtaggaggcactgcttctcctgccctcatcgcccacttctcctattaggaaatgcctgaggaggtgccactcctgcggggctgttttgaaggggctggaagtcttttctgtcaccacctttacctacctgtcatctgtgaacgtgactggagatgccaaggctttcctcgacttctgccactgcccatggttcatggccctctcaccctgctcctcttaaaggccatgtgagcacagtgagaaggtggccatctgtaagccaggaagagagctctcatcagaacctgaccatgctgacactctgatcttgacctttcagcctccagaactgtgagaaataaatgtttgtggtttaagccatctactccatggtattttgttatgacagtccaggttgactaagacagacaccttagtctt

SEQ ID NO: 459633 - DNA, 945 bp, Homo sapiens
gtgagcaagatggcgactgtgaagagtgagcttattgagtgcttcacttccgaggagccctttcatcacagaaaggtctccatcacaggaactggatcagtgggcatggcctgcgctaccagcatcttattaaaaggcttgagtgatgaacttgcctttgtggatcttgatgaaggcaaactgaaaggtgagacaatggatcttcaacatgacagccctttcatgaaaatgtcaaatattgtttgtagcaaagattaccttgtcacagcaaacccccatctagtgattatcacagcaggtgcacgccgagaaaagggagaaatgcgctttaatttagtccggcaaaatgtggccatcttcaagttaatgatttccagtattgtccagcagagccccctctgcaaactaattattgtttccaatccagtagatatcttaacttacgtagcctggaagttgagtgcatttcccaaaaaccgtgttattggaagcggctgtaatctggatactgttcgttttcaattcttcattggacaaaagcttggtatccactctgaaagctgccgtggatggatcctcggagagcatggagactcaagtgttcctgtgtggagtggaatgaacatagctggtgtccttttgaaggatctgaactctgatataggaactgataaagatcctgagaaatggaaaaatgtccacaaagaagtgattgctagtgcctatgagattattgaaatgaaaagttctacttcgtgggccattggcctatctggagctgatttaacagaaagtattttgaagaatcttaggagaaaacatccagtttccaccataattaagggcctctacggaataaatgaagaagtcttcctcagtattccttctttggagagaagggtattaccaaccttataaagagaaagctgacccctgaagaggagg

SEQ ID NO: 459634 - DNA, 3125 bp, Homo sapiens
ttatggtcagctcatcacgcccttcacggttcctacgttccttttgtgtgctgagaggctgctgccatgatcattctgcggtcagggaatgagttggcctgaggttcacatcaccctattgtgtgagcacgtgcatgctgctgtttgaacccaggcacaaaatacttgaaggtgattgcgatgccctgaccaggctcttctcttccagtactctgccatgttccctgtttgttttaacctgcaggaagaaggaggagttgcggatgatagtgccatttctaatctgctttggcgggtcacagaaagtcgagagagccaaatgatgattgaggagaggaagcagctcatcactgtgagagaggaggcctggaagacgagaggcagaggagcggccaacgactcgacccagttcactgtggctggcaggatggtgaagaaaggtttggcgtcacctactgccataaccccagtagcctcagccatttgcggtaaaacaagaggcaccacacccgtttccaaacccctggaagttggcgggatgcacgaaacggtgctcactgtcaccggcaaatctgtgaaggagctgatgaagccggatgatgacgaaacctttgcccaattttaccgcaacgtggattgtaatatgctgagaagtcctgtggagctggacgaggacttcgatgtcattttcgatccttatgcacccaagaaatactttgtggagtccaagacccccaggtcatccaggggtggtggtgtcacagaccgggaccgcggctctgcttccatccgcagattgacgtcttccgtggccgagcacaagtgggcagttaggcccaagcgccaggttcaggcctccaaaaaccccctgaaaatgctggcggcaagagaagatctccttcaggaatacactgagcagagattaaacgttgccttcatggagtcaaagcggataaaagtagaaaagagagagtatttgaacccccaccctgcttctgtgtttgggaatggcttcttccgatgctttactcattgcttggttttctgccttgtgaaggccaataatggtgctcagaaggccctcatgaacttctcagaagtcaccctggcgggtttagccagtaaagaaaacttcagcaacgtcagcctgcggagcgtcaacctgacggaacagaactctaacaacagcgccgtgcccttcaagaggctgatgctgttgcagattaaaggaagaagacacgtgcagaccaggctggtggaacctcgagcttcggcgctcaatagtggggactgcttcctcctgctctctccccactgctgcttcctgtgggtaggagagttcgcaaacgccatagaaaaggcgaaggttgctgctggagacccaaaagaagatgaactctatgaagcagccataatagaaactaactgcatttactgtctcatggatgacaaacttgttcctgatgacgactactgggggaaaattccaaagtgctctcttctgcaacccaaagaggtactggtgtttgattttggtagtgaagtttacgtatggcatgggaaagaagtcacgttagcacaacgaaaaatagaatttcagctggcaaagcacttatggaatggaacctttgactatgagaactgtgacattaatcccctggatcctggagaatgcaatccgcttatccgcagaaaaggacaggggcggcccgactgggcgatatttgggagacttactgaacacaatgagacgattttgttcaaagaaaagtttctggattggacagaactgaaaagaccaaatgagaagaaccccggggaacttgcccagcacaaggaagactccagggccgatgtcaagcggaacaacgtgacacggatggtgtccgtgccccagacgacagcaggtgccatcctggacagggtgaacattggctgtggctgtggcctggtggaaggacaccacaggaggcagtttgagatcaccagtgtctccgtggatgtctggtacatcctggaatttgactatagcaggctccccaaacaaagcatcgggcagttccacgagggggatgcctatgtggtcaagtggaagttcatgaccccattgcaaaacactcacccggatgcttggcgctggggaaagggggagtccggtgaactccggagaaatcatccctttccttgccaaggaggagcctttcccacagcgctcctcaccccttcccatttaggagagcatgcaggtcacagggaccaagtaaagatttcagaccctgtctccaagacagttatccatgatgtaaagcaagtgcaggaacacccagcaggcgggtctcactgagcacacggccagtggggctgtgtgctgtgcagagccgggctgtggcccagaggtccccctgccccctcagggcacgatgctgggggctttaccctgcctctagctgagtgcctcctgggtttcctgagacttgttctgttgtgatgctaatttctcagatgaggaacaggaccttaagatcaaggaacctgcctgaagccacaagctagcagggagtggagcgggacactcacatccaggcctgcctcttttcaaacccaactgtgctgctaacccaccctgcatgcagggagtcagagtggggctccagcacaggatgtggagagccgtgagtttggctacaaggaggggccgaagatcccagtcaccagactgtggagcagatcccggaagttttaacttcgcgccccgcctgttcgtcctcagcagctcctctggggatttcgcagccacggagttcgtgtaccctgcccgagccccctctgtggtcagttccatgcccttcctgcaggaagatctatacagcgtgccccagccaggaaaaaaatctcaagaagccagtccccaagtcttaccttatccatgctggtctggagcccctaacattcaccaatatgtttcctagctgggagcacagagacgacactgctgagatcacagagatggacatggaagtttccaatcagatcaccctcgtggaagacgtcttagccaagctctgtaaaaccatttacctgctggccaacctcctggccaggccactcccggagggggtcgatcc

SEQ ID NO: 459635 - DNA, 3385 bp, Homo sapiens
ttatggtcagctcatcacgcccttcacggttcctacgttccttttgtgtgctgagaggctgctgccatgatcattctgcggtcagggaatgagttggcctgaggttcacatcaccctattgtgtgagcacgtgcatgctgctgtttgaacccaggcacaaaatacttgaaggtgattgcgatgccctgaccaggctcttctcttccagtactctgccatgttccctgtttgttttaacctgcaggaagaaggaggagttgcggatgatagtgccatttctaatctgctttggcgggtcacagaaagtcgagagagccaaatgatgattgaggagaggaagcagctcatcactgtgagagaggaggcctggaagacgagaggcagaggagcggccaacgactcgacccagttcactgtggctggcaggatggtgaagaaaggtttggcgtcacctactgccataaccccagtagcctcagccatttgcggtaaaacaagaggcaccacacccgtttccaaacccctggaagttggcgggatgcacgaaacggtgctcactgtcaccggcaaatctgtgaaggagctgatgaagccggatgatgacgaaacctttgcccaattttaccgcaacgtggattgtaatatgctgagaagtcctgtggagctggacgaggacttcgatgtcattttcgatccttatgcacccaagaaatactttgtggagtccaagacccccaggtcatccaggggtggtggtgtcacagaccgggaccgcggctctgcttccatccgcagattgacgtcttccgtggccgagcacaagtgggcagttaggcccaagcgccaggttcaggcctccaaaaaccccctgaaaatgctggcggcaagagaagatctccttcaggaatacactgagcagagattaaacgttgccttcatggagtcaaagcggataaaagtagaaaagagagagtatttgaacccccaccctgcttctgtgtttgggaatggcttcttccgatgctttactcattgcttggttttctgccttgtgaaggccaataatggtgctcagaaggccctcatgaacttctcagaagtcaccctggcgggtttagccagtaaagaaaacttcagcaacgtcagcctgcggagcgtcaacctgacggaacagaactctaacaacagcgccgtgcccttcaagaggctgatgctgttgcagattaaaggaagaagacacgtgcagaccaggctggtggaacctcgagcttcggcgctcaatagtggggactgcttcctcctgctctctccccactgctgcttcctgtgggtaggagagttcgcaaacgccatagaaaaggcgaaggttgctgctggagacccaaaagaagatgaactctatgaagcagccataatagaaactaactgcatttactgtctcatggatgacaaacttgttcctgatgacgactactgggggaaaattccaaagtgctctcttctgcaacccaaagaggtactggtgtttgattttggtagtgaagtttacgtatggcatgggaaagaagtcacgttagcacaacgaaaaatagaatttcagctggcaaagcacttatggaatggaacctttgactatgagaactgtgacattaatcccctggatcctggagaatgcaatccgcttatccgcagaaaaggacaggggcggcccgactgggcgatatttgggagacttactgaacacaatgagacgattttgttcaaagaaaagtttctggattggacagaactgaaaagaccaaatgagaagaaccccggggaacttgcccagcacaaggaagactccagggccgatgtcaagcggaacaacgtgacacggatggtgtccgtgccccagacgacagcaggtgccatcctggacagggtgaacattggctgtggctgtggcctggtggaaggacaccacaggaggcagtttgagatcaccagtgtctccgtggatgtctggtacatcctggaatttgactatagcaggctccccaaacaaagcatcgggcagttccacgagggggatgcctatgtggtcaagtggaagttcatgaccccattgcaaaacactcacccggatgcttggcgctggggaaagggggagtccggtgaactccggagaaatcatccctttccttgccaaggaggagcctttcccacagcgctcctcaccccttcccatttaggagagcatgcaggtcacagggaccaagtaaagatttcagaccctgtctccaagacagttatccatgatgtaaagcaagtgcaggaacacccagcaggcgggtctcactgagcacacggccagtggggctgtgtgctgtgcagagccgggctgtggcccagaggtccccctgccccctcagggcacgatgctgggggctttaccctgcctctagctgagtgcctcctgggtttcctgagacttgttctgttgtgatgctaatttctcagatgaggaacaggaccttaagatcaaggaacctgcctgaagccacaagctagcagggagtggagcgggacactcacatccaggcctgcctcttttcaaacccaactgtgctgctaacccaccctgcatgcagggagtcagagtggggctccagcacaggatgtggagagccgtgagtttggctacaaggaggggccgaagatcccagtcaccagactgtggagcagatcccggaagttttaacttcgcgccccgcctgttcgtcctcagcagctcctctggggatttcgcagccacggagttcgtgtaccctgcccgagccccctctgtggtcagttccatgcccttcctgcaggaagatctatacagcgtgccccagccaggaaaaaaatctcaagaagccagtccccaagtcttaccttatccatgctggtctggagcccctaacattcaccaatatgtttcctagctgggagcacagagacgacactgctgagatcacagagatggtgagcacgctttcctgccatatgaaggtggctcctgtgccttttggattgtgggttgactttactttggggagagcatccaattgcactttccaagtgggaaaatatttattttgcaacatgataacatgtcatagaattcacttagtaagaagagaagtcgaatgggaaatcaattgaactattttagtaattttctacacagtatacccaaatttaaaaaacttaaaagcaaaggtgagttgaatcatgctgagggctgtatgtgtacataaaagctgcgaactcttcattctctttgctaagaacctgttgcttggcattgcttgtctctcagtgtccatgtgacgcacaaccaaaccctcatgtttcagac

SEQ ID NO: 459636 - DNA, 1059 bp, Homo sapiens
gtcagccctgactcccacctccacacccccatgtacttcttcctctccaacctgtccttgcctgacatggtttcacctccaccatggtccccaagatgattgtggacatccaatctcacagcagtcatctcctatgcgggctgcctgactcagatgtctctttttgccatttttggaggcatggaagaaagacatgctcctgagtgtgatggccctatgaccggtttgtagccatctgtcaccctctatattattcagccatcatgaacccatgtttctgtggctttctagttctgttgtcttgttgtctcagtcttttagactcccagctgcacaatttgattgccttgcaaattacctgcttcaaggatgtggaaattcctaatttcttctgtgacccttctcaactcccccaccatgcgtgttgtgacaccttcaccaataacatagtcatgtatttccctgctgccatatttggttttcttcccacctcggggatccttttctcttactataaaattgtttcctccattctgagggtttcatcatcaggtgggaactataaagccctctctgcctgtgggtctcacctgtcagttgtttgcttattttatggaacaggcgttggagggtacctcagttcagatgtgtcatcttcccccagaaagggtgcagtggcctcagtgatgtacacggtggtcacccccatgctgaaccccttcatctacagcctgagaaacagggatattaaaagtgtcctgcggcgcctgcacggcagaacagtctaatctcaatatcttattatctgttccattccttttgtagtgtgggtttaaaaaggcagcaaggtgtagatcccctgtgatattaggagtaacatttccaaaaaaatattacgaataatatcactgtttgtacaccacgtgtgacattaggagtaacagcccccaatactattatgaataacttcacagggtgtacacctctgtgacattaggagtaacatctttctaaattattatgaataatatcgcaaagtgtacaccccctgtgacattc

SEQ ID NO: 459637 - DNA, 4942 bp, Homo sapiens
tgaggtgaggttgcccagcaggcggggaccccagctcggagagggttctccgcgtccccagccgtcggcgcaggaagttgaggcggccaacatgccttcgtccccactcgactcccgggcccacgtgctggtccacgccggggacctgagagcatcgcgactagggggctgcgggacgcctcccgagcgtcgaggaaagacaggaccggggggagcaggcggggcccacgcggttgcatttctcgcccgccgccgcttcaagaagcagaacccggagccccacctgcaccctcactccggcccccgagcccggcctggccggcagtgctcggggaggccctgggtggcgctgtctcctcccctcctgcaaacgccaccgccagaaaatcgctcccaccccacccggccaggcgagccaccgacccggggctgcgtccgcctcggttcagcctcggttcagcctctccgggtgcggatcccggacccggccagcagacggaggctggcggagcgcagagtcccggcgactcccacctcccggagggggcacggggacttgcgtggggcgggcgggggccgggattccgggcggggcgaagggacccagctcggctgcggggcgcgcggtcgctctccctcaggactgcggctcggatccctccctacctctcccggtccctcgcaggactctacatcgccttcggcgtttcctctccctcccgcagtttccacccttcggcttgtcttactctcggctccttcgcccaccctttcctccccatcctgtcccccgcccccactcttctgcagtttgtaactgagagcgccccaaacaaccccatcaagccaataaacccaaaatgtgagcactgcccaaacccgtgtgcttatcctgccgcttctagaaggcaaattgatacggggtggatttggaacggctttctcagagaggcccgaaagctttcaaaaattctaagtcaggagacagctggctgttttcttagcacctctgcagcgctgaggatgtcttcatcctcctcagacacccccagcccggggatgttagcccattgcccagatggaagacagagcagggaggtaaccccagcggttacaaacttgattcttctcatgtggtggactccagtcttttgaatacgatctctacctcttgttttcccttcttatttaatttcttgatgttttcttggatggtttaagcgacaggaggaagagagggcaaaggcagcccccgtacctttcaatagagtgaaatggcctgaaattacagctacataactatcaaaaatgaaactgtgtttgtgaaaatctgtaaccctagctatgtaattggagacattcatgaaagaaggatattgcacaggtgaaagtgatttttcaattgctttcatatttttaatatttttccaaattgttgagaggacttttcctgaatacaaggatgaatgtttcggcttggaaagttcagtgtagccctagtcattggaaggctacagttatcataaattgcttttaaagtgtttattaaagtgattgaaatttgtttctttaaaaaaaaatagtctctgaacttgcaaacttcctaccttaccaaatagactttcctgagacttgaaaatggttcccatgaactttctcatggcaaaattacacagtaaacatgttcctggaactcttttttaaaaggagttggagcccaatcttcacaaccattcattttcctgccagattctttgcattgggcatttccttgtgtgcctgggaccttactgttgttgaagcagaagttctcatataggaaattttgcattactgaagaactctgctttagggcaaaggctgaaatgatacaggtttaggcatcccatgcctactgagtgagaggtcatcgcattaaatattttgagcatgctgacaaggtaaggaagatgcagaaactcctgaccagattcatgaaggctgaagacagaattctaagcagtcccttgttttgcatgaagcactgtgatattgaggaagaggaggcgttaagatcggaattgcccaaagtgtctacacaccttcatatttgttactaattatcaccccttttccacttctcgttgtgtttggccagccctgaatacctggagactgatccgagaactgtttgctttcgtttcttcccacatatttttattaacaacttgaactgatcctgcctaatccaaattcttatactttgatcttgttccttagcatccacattaaagagtttttctgtttccaccaaatttttacctcccccccttaactttttccctatgctagttctctctgcttattattctcccatttattctctcgacttgaggtttctgtgatggttacttacattagtgaccacattgccaaagcaccttcaaaagtaactgatgccctttattacgtactggagttgcgtttaaccagggaatcctcatcaagccacaaaggtgagggagaaaactgagataattacatacaggtaacagggcaaaaacactgttttgtctcatcattgagttttttccaaatgaatgtttttaaattagaaatatcagattaatgactgtaataaaaatataaattgcctctttccaatgtgtattcaggccaggatcctcttctgccagtgacaccatgaaacagaaaagttgtgtgtctggcccccaaatgcttagttcctgttactaacaatcgatatggcgttcttctttgtagggaaacctgaccttagaggaaatggaaaagttggagagacactgagcactgatacgaaataattctcttgctgaaatacacgaaaggagtcccagcagccatattagtatttccacgtcctgtgtcagccccaagtagagagaacttggaatgggaggggaaatggcagccatcaggaaatgaaatgctggcccagagaattctaagcaagtcaatcaccagtccaaaggaaaggccatgtgaggacataaggaggagacagccatctataagccaagaagaaagccctcactagaaaccaactctaatggcaccctgatcttggatttctagcccctggacaatgagaaaataaatgtctgttgtttaagcacctagtctgtgttggggctctcttctggatggggtgaggtttataaaataagtgacttctgagcaagcattcctacacactgaaataaaaatacttcatgattttgatacagggagttcttagagacttgcatggagtaggtgtcactacctgcttgttgaataaatggctccagcagcttttcatgcagtaagaaattttagaaaatgatgggtttaaagacgctttgaaacacaaatgtactcctgttagaaagatacacatttataagtcaggtttcctagaaaacctcaaattctttgtgacccagaaaatgttgtaataaaatcaacctttttttttttctcccagaatgcttcatctggagaatttcaaagagacaaccaaccacctgttgtcaatttccattcaccaccctaagtgttaatgtatctctggtttcctaaaggtgagagcagaacgtgttcattttcatctttgtttttgaaaaacagaaagaaaatttagaggtctgtacccaccttccagtgagatgcctcctttcaatttcaagagaatttggttattccataggaggcactgtgtagttcgctggttatgatcatggcttttggtgtcagatggtcctgggtttgaatctaggttgtctcacttcctagctcctgaccatggacaagttgcttagcctttctgagcctcagtttctcattcacaatatggatgtttcagttacctattgctgtataacaaacctacccaaagcttagtagcttaaaacaaaaccaccttatgttttctccagattctatttggacagggctcagcatgggtggttcatccgtgcctcacatggtattatcacgaaccctcataaggctgaattcagctggaaatggaacatcaaagatgatctcattcacatgaatggaagttggtgctgtcagccggggtgcttcagtttttatgtagcctcttttcctctcacagtctagactgccttccttacagcatagcagctcggttctatgagagagcaagaacaaaaactaccagacctctttaaagcctagccccagacagaacaagcacaacttccacttcattttattgattatagcatgtcacaaagctccacctaattcagcaaaagggaatagactctacctcttgatgggaagtatggcaaaagatttacagctatttttaattcaacacaatgggtatacataattcttcttttctcaaagtgctgttatgagaagtaaatgagataatgctagtcagtaagtccttaataagcacaagctgttcattactgttttacagtattgaataagtatgaagccaatcaagctttgccatggagtacctggaccaatcagttaccttggttgactcttagttccttcttggtatctctggttctatttaacacaatgcacccgggttctatggctccataagagatgctcaaataaagactctaatagcaaatatttattgacagtgttcactgtgtgtcgagcactgttttaagcacttttgttacataacaaccctacagtatcaaagctaaccttattctgcagatagactaatgaggcacagggaaggaaactgacctgctaaagccacatgcctaacaggtaagggacctggggtatggatctataaatcaggaatcctgactaactccaaaacccatgtttgtatgatttgttgaataagtgagcctatagaattaatggggttccttttaactctaaaattgtatgatgtttccaagtacaaaatgtatatgtaatc

SEQ ID NO: 459638 - DNA, 919 bp, Homo sapiens
atacaacctgaacaaagctttttcttgtgctctgaagggtcctgagacgtgagggggatgccttccatgaggatttttatctcagtgaatgtgcttcttgcatctgctgtatcacttggagagcctgttaatcatgcagattccttggccccaaatcagaatctctgggacggcatccgcaggtctaaatctgggtgggggtgtttggtcactatgggcttcacgaggtcaattcctgactactttgctgtgaatcgcacaacccacacagtgatgcagcttcacatacagcttgggaagcacataggcatcgaagatgcttatttcagaaatgtccctgactgttgcagcctccactatgtttcaaatgacgaatttcttaatggccttgtccttgggcacgcattgggcacagttcgtgcagcaaataagctgcatgtggccatggcccattttggcacgaccattgttccttcttttctttgtcgtcttggagggccagaaaagcaaattaaactggaatgttatggagaccactatccctgcctcctttccttttttaaaggtggcactaatttctgtaattctttccaagatgtggctttccttctgatataccatcatggctggaagagaagatatggtatgacaaagtcttctaggctcattcctgctccagacatgaaatcatccattttcccaaggagcccttcagagatcacgatctggcactagaggtcctcgttgctgttgggttggtcaatgtatgaagtcctgttccctggacagagctagaaatatgtttttgtttaatgaaaaagagaaatacctcatgaattagtactcatatttctaattcaaataaaatattacagtttttctttacctaccttctttgattttatatttgcacttcttt

SEQ ID NO: 459639 - DNA, 1610 bp, Homo sapiens
gcctcaatttcctcatctgcccatgcgtatcctcaaggttgtggcagcctcgagtgacaccctccttgtgccaaacagagaattcagcaaagagccagagctgatgcccaaaacaccttctcagaagaaccgacggaagaagagacggatttcttatgttcaggatgaaaacagagatcccatcaggagaagaaagtctcggagcagccagctgagctcccgacgcctccgcagcaaggacagtgtagagaagctggctacagtggtcggggagaacggctccgtcctgcggcgtgtgacccgtgctgcggctgcagctgccgcggctaccatggcattggctgcaccttcttcacccacccctgagtctcccacgatgctgactaagaagcccgaggataaccacacccagtgccagctggtgcctgtggtggagatcggcatcagtgagcgccagaatgctgagcagcatgtcacccagctcatgtccaccgagcctctgccccgcactctgtccccgactccagcttcagccacagctccaacctcccagggcatcccgacatcagatgaggaatcaacacctaagaagtcgaaggccaggatactggagtccatcacagtgagctccctgatggctacaccccaggaccccaagggtcaaggggtcgggacggggcggtctgcgtctaagctcaggattgcgcaggtctcccctggcccacgggactcgccagcctttccagattctccatggcgggagcgggtgctggctcccatcctgccggataacttctccacgcccacgggctctcgcacggactctcaatcggtgcggcacagcccgatcgccccgtcttccccgagtccccaagtcttagcccagaagtactctctggtggccaaacaggaaagtgttgtccgcagggcgagcagaaggcttgccaagaagactgccgaagagccagctgcctctggccgcatcatctcccggcgctgcagctgctcccaccacctccccaaacctggctgctatacccaggaagggtcctggcttcccttctctgtgcctggcctgctgtcttccctcttttcctgagaccctgtgcaccccaacctcccgctggccacctcccagcctgaactctgaccaagcccccatggctcaggatgcgccagctcagctaccttctctctgttccccaaaaaagcctctttttttcctgcctcatggccttggccctccttctccctagaccagtggcactgggaacaggcatgctcccagctaggaagaagccggggacataaagctagcagctgtggtgaggataccagggtgagtgctgagggtgagggacctgggcttcctgtttttaatgattaagcctcagcctcaaaaagcttttgacagcctggacaacatggccagaccctatctctaccaaaatggaaaaaattagccaggtatggtggcatgtgcctgtagtcccagctactcaggaggctgaggtgggaggattgcttgaacccaggaggtcgaggctgcactgagctgagattgtgccactgcactccagcctaggtgacagagtgagactctgttaaaa

SEQ ID NO: 459640 - DNA, 1030 bp, Homo sapiens
gagctggtgaaatggctggtctagcagggttctctcttgcttctggcttaatccagagcaggttcatctgttggggtaaattagaaggttttacttgaaaacgtatgtagagtttttaacaaggaggccaaaagggagagagcaactgaaaagaaagaaaaagtctgtggactccctgtatgtatgtatgtatgtatgtatgtatgtatgtatgtatgtatgatgtatttgagacaggttctggatctgtcgccctggctggactgcatgagctgagatcgtgtcattgtacttcagcctgggcgacaagagtgaaactccatttcaaaaataaaaaataaaataaaaataattaaaaaacaaatgatgggcgctagcttgcactcccgccctgcctgtgcgctgcccgagtgtggagctgctatgctgcgaaggctcgaggacccgcagacgccaggggatcagcgccgctgcgtgcactgcgcctacttccagtgcgtgcaaagggagagcaagccgcacatgcggaagatgctggtttactggatgctggaggtgtgtgaggagcagtgctgtgaggaggagcagtgctgtaaggaggaagtctttcccctggccatgaaccacctgcatgctacctgtcctacgtccccacccacccgaaaggcacagttgcagctcttggttgcggtctccatgcggctggcctccaagctgcgtaagactgggcccatgaccattgagaaaatgtgcatctacaccgaccacgctgtctctccctgccagttgcgggactgggaggtgatggtcctggggaagctcaaatgggacctggccgctgtgattgctcatgacttcttggccctcattctgcaccgaccgacaggccttggtcaaaaagcatgcccagatctttttggctgtctgcagaggaaactcaccctgtggccaccaccagaggcccacagggaacactgccagcctacggtcgatgttcacttagggcccaagggctcttaaatcacttgtg

SEQ ID NO: 459641 - DNA, 400 bp, Homo sapiens
tactactactactaaattcgcggccgcgtcgacgctccggaactcggggaagagcgtccgggagccgggtctgggttccgcactccgtccgccccgatggcagagagtgagatacggacgccccgggacgaggggctcaggacccggctacggacacctgcctccatctccctccagataacacaagtgtgaagagaggggagagcagcaaaggctgagctgcgtgtgcctggtcccttccagactttccagataactttgccccacggaggacaaggaaagccaaaagagagaagccaggattgttagtcttggaaaatgcctccatatagaaacatgagccggagaataaatcacttgcctctctaaccaaaaaaaaaaagtcgacgcggccgcgaat

SEQ ID NO: 459642 - DNA, 902 bp, Homo sapiens
ggtggttagtttgcgaaagtcgtccgccaggcccagaccgctggataggaggctcttggccgggccgggggctgggggccgggatggcagagggggccctagctgcgccccgccgcgctgggccctcgtctccgggtgctctcaaccctcatacaggcccttagccgttctcctagggaccctgcccggacaggaggaaaggtttccggcccatggagtttagtctcattacaaaagcaaaacaagaataagacttaccaagttgcttgccgttggggctgaggtccaaggaggtgatcgcagctttgtggcctttgaaataacgctccagaacggggtcctcctggaaaggaaagttgtcaagttttgaaagccgccgcagacctcgaattctggcggctgggatccacgctgccacttccccggagtccggcttgggaatggccacccaggcggcggcttggctgggcggcggggccgggcagcagcccacccacgggcgcggcgcccagtcctgctacagggagacgccggcgccagctctccccgcagagcccgcaaaacgctctgttcgcgcttcccagagtccagcgcatcgcaggaaccgcggcccctttgaaatgcacgttcccgggccccgcccgctggcccaaggcaggcaggtgcgaggatgcgcctcggctttggtactttttttttttttaatacttcctaggtgattctgacgcaggcgctccacggaaaccctccgagaattctgggggccgtggggccgcccagctcagtccggagctccggaactcggggaagagcgtccgggagccgggtctgggttccgcactccgtccgccccgatggcagagagtgagatacggacgccccgggacgaggggctcaggacc

SEQ ID NO: 459643 - DNA, 639 bp, Homo sapiens
tccggcttgggaatggccacccaggcggcggcttggctgggcggcggggccgggcagcagcccacccacgggcgcggcgcccagtcctgctacagggagacgccggcgccagctctccccgcagagcccgcaaaacgctctgttcgcgcttcccagagtccagcgcatcgcaggaaccgcggcccctttgaaatgcacgttcccgggccccgcccgctggcccaaggcaggcagaattctgggggccgtggggccgcccagctcagtccggagctccggaactcggggaagagcgtccgggagccgggtctgggttccgcactccgtccgccccgatggcagagagtgagatacggacgccccgggacgaggggctcaggacccggctacggacacctgcctccatctccctccagataacacaagtgtgaagagaggggagagcagcaaaggctgagctgcgtgtgcctggtcccttccagactttccagataactttgccccacggaggacaaggaaagccaaaagagagaagccaggattgttagtcttggaaaatgcctccatatagaaacatgagccggagaataaatcacttgcctctctaaccaaaaaaaaaaagtcgacgcggccgcgaat

SEQ ID NO: 459644 - DNA, 967 bp, Homo sapiens
ttgagtcccagtagagttgaatgatttgtctgagaaaagtgaagtaaccttcctacttctcacagttggtgactggcctagctgggtcttagtcttaggtctttgccctccaagaaccatgcgaggccagcggagcctgctgctgggcccggcccgcctctgcctccgcctccttctgctgctgggttacaggcgccgctgtccacctctactccggggtctagtacagcgctggcgctacggcaaggtctgcctgcgctccctgctctacaactcctttgggggcagtgacaccgctgttgatgctgcctttgagcctgtctactggctggtagacaacgtgatccgctggtttggagtggtgttcgtggtcctggtgatcgtgctgacaggctccattgtagctatcgcctacctgtgtgtcctgcctctcatcctccgaacctactcagtgccacgactctgctggcatttcttctatagccactggaatctgatcctgattgtcttccactactaccaggccatcaccactccgcctgggtacccaccccagggcaggaatgatatcgccaccgtctccatctgtaagaagtgcatttaccccaagccagcccgaacacaccactgcagcatctgcaacaggaaccagggatgaacctgaggggcctggacaccgcctgaaattgtgtttgattctagtccttaatcatttcccaaccagcctggctaaacaattgtgtgggccactataaccatcggtacttcttctctttctgctttttcatgactctgggctgtgtctactgcagctatggaagttgggaccttttccgggaggcttatgctgccattgagacttatcaccagaccccaccacccaccttctcctttcgagaaaggatgactcacaagagtcttgtctacctctggttcctgtgcaggtatttgtttttgatagttttaa

SEQ ID NO: 459645 - DNA, 917 bp, Homo sapiens
ttgagtcccagtagagttgaatgatttgtctgagaaaagtgaagtaaccttcctacttctcacagttggtgactggcctagctgggtcttagtcttaggtctttgccctccaagaaccatgcgaggccagcggagcctgctgctgggcccggcccgcctctgcctccgcctccttctgctgctgggttacaggcgccgctgtccacctctactccggggtctagtacagcgctggcgctacggcaaggtctgcctgcgctccctgctctacaactcctttgggggcagtgacaccgctgttgatgctgcctttgagcctgtctactggctggtagacaacgtgatccgctggtttggagtggtgttcgtggtcctggtgatcgtgctgacaggctccattgtagctatcgcctacctgtgtgtcctgcctctcatcctccgaacctactcagtgccacgactctgctggcatttcttctatagccactggaatctgatcctgattgtcttccactactaccaggccatcaccactccgcctgggtacccaccccagggcaggaatgatatcgccaccgtctccatctgtaagaagtgcatttaccccaagccagcccgaacacaccactgcagcatctgcaacaggtgtgtgctgaagatggatcaccactgcccctggctaaacaattgtgtgggccactataaccatcggtacttcttctctttctgctttttcatgactctgggctgtgtctactgcagctatggaagttgggaccttttccgggaggcttatgctgccattgagacttatcaccagaccccaccacccaccttctcctttcgagaaaggatgactcacaagagtcttgtctacctctggttcctgtgcaggtatttgtttttgatagttttaa

SEQ ID NO: 459646 - DNA, 2773 bp, Homo sapiens
  misc_feature (1)..(6): n is a, c, g, or t
  misc_feature (10)..(10): n is a, c, g, or t
nnnnnnctgncagcagcttcattgtgtgcgcgaggagcgagcggcggcggagagcgggcgagcaagcggcatcccgagcgcggcggggagagcgagcgcgccggggagggtgcgaggcggcacccgcggctgcgctccgcccgcctcccggcaactctgcccagcgccgcgcgccgtgcgcgccgtcccgccgccgtcgccgccgccgccgccgccggtgccccggccggctgccgtcgcgggcaggggtctgcttaggacacgggtccccgcccggggactggggcatccccggcgcagctgagaggcgcagagcccggggggcgcagattgcgctccagcgcccagccgctgaacggcgtgggcaggtgggcggtggggttccagggcgccccgaggacagggggccccgacttcaggggaaccccaaccctgaggggcgtacatagtaatcacgccccagccgcaccggaccttgcgctcatcccttgcgtcccccacttctgcacaaacttttctgacgccctggctcgtgggggtcgtggagagcgctggggctaccaggtgggctcccaccccgccggaccctagccacgctgacctcctgcctctcctaacctcagtggcgacctctccaggccgggccgggctcggcactcggagcgagtgcggcaaccactgtcgctctccgaaggctcctgcgccccccggggcagctgggcggggtaatgccctcagtgatggagaagccgagcgcgggctctgggatcctgtcccgtagccgggccaagacggtgcccaacggcggacagccccactcggaggatgacagcagcgaggaggagcactcgcacgacagcatgatccgcgttggaaccaattaccaggccgtaattccggagtgcaagcctgagagccccgcacgctacagcaacaaggagctgaaggggatgctggtgtggtcacccaaccactgtgtgtcagatgccaagcttgacaagtacattgcgatggccaaggagaagcatggctacaacattgagcaggcgctgggcatgcttctgtggcataagcacgatgtggagaagtcgctggccgacctggccaacttcaccccattccctgacgagtggacagtagaggacaaggtgctgtttgaacaggcctttggcttccatggcaaatgcttccagcggatccagcagatgctgcctgacaagttgattcccagcctggtgaaatactactactcttggaagaagacccgcagccgaactagtgtgatggacagacaggcccggcggctggggggccgcaaggacaaagaagacagtgatgagctcgaagagggtcgaggaggcgtgagtgagggagagcccgatcctgcagatcccaagagagagcctctaccctctcggcccctgaatgcacgcccaggccctgggaaaaaggaggtccaggtgtctcagtaccgccaccatcccttgcgaacccggcgtcgcccacccaagggcatgtacctgagccctgagggcctcacggcagtgtcaggaagcccggaccttgccaacctcacgctccgaggtcttgactctcagctcatctccctcaagcgccaggtacagagcatgaagcagacgaacagcagcctgcgccaagccctggagggcggtattgatccactacgccccccggaggccaacaccaagttcaactcccgctggaccacagatgagcagcttttggctgttcaaggtccagattacatcggtctccacgtccgtgccccgatcagtgccccctgcgccaccaccccctccacctcccacctcgctgtcccagccacccccgctgctgaggccacctttgcccacggctcccactctgctccgacagccacccccactgcagcagggccgcttcctccagccccggctggcccccaaccagcccccaccgcctctcatccgccccgctctggctgccccccgccacagcgcccgccctggccctcagcccccacccaccctgattggaacccctctggagcccccagcaccctcactctgagccctgacgtcctccaccaaccacgggctccaggacccctttgctggccatccccaggcatctctggtgtcactgaggacagaagggactagggctctggcggggtctttgtaagaccagagtttcggacagcccagccccgccctttgggttctgcatgtgttcctggcagctgggcctgtctcctggggccatggccgggctcaggggcctttgagctggcctgagggcactttcgcttcctggccggtactggaatggctgtgtcctagtctgctggggcttggcctctgggtcctgccctttgtgtgtccggggtagtgaccttagcgtggagtggggagagggcagttgggtgtgctggctgttctcattcctctttcccttcttttagcaataagtctggggtgaggtggggagggaggctgcagggggggaggtgggcagaggggccttacagcagcagaggctggaagagaagctctgtcttcaggggccagctgggaaatgctaaggagctgagggtgcccaccaagcccaccttccagaaacttggagaaatgggggttgggaacttatgcagacatggatttatttttcaacattttttaaaaattaaaaaaaataaaatctaagcttactgagttttctttcccttttggtgcaagggccctgggctttgcttcctgtctgtgccctgtgg

SEQ ID NO: 459647 - DNA, 1975 bp, Homo sapiens
gtccagggcgtgcattcaggggccgagagggtagaggctgccagtgaaaggagaggccctgggaaaaaggaggtccaggtgtctcagtaccgccaccatcccttgcgaacccggcgtcgcccacccaagggcatgtacctgagccctgagggcctcacggcagtgtcaggaagcccggaccttgccaacctcacgctccgaggtcttgactctcagctcatctccctcaagcgccaggtacagagcatgaagcagacgaacagcagcctgcgccaagccctggagggcggtattgatccactacgccccccggaggccaacaccaagttcaactcccgctggaccacagatgagcagcttttggctgttcaagccatccgtaggtatggcaaagactttggggctattgcagaggtgattgggaacaagactctgacccaggtgaagactttctttgtgagctaccggcgccgcttcaatctggaggaggtgctgcaggaatgggaggctgagcaggatggggcccctggagccccagtccccatggaggaggctaggagaggggctccattgccagccccagccctagaggaagatgatgaggtccagattacatcggtctccacgtccgtgccccgatcagtgccccctgcgccaccaccccctccacctcccacctcgctgtcccagccacccccgctgctgaggccacctttgcccacggctcccactctgctccgacagccacccccactgcagcagggccgcttcctccagccccggctggcccccaaccagcccccaccgcctctcatccgccccgctctggctgccccccgccacagcgcccgccctggccctcagcccccacccaccctgattggaacccctctggagcccccagcaccctcactctgagccctgacgtcctccaccaaccacgggctccaggacccctttgctggccatccccaggcatctctggtgtcactgaggacagaagggactagggctctggcggggtctttgtaagaccagagtttcggacagcccagccccgccctttgggttctgcatgtgttcctggcagctgggcctgtctcctggggccatggccgggctcaggggcctttgagctggcctgagggcactttcgcttcctggccggtactggaatggctgtgtcctagtctgctggggcttggcctctgggtcctgccctttgtgtgtccggggtagtgaccttagcgtggagtggggagagggcagttgggtgtgctggctgttctcattcctctttcccttcttttagcaataagtctggggtgaggtggggagggaggctgcagggggggaggtgggcagaggggccttacagcagcagaggctggaagagaagctctgtcttcaggggccagctgggaaatgctaaggagctgagggtgcccaccaagcccaccttccagaaacttggagaaatgggggttgggaacttatgcagacatggatttatttttcaacattttttaaaaattaaaaaaaataaaatctaaaaaaaaaaaaaaaaaaaaaaaaaaaaaaaaaaaaagagggggggggggcaaaaaatatccccggagggggccccaatttacgcggttacccagtttttttgttaaaaaggggcccccataaaggggggggaataaaaaaaagccaggcacgggggccccgtggtttaaccaacggttctgccggtggaacaacccgtgttagctggggagctgcttctgagagggaccctctattcctcggcgcgggcggcccctatcttgcggcaacaaccctcttataagaaaatttagaagacctaagggcaaattattcacacttctgacgctggcttcccctggtgtctacccacacgctgataatggctgcgcgctagaaaacatcgggctaaccagagcacgacttttttgaaccactttatcag

SEQ ID NO: 459648 - DNA, 3148 bp, Homo sapiens
  misc_feature (1)..(6): n is a, c, g, or t
  misc_feature (10)..(10): n is a, c, g, or t
nnnnnnctgncagcagcttcattgtgtgcgcgaggagcgagcggcggcggagagcgggcgagcaagcggcatcccgagcgcggcggggagagcgagcgcgccggggagggtgcgaggcggcacccgcggctgcgctccgcccgcctcccggcaactctgcccagcgccgcgcgccgtgcgcgccgtcccgccgccgtcgccgccgccgccgccgccggtgccccggccggctgccgtcgcgggcaggggtctgcttaggacacgggtccccgcccggggactggggcatccccggcgcagctgagaggcgcagagcccggggggcgcagattgcgctccagcgcccagccgctgaacggcgtgggcaggtgggcggtggggttccagggcgccccgaggacagggggccccgacttcaggggaaccccaaccctgaggggcgtacatagtaatcacgccccagccgcaccggaccttgcgctcatcccttgcgtcccccacttctgcacaaacttttctgacgccctggctcgtgggggtcgtggagagcgctggggctaccaggtgggctcccaccccgccggaccctagccacgctgacctcctgcctctcctaacctcagtggcgacctctccaggccgggccgggctcggcactcggagcgagtgcggcaaccactgtcgctctccgaaggctcctgcgccccccggggcagctgggcggggtaatgccctcagtgatggagaagccgagcgcgggctctgggatcctgtcccgtagccgggccaagacggtgcccaacggcggacagccccactcggaggatgacagcagcgaggaggagcactcgcacgtgcctccccctggctccacagacagcatgatccgcgttggaaccaattaccaggccgtaattccggagtgcaagcctgagagccccgcacgctacagcaacaaggagctgaaggggatgctggtgtggtcacccaaccactgtgtgtcagatgccaagcttgacaagtacattgcgatggccaaggagaagcatggctacaacattgagcaggcgctgggcatgcttctgtggcataagcacgatgtggagaagtcgctggccgacctggccaacttcaccccattccctgacgagtggacagtagaggacaaggtgctgtttgaacaggcctttggcttccatggcaaatgcttccagcggatccagcagatgctgcctgacaagttgattcccagcctggtgaaatactactactcttggaagaagacccgcagccgaactagtgtgatggacagacaggcccggcggctggggggccgcaaggacaaagaagacagtgatgagctcgaagagggtcgaggaggcgtgagtgagggagagcccgatcctgcagatcccaagagagagcctctaccctctcggcccctgaatgcacgcccaggccctgggaaaaaggaggtccaggtgtctcagtaccgccaccatcccttgcgaacccggcgtcgcccacccaagggcatgtacctgagccctgagggcctcacggcagtgtcaggaagcccggaccttgccaacctcacgctccgaggtcttgactctcagctcatctccctcaagcgccaggtacagagcatgaagcagacgaacagcagcctgcgccaagccctggagggcggtattgatccactacgccccccggaggccaacaccaagttcaactcccgctggaccacagatgagcagcttttggctgttcaaggtccagattacatcggtctccacgtccgtgccccgatcagtgccccctgcgccaccaccccctccacctcccacctcgctgtcccagccacccccgctgctgaggccacctttgcccacggctcccactctgctccgacagccacccccactgcagcagggccgcttcctccagccccggctggcccccaaccagcccccaccgcctctcatccgccccgctctggctgccccccgccacagcgcccgccctggccctcagcccccacccaccctgattggaacccctctggagcccccagcaccctcactctgagccctgacgtcctccaccaaccacgggctccaggacccctttgctggccatccccaggcatctctggtgtcactgaggacagaagggactagggctctggcggggtctttgtaagaccagagtttcggacagcccagccccgccctttgggttctgcatgtgttcctggcagctgggcctgtctcctggggccatggccgggctcaggggcctttgagctggcctgagggcactttcgcttcctggccggtactggaatggctgtgtcctagtctgctggggcttggcctctgggtcctgccctttgtgtgtccggggtagtgaccttagcgtggagtggggagagggcagttgggtgtgctggctgttctcattcctctttcccttcttttagcaataagtctggggtgaggtggggagggaggctgcagggggggaggtgggcagaggggccttacagcagcagaggctggaagagaagctctgtcttcaggggccagctgggaaatgctaaggagctgagggtgcccaccaagcccaccttccagaaacttggagaaatgggggttgggaacttatgcagacatggatttatttttcaacattttttaaaaattaaaaaaaataaaatctaaaaaaaaaaaaaaaaaaaaaaaaaaaaaaaaaaaaagagggggggggggcaaaaaatatccccggagggggccccaatttacgcggttacccagtttttttgttaaaaaggggcccccataaaggggggggaataaaaaaaagccaggcacgggggccccgtggtttaaccaacggttctgccggtggaacaacccgtgttagctggggagctgcttctgagagggaccctctattcctcggcgcgggcggcccctatcttgcggcaacaaccctcttataagaaaatttagaagacctaagggcaaattattcacacttctgacgctggcttcccctggtgtctacccacacgctgataatggctgcgcgctagaaaacatcgggctaaccagagcacgacttttttgaaccactttatcag

SEQ ID NO: 459649 - DNA, 1608 bp, Homo sapiens
  misc_feature (1)..(6): n is a, c, g, or t
  misc_feature (10)..(10): n is a, c, g, or t
nnnnnnctgncagcagcttcattgtgtgcgcgaggagcgagcggcggcggagagcgggcgagcaagcggcatcccgagcgcggcggggagagcgagcgcgccggggagggtgcgaggcggcacccgcggctgcgctccgcccgcctcccggcaactctgcccagcgccgcgcgccgtgcgcgccgtcccgccgccgtcgccgccgccgccgccgccggtgccccggccggctgccgtcgcgggcaggggtctgcttaggacacgggtccccgcccggggactggggcatccccggcgcagctgagaggcgcagagcccggggggcgcagattgcgctccagcgcccagccgctgaacggcgtgggcaggtgggcggtggggttccagggcgccccgaggacagggggccccgacttcaggggaaccccaaccctgaggggcgtacatagtaatcacgccccagccgcaccggaccttgcgctcatcccttgcgtcccccacttctgcacaaacttttctgacgccctggctcgtgggggtcgtggagagcgctggggctaccaggtgggctcccaccccgccggaccctagccacgctgacctcctgcctctcctaacctcagtggcgacctctccaggccgggccgggctcggcactcggagcgagtgcggcaaccactgtcgctctccgaaggctcctgcgccccccggggcagctgggcggggtaatgccctcagtgatggagaagccgagcgcgggctctgggatcctgtcccgtagccgggccaagacggtgcccaacggcggacagccccactcggaggatgacagcagcgaggaggagcactcgcacgacagcatgatccgcgttggaaccaattaccaggccgtaattccggagtgcaagcctgagagccccgcacgctacagcaacaaggagctgaaggggatgctggtgtggtcacccaaccactgtgtgtcagatgccaagcttgacaagtacattgcgatggccaaggagaagcatggctacaacattgagcaggcgctgggcatgcttctgtggcataagcacgatgtggagaagtcgctggccgacctggccaacttcaccccattccctgacgagtggacagtagaggacaaggtgctgtttgaacaggcctttggcttccatggcaaatgcttccagcggatccagcagatgctgcctgacaagttgattcccagcctggtgaaatactactactcttggaagaagacccgcagccgaactagtgtgatggacagacaggcccggcggctggggggccgcaaggacaaagaagacagtgatgagctcgaagagggtcgaggaggcgtgagtgagggagagcccgatcctgcagatcccaagagagagcctctaccctctcggcccctgaatgcacgcccagcaagcccaccttccagaaacttggagaaatgggggttgggaacttatgcagacatggatttatttttcaacattttttaaaaattaaaaaaaataaaatctaagcttactgagttttctttcccttttggtgcaagggccctgggctttgcttcctgtctgtgccctgtgg

SEQ ID NO: 459650 - DNA, 86 bp, Homo sapiens
gaagagcctggcttctcactctttcctctcccctcaggtccagattacatcggtctccacgtccgtgccccgatcagtgccccctg

SEQ ID NO: 459651 - DNA, 178 bp, Homo sapiens
tggtccctttctggacaggcctgggttaggagctataacccccttcaccaagaccctgcccctgctgcccctgcagttgacaagtacattgcgatggccaaggagaagcatggctacaacattgagcaggtgagccttggcccccagggacttgggaatggggtggaacggtgccggg

SEQ ID NO: 459652 - DNA, 1309 bp, Homo sapiens
aagttaaagggaggaaaataggatcaaaagagctgggtacaccatgagggggagaagaaaagcctcctgtttttgtagagactgggaacttagcaagggggcagagttcaataagcctgtgggagaaccctcgacttgtacccacatcctaaacattactggagttcctagaggagtacctgatgaatttaagacccgaaaccaaatagctgttgggtttgaatcagcactcttctggtggtcaactactaataaaaacgtggattggattaattacatctattataatcaacaaagattcatcagctatactcgatacactctcaagggagtggctaaccagttagatgccaccagccaaatggcctgggagaacagacttgcactgcataagatcttagcagagaaagggggcgtatgcatcatgctggatggaaagtgttgcactttaattcctaacaatactgccccagatggaaccatcacaaatgcattacaagggttaattgttctagtcaatgaattggtggaaaatgttggaattgatgacccatttactgattggctagaaaacaaatgcatcctcatcctcatcctcatcattatcatcggcaccaaaactggtattgactgggcactcactacatgcagagagtatgccatgtcctcagcgtggagtcctgataagatagtagtaatgtcctctgatgatatctgattaaactacttgacatggtcagtatccatctattttgacttatgaagatggcaatttcacattggtcagcctaaactttggtgtaagttttgtttcttggagttaataactgattttttttttgtatgtgtttctctgaggctgaaagattttatatcttttaaagaccttttcttagttcctgggagcctgttctaatatgacagttggaagcctggaaaaagtttccaggcagactgtggaggaaggcctagagaactgagcgtgccagttggatctgctctccccagcctgattctcggcaggatctggaggagactcgtgtaccaagacaccaaggagtcgctcatttagaagcacttgacttgggtgggcatccctatgagctggaggggcccaggctgcagaggctctcatgggagttctgtggctggaagtgggttgttggagcaactcgaacccgaagttgagttcattcattatcccaggaaagggccatcagttaaaagggaactcatactttcaagaccagcctgctttcaaggtgtcaactgatcgtgtagacaatgtctcaaaaaacaaaaaaaaaat

SEQ ID NO: 459653 - DNA, 1161 bp, Homo sapiens
aagttaaagggaggaaaataggatcaaaagagctgggtacaccatgagggggagaagaaaagcctcctgtttttgtagagactgggaacttagcaagggggcagagttcaataagcctgtgggagaaccctcgacttgtacccacatcctaaacattactggagttcctagaggagtacctgatgaatttaagacccgaaaccaaatagctgttgggtttgaatcagcactcttctggtggtcaactactaataaaaacgtggattggattaattacatctattataatcaacaaagattcatcagctatactcgatacactctcaagggagtggctaaccagttagatgccaccagccaaatggcctgggagaacagacttgcactgcataagatcttagcagagaaagggggcgtatgcatcatgctggatggaaagtgttgcactttaattcctaacaatactgccccagatggaaccatcacaaatgcattacaagggttaattgttctagtcaatgaattggtggaaaatgttggaattgatgacccatttactgattggctagaaaacaaatgcatcctcatcctcatcctcatcattatcatcggcaccaaaactggtattgactgggcactcactacatgcagagagtatgccatgtcctcagcgtggagtcctgataagatagtagtaatgtcctctgatgatatctgattaaactacttgacatggtcagtatccatctattttgacttatgaagatggcaatttcacattggtcagcctaaactttggtgtaagttttgtttcttggagttaataactgattttttttttgtatgtgtttctctgaggctgaaagattttatatcttttaaagaccttttcttagttcctgggagcctgttctaatatgacagttggaagcctggaaaaagtttccaggcagactgtggaggaaggcctagagaactgagcgtgccagttggatctgctctccccagcctgattctcggcaggatctggaggagactcgtgtaccaagacaccaaggagtgagtttttgggagcgccagcactgcagagaagctcagagcgggtggggggaggctgttccctagagaggagatgctgttacagaactggagcctctaaca

SEQ ID NO: 459654 - DNA, 774 bp, Homo sapiens
ttccagaggggcagctccagtacaggcagcggcaccacccggggcttccagcgggtccatgtggagaacccgtgagcagctacaagccgaagtgcagagggcacaggcgcggatagaggacctggagaaggccctggcggagcaggggcaggatatgaagtggattgaagagaagcaggcactgtaccggagaaatcaagagcttgtggaaaaggtgatgtggcatgaggcaggggcggggctggctacgggtccaggggcaggaaggccagcagggctgtcattaccacgcacagctcagagccccgctaaggcccccgtgctcctggcttgtgatgtacagcccctgctggagacgtttatccttgacggcctcccttccacatccctgtccaggggccacccaagctcagggccccgatatgatcgccaggctcctggcttgtggacaaacccaaacataccgagggctgtgaggcgcttccagggctgggtaccaggccagccggcctccccggcagccagcagctgtcccatcaaacaaatggagacggaagaggctcggctcagacatgaggtgcaggacgccagagaccaaaacgagctgctggagttcaggatcctggagcttgaggagagggagaggaagtcacccgccatcagcttccaccacacgcccttcgtggacgggaagagccccctccaggtgtactgcgaggcctaaggtgtgacggtgagttccgccccttctgcccactgctgttcggcgtgtgg

SEQ ID NO: 459655 - DNA, 462 bp, Homo sapiens
ttccagaggggcagctccagtacaggcagcggcaccacccggggcttccagcgggtccatgtggagaacccgtgagcagctacaagccgaagtgcagagggcacaggcgcggatagaggacctggagaaggccctggcggagcaggggcaggatatgaagtggattgaagagaagcaggcactgtaccggagaaatcaagagcttgtggaaaagatcaaacaaatggagacggaagaggctcagctctggcctgctccccagctcgtctccagcggctctggcgtgctccccagctcgtctccagcggctctggcctgctggtttctcatgaatgcaccagcggattccacctcaggactccgcacgtttccctccacagggacttccccagatgtgcccgtggctccttcttggcatctggtcttagttcccgtcttgcactctccgagtggaccgactgg

SEQ ID NO: 459656 - DNA, 662 bp, Homo sapiens
tccaaggtcaatgtgccagcagattccatgagggcccaccctctgcatcacatgtggccccttcttgcatcatcttcgcttgttggaaggggtgaacaagctcccttgggcctcctttatgagggcactaatcccaatcatgacagtggggccctcatgacctcgtcagctcccaaaggccccacctcttactatccccaaggccctgagaggaggccaggaggacaagggatattgggggtgattcctgtgaaagataaaaggtggaggaagcagaactgggaagaaaagccttcagcccctgacatgaatctgacggcagctatcacagcgagacttgacctttgtacatcaaaggaggcttctttacaccccgcacagcttggaaggagtcagtgagcagaactaggcccagccgctgcctttggtttgtcttcctctgaaggaaaaatacgccagcaaagacaacgttctataaccccgtttgagtgtctcattacaattacataatgataattgccagctttgtgttccatttggcaacttgttgaagtaattgaacaaagtataactaacgaacacttataatgaagttcataattaggtccttgaaacacttgatataaaaaaaattttcagattctttttttaaaaaagctgta

SEQ ID NO: 459657 - DNA, 776 bp, Homo sapiens
cgaggcctctgattggaggccccatgggatccacctccaggccgaacactcagacaaaatcactctggcaacttgtgaatgccttctgctcatgtaggatggctgttttgccccctgtgctttctttactgagctgtttaataaacagcagggtagctgggaatttcttggaaggagcctggcagggagagggcaccgtggtgccgactttccaggctgactcgccgttgcatttgcaaacctggggctccccagccatccccacagagctgctgaataggttgctaagggcttggcaatgttctgcacagccactgctgatactaaagaggccgcaacaggctggatcccagaagaaaggaactgctaacaggttgagtcaccatgaatgcgggactccttcctttaataatctcagacaattctttctgggcttaaacgccccacagtcctgtgacaatgtcccagagattcaaaggagcagtatgacaaaatcatgtagaaggatttgttgtgatatcatccagttaaaccccaggaaacagtgatgcaacagctcttgggaaagatcctgcggtgttatcagttctttctttcaaattctcttcaagcttgtacatctagagtatctcctgctaaatggcaaataagcattgtttcataatgcttataaggcattcacaaaataaaatacggacattttttgactctttttcttgtccatataatgtggattagtctccatgacaacaccaactgtcgcatcacattatcac

SEQ ID NO: 459658 - DNA, 1524 bp, Homo sapiens
tatttaaaaaaaattagagagttgtggaaacaaggagaagataaaatttccagagtggaaacagccctccctagaactctaggctctgcagtgtgagaattcttggtccccaagggggacacgctcacctggaaacccagcaaggggcacattgaatacaccttatgactgctccctgggcactttgggatcctcgtgtccaggaaccagcagccacaacctgaaaaggatatggttaccaagggctcagaatccgcacccccctcccaccgggatgaggattagggtcatgccatcagctcctcttgccctgcatgcttcagggacgatggaggtctcggggcacccccaggccaggagatgctgcccagaggccctgggaaagctcttccctggcctctgcttcctctgctttctggtgacctacgccctggtgggtgctgtggtcttctctgccattgaggacggccaggtcctggtggcagcagatgatggagagtttgagaagttcttggaggagctctgcagaatcttgaactgcagtgaaacagtggtggaagacagaaaacaggatctccaggggcatctgcagaaggtgaagcctcagtggtttaacaggaccacacactggtccttcctgagctcgctctttttctgctgcacggtgttcagcaccgtgggctatggctacatctaccccgtcaccaggcttggcaagtacttgtgcatgctctatgctctctttggtatccccctgatgttcctcgttctcacggacacaggcgacatcctggcaaccatcttatctacatcttataatcggttccgaaaattccctttctttacccgccccctcctctccaagtggtgccccaaatctctcttcaagaaaaaaccggaccccaagcccgcagatgaagctgtccctcagatcatcatcagtgctgaagagcttccaggccccaaacttggcacatgtccttcacgcccaagctgcagcatggagctgtttgagagatctcatgcgctagagaaacagaacacactgcaactgcccccacaagccatggagaggagtaactcgtgtcccgaactggtgttgggaagactctcatactccatcatcagcaacctggatgaagttggacagcaggtggagaggttggacatccccctccccatcattgcccttattgtttttgcctacatttcctgtgcagctgccatcctccccttctgggagacacagttggatttcgagaatgccttctatttctgctttgtcacactcaccaccattgggtttggggatactgttttagaacaccctaacttcttcctgttcttctccatttatatcatcgttggaatggagattgtgttcattgctttcaacaaccttatggatgtccctgcttttcttgaaatatgagaaacaaaacacctttattcttggaagttgtacttttagttaaattaaaatcttcctgagctgttctttgttacctgaaaaagaactagtgc

SEQ ID NO: 459659 - DNA, 1207 bp, Homo sapiens
ggccaaagcatgagaaaactcatcgcgggactcattttccttaaaatttgggcttgtacagtaagaacttcaactgaccttcctcagactgagggctgttcccagtgtatacatcaagtcactgaggaaatagcagctggtgcagtggaatgccatgcatttgtggtgccggagcagcaaagtctccaggcccctgctgcagatcctctgatttctgctgtccaggctctgcattctctttccctgaagggcattagcttcagtatagaagagggagaattgctgtgttcctgtgaccctggggaaaaaggaattcctagattcaccttcaggacaaagattgacccggtagaaaataaaactgaggaaagaagaagatacgcacaacagaggggaagacattggctgagcctcacaaacattgcagatatccctatgtgactcagaatcaacacaagatcctgcctttaaacactgatgccgaaaatcaagaacatcctttaaactgaaaccatcagaacaaacatgtttaaacaacacaaatgttattattaatgtaaagcatttctaaaatgcttttttaaatgtgaaaaagcaacgaaagttttagttctgacaccaccagacaaatagctaggaaacagacacttctgtcttcacaacagtaaaaataaaacaaactgaaaatcagtaagttttgcgggcctatcagaaaactaagattgcaggaagagctgtcacacccaaatatgaagaaatagaagacttcagagagacaaaaccaagttctgcttatcagaagtagaagacactggagacatataaactcataagaacacttagaacacttacatggcaatgttaacaaattgctgtaatctgagtatggactatcttgagagtgataatcccttaagagcttcagtattagaggggcctgccacattcacggcctttatctacagttatctcaccagatactcacagtgaagatgcccttgtagctctggctggggcggaggaagagcaatccttgtgaattacctccagagtatgctctgtaaaacaggtttatttttccaggagaaaagacactaacagcgtcttctaatgtccatgaggtgatgaatgatgacccttatttcatttctcttttattcttggttagcctggttagatgtttataaaatttcttaaatttttcaaa

SEQ ID NO: 459660 - DNA, 1270 bp, Homo sapiens
ggccaaagcatgagaaaactcatcgcgggactcattttccttaaaatttgggcttgtacagtaagaacttcaactgaccttcctcagactgagggctgttcccagtgtatacatcaagtcactgaggaaatagcagctggtgcagtggaatgccatgcatttgtggtgccggagcagcaaagtctccaggcccctgctgcagatcctctgatttctgctgtccaggctctgcattctctttccctgaagggcattagcttcagtatagaagagggagaattgctgtgttcctgtgaccctggggaaaaaggaattcctagattcaccttcaggacaaagattgacccggtagaaaataaaactgaggaaagaagaagatacgcacaacagaggggaagacattggctgagcctcacaaacattgcagatatccctatgtgactcagaatcaacacaagatcctgcctttaaacactgatgccgaaaatcaagaacatcctttaaactgaaaccatcagaacaaacatgtttaaacaacacaaatgttattattaatgtaaagcatttctaaaatgcttttttaaatgtgaaaaagcaacgaaagttttagttctgacaccaccagacaaatagctaggaaacagacacttctgtcttcacaacagtaaaaataaaacaaactgaaaatcagtaagttttgcgggcctatcagaaaactaagattgcaggaagagctgtcacacccaaatatgaagaaatagaagacttcagagagacaaaaccaagttctgcttatcagaagtagaagacactggagacatataaactcataagaacacttagaacacttacatggcaatgttaacaaattgctgtaatctgagtatggactatcttgagagtgataatcccttaagagcttcagtattagaggggcctgccacattcacggcctttatctacagttatctcaccagatactcacagtgaagatgcccttgtagctctggctggggcggaggaagagcaatccttgtgaattacctccagagtatgctctgtaaaacaggtttatttttccaggagaaaagacactaacagcgtcttctaatgtccatgaggtaaaagaactgatggctggagagcattgaaacagacagatgaaaattaaagaagaaataaaaataaaattaaaaagggaaaaacaagtttagaaaaaagaatttttttcttattttcctttttcctttgataagagccaacttatgag

SEQ ID NO: 459661 - DNA, 2808 bp, Homo sapiens
gaccacagggcccctttgcagtgtgcctcatcggtctgtttcttggccaggctgactgagagatttgtgctgggagtggatatgttcgtggagacactgtggaaagtctggaccgagctcttggatgttcttggacttgacgtctccaacctgtcccagtatttcagcccagcctcggtgtccagcagcccggcccgcgcgctcctgctggtcggcgtcgtcctcctggcctactggttcttgtccctgaccctgggcttcactttcagcgtcctgcacgtggtgttcggccgcttcttctggatcgtgcgggtcgtcctgttttccatgtcctgcgtgtacatcctgcacaagtacgagggcgagccggagaacgcggtgctgccgctgtgcttcgtggtggccgtctacttcatgaccgggcccatgggcttctactggcgaagcagtcccagcggccccagcaaccccagcaaccccagcgtggaggagaagctggagcacctggagaagcaggtcagactgctcaacatccgtctcaaccgggtgctcgagagcctggaccgctccaaggacaagtgaaggtcagccggccgggcgggtccacagttaccagcacgctgtctcagaaaacgaaaacggaggaaaaaaaccccaaaccccaaacaatcttaataaacacgactgagcaagaaagtggcgctgtgtagggctatttccacccacccggcagctcttaggacacattcccagaagagcggaaagatcattgacgtggaactacacacgaagtgtaattagtgggggaaaaaatattttttaaacaaaggatataaccatatttagttgtacagtaagagaaatttatctgtgcatagagcataaagttaattttttcaagcatttaaatacatcttttgtaaggttttttaataaaggcagattgagtcaagtttattaaaactttacatggaggggaagaatatgctaatttgacatttgagaaaagtttaaatgcgagcgtttgttttcacagcttagggattggtgggtgaggtctgtgtgcgttattttcatgttcccaaactgtgagctttatttcatgttatttttggtggatgttgacttagttcatgaatgttgtcacttctaaatgtggacagttgggctgcaggatgcaactcaacctcttttggatcctagagacccctgccaagcccccatcagtcctatttttaaatgaagacatcgccatttctagaagacctgagattttcttccctctgtgcttcgatgtattttaacctcaacattttgaaacggaaaatgcaaggaggggccaagaaatgtcctggggatttgatgccaggaagtacctggtaaggattggagattgctccagaatctactgcatgtcccaatttgcagtttgctcactagggctatatacaaaagctatacccttgagggttttttttttttcttttgatttcctcaggaccttagagggaaaacaaacagtagcagctaatattctcaagtatattgctgcttagaaagatcctcaggaacaattagcagcaataagcaagcctttgaaaagatctgaattctttttcctgaaatatttacgatacacaggtgctttttatctgaaatctgttgtgtcctccttttaggcagtctctgtgggcagagagtgggacttgcgaggtggacagctgtggggatcctgggcaagggagtttcagaaggtgtggctcaggggctggtagaaacccccttttgttaggacttgttttttaaaaaagaaagccctaggccaggcgcagtggctgatgcctgtaatcccagcgctttgggaggccgaggagtatggatcacctgaggtcaggagttcaagaccagcctggccaacatggtgaaacccccgtctctactaaaaatacaaaaattagtcaggcatggtggtgggtgcctgtagtccagctactcaggaggctgaggcaggagaattgcttgaacctgggaggtggaggttgcggtgagccgagatcacgccactgcactccagcctaggcaacagagcaagacttcatcttaaaaaaaaaaaaaaaagcccagcattttgcagctttgaagctgctggggatcacgactgtctctgtggcccttacctggccacagatgtaccctggcaacccgctcacagtgccctgcgtgcaggtttatagataacccctgccagacctgctacaaccaagaccttatggtccaggtctcagtttggagaagatttagctgtctaccacttcttgtgtagtgttcctgtgaagttttatttttggttgcaagtatctggaaaacagatgcagatgtttttgtggatgttgttgagacttttgagacttctgtttctaaggtacacatgatgggacccaaactctcctggagagttccattcacttcctgaaacgtgcacctgtttcaggtgcatgtttattcagtgtgcatggatatttaagatttgctggagcaggctgggcggggtggctcacccctgtggtcccgacactttgggaggccaaggcgggtggatcacctgaggtcagggagtttgagaccagcccggccaacagagtgaaaccccgtctctactaaaaatacaaaaattggacgacgcccaccatcatgccccggctggtgcgtcggtataacacagtagagacggggtttcaccatgttagccgggatggtctcgatctcctgacctcgtgatccgcctgcctcggcctcccaaagtgctgg

SEQ ID NO: 459662 - DNA, 3110 bp, Homo sapiens
cggcggctgtgggtaaggcgcggcgcgcggccccgagcgcgccaaccttgccctagccggagcccgctgcggcccagcgcacggccctcaccccgcatcgcgaccccgcgccccgccggccgagcatggtgcgcgctgcgcctcaggcgggcccctggcccgggccgggctcctgctgctgctgctgctgctgctgctgctcggtgctgctggccccgggcgcgcagggggcgcggggccgcggcggcgcggagaagaacagctaccgccgcacggtcaacaccttctcccagagcgtcagcagcctgttcggcgaggacaacgtgcgcgccgctcagaagttcttggccaggctgactgagagatttgtgctgggagtggatatgttcgtggagacactgtggaaagtctggaccgagctcttggatgttcttggacttgacgtctccaacctgtcccagtatttcagcccagcctcggtgtccagcagcccggcccgcgcgctcctgctggtcggcgtcgtcctcctggcctactggttcttgtccctgaccctgggcttcactttcagcgtcctgcacgtggtgttcggccgcttcttctggatcgtgcgggtcgtcctgttttccatgtcctgcgtgtacatcctgcacaagtacgagggcgagccggagaacgcggtgctgccgctgtgcttcgtggtggccgtctacttcatgaccgggcccatgggcttctactggcgaagcagtcccagcggccccagcaaccccagcaaccccagcgtggaggagaagctggagcacctggagaagcaggtcagactgctcaacatccgtctcaaccgggtgctcgagagcctggaccgctccaaggacaagtgaaggtcagccggccgggcgggtccacagttaccagcacgctgtctcagaaaacgaaaacggaggaaaaaaaccccaaaccccaaacaatcttaataaacacgactgagcaagaaagtggcgctgtgtagggctatttccacccacccggcagctcttaggacacattcccagaagagcggaaagatcattgacgtggaactacacacgaagtgtaattagtgggggaaaaaatattttttaaacaaaggatataaccatatttagttgtacagtaagagaaatttatctgtgcatagagcataaagttaattttttcaagcatttaaatacatcttttgtaaggttttttaataaaggcagattgagtcaagtttattaaaactttacatggaggggaagaatatgctaatttgacatttgagaaaagtttaaatgcgagcgtttgttttcacagcttagggattggtgggtgaggtctgtgtgcgttattttcatgttcccaaactgtgagctttatttcatgttatttttggtggatgttgacttagttcatgaatgttgtcacttctaaatgtggacagttgggctgcaggatgcaactcaacctcttttggatcctagagacccctgccaagcccccatcagtcctatttttaaatgaagacatcgccatttctagaagacctgagattttcttccctctgtgcttcgatgtattttaacctcaacattttgaaacggaaaatgcaaggaggggccaagaaatgtcctggggatttgatgccaggaagtacctggtaaggattggagattgctccagaatctactgcatgtcccaatttgcagtttgctcactagggctatatacaaaagctatacccttgagggttttttttttttcttttgatttcctcaggaccttagagggaaaacaaacagtagcagctaatattctcaagtatattgctgcttagaaagatcctcaggaacaattagcagcaataagcaagcctttgaaaagatctgaattctttttcctgaaatatttacgatacacaggtgctttttatctgaaatctgttgtgtcctccttttaggcagtctctgtgggcagagagtgggacttgcgaggtggacagctgtggggatcctgggcaagggagtttcagaaggtgtggctcaggggctggtagaaacccccttttgttaggacttgttttttaaaaaagaaagccctaggccaggcgcagtggctgatgcctgtaatcccagcgctttgggaggccgaggagtatggatcacctgaggtcaggagttcaagaccagcctggccaacatggtgaaacccccgtctctactaaaaatacaaaaattagtcaggcatggtggtgggtgcctgtagtccagctactcaggaggctgaggcaggagaattgcttgaacctgggaggtggaggttgcggtgagccgagatcacgccactgcactccagcctaggcaacagagcaagacttcatcttaaaaaaaaaaaaaaaagcccagcattttgcagctttgaagctgctggggatcacgactgtctctgtggcccttacctggccacagatgtaccctggcaacccgctcacagtgccctgcgtgcaggtttatagataacccctgccagacctgctacaaccaagaccttatggtccaggtctcagtttggagaagatttagctgtctaccacttcttgtgtagtgttcctgtgaagttttatttttggttgcaagtatctggaaaacagatgcagatgtttttgtggatgttgttgagacttttgagacttctgtttctaaggtacacatgatgggacccaaactctcctggagagttccattcacttcctgaaacgtgcacctgtttcaggtgcatgtttattcagtgtgcatggatatttaagatttgctggagcaggctgggcggggtggctcacccctgtggtcccgacactttgggaggccaaggcgggtggatcacctgaggtcagggagtttgagaccagcccggccaacagagtgaaaccccgtctctactaaaaatacaaaaattggacgacgcccaccatcatgccccggctggtgcgtcggtataacacagtagagacggggtttcaccatgttagccgggatggtctcgatctcctgacctcgtgatccgcctgcctcggcctcccaaagtgctgg

SEQ ID NO: 459663 - DNA, 1253 bp, Homo sapiens
cggcggctgtgggtaaggcgcggcgcgcggccccgagcgcgccaaccttgccctagccggagcccgctgcggcccagcgcacggccctcaccccgcatcgcgaccccgcgccccgccggccgagcatggtgcgcgctgcgcctcaggcgggcccctggcccgggccgggctcctgctgctgctgctgctgctgctgctgctcggtgctgctggccccgggcgcgcagggggcgcggggccgcggcggcgcggagaagaacagctaccgccgcacggtcaacaccttctcccagagcgtcagcagcctgttcggcgaggacaacgtgcgcgccgctcagaagttcttggccaggctgactgagagatttgtgctgggagtggatatgttcgtggagacactgtggaaagtctggaccgagctcttggatgttcttggacttgacgtctccaacctgtcccagtatttcagcccagcctcggtgtccagcagcccggcccgcgcgctcctgctggtcggcgtcgtcctcctggcctactggttcttgtccctgaccctgggcttcactttcagcgtcctgcacgtggtgttcggccgcttcttctggatcgtgcgggtcgtcctgttttccatgtcctgcgtgtacatcctgcacaagtacgagggcgagccggagaacgcggtgctgccgctgtgcttcgtggtggccgtctacttcatgaccgggcccatgggcttctactggcgaagcagtcccagcggccccagcaaccccagcaaccccagcgtggaggagaagctggagcacctggagaagcaggtcagactgctcaacatccgtctcaaccgggtgctcgagagcctggaccgctccaaggacaagtgaaggtcagccggccgggcgggtccacagttaccagcacgctgtctcagaaaacgaaaacggaggaaaaaaaccccaaaccccaaacaatcttaataaacacgactgagcaagaaagtggcgctgtgtagggctatttccacccacccggcagctcttaggacacattcccagaagagcggaaagatcattgacgtggaactacacacgaagtgtaattagtgggggaaaaaatattttttaaacaaaggatataaccatatttagttgtacagtaagagaaatttatctgtgcatagagcataaagttaattttttcaagcatttaaatacatcttttgtaaggttttttaataaaggcagattgagtca

SEQ ID NO: 459664 - DNA, 2983 bp, Homo sapiens
cggcggctgtgggtaaggcgcggcgcgcggccccgagcgcgccaaccttgccctagccggagcccgctgcggcccagcgcacggccctcaccccgcatcgcgaccccgcgccccgccggccgagcatggtgcgcgctgcgcctcaggcgggcccctggcccgggccgggctcctgctgctgctgctgctgctgctgctgctcggtgctgctggccccgggcgcgcagggggcgcggggccgcggcggcgcggagaagaacagctaccgccgcacggtcaacaccttctcccagagcgtcagcagcctgttcggcgaggacaacgtgcgcgccgctcagaagttcttggccaggctgactgagagatttgtgctgggagtggatatgttcgtggagacactgtggaaagtctggaccgagctcttggatgttcttggacttgacgcgtcctgcacgtggtgttcggccgcttcttctggatcgtgcgggtcgtcctgttttccatgtcctgcgtgtacatcctgcacaagtacgagggcgagccggagaacgcggtgctgccgctgtgcttcgtggtggccgtctacttcatgaccgggcccatgggcttctactggcgaagcagtcccagcggccccagcaaccccagcaaccccagcgtggaggagaagctggagcacctggagaagcaggtcagactgctcaacatccgtctcaaccgggtgctcgagagcctggaccgctccaaggacaagtgaaggtcagccggccgggcgggtccacagttaccagcacgctgtctcagaaaacgaaaacggaggaaaaaaaccccaaaccccaaacaatcttaataaacacgactgagcaagaaagtggcgctgtgtagggctatttccacccacccggcagctcttaggacacattcccagaagagcggaaagatcattgacgtggaactacacacgaagtgtaattagtgggggaaaaaatattttttaaacaaaggatataaccatatttagttgtacagtaagagaaatttatctgtgcatagagcataaagttaattttttcaagcatttaaatacatcttttgtaaggttttttaataaaggcagattgagtcaagtttattaaaactttacatggaggggaagaatatgctaatttgacatttgagaaaagtttaaatgcgagcgtttgttttcacagcttagggattggtgggtgaggtctgtgtgcgttattttcatgttcccaaactgtgagctttatttcatgttatttttggtggatgttgacttagttcatgaatgttgtcacttctaaatgtggacagttgggctgcaggatgcaactcaacctcttttggatcctagagacccctgccaagcccccatcagtcctatttttaaatgaagacatcgccatttctagaagacctgagattttcttccctctgtgcttcgatgtattttaacctcaacattttgaaacggaaaatgcaaggaggggccaagaaatgtcctggggatttgatgccaggaagtacctggtaaggattggagattgctccagaatctactgcatgtcccaatttgcagtttgctcactagggctatatacaaaagctatacccttgagggttttttttttttcttttgatttcctcaggaccttagagggaaaacaaacagtagcagctaatattctcaagtatattgctgcttagaaagatcctcaggaacaattagcagcaataagcaagcctttgaaaagatctgaattctttttcctgaaatatttacgatacacaggtgctttttatctgaaatctgttgtgtcctccttttaggcagtctctgtgggcagagagtgggacttgcgaggtggacagctgtggggatcctgggcaagggagtttcagaaggtgtggctcaggggctggtagaaacccccttttgttaggacttgttttttaaaaaagaaagccctaggccaggcgcagtggctgatgcctgtaatcccagcgctttgggaggccgaggagtatggatcacctgaggtcaggagttcaagaccagcctggccaacatggtgaaacccccgtctctactaaaaatacaaaaattagtcaggcatggtggtgggtgcctgtagtccagctactcaggaggctgaggcaggagaattgcttgaacctgggaggtggaggttgcggtgagccgagatcacgccactgcactccagcctaggcaacagagcaagacttcatcttaaaaaaaaaaaaaaaagcccagcattttgcagctttgaagctgctggggatcacgactgtctctgtggcccttacctggccacagatgtaccctggcaacccgctcacagtgccctgcgtgcaggtttatagataacccctgccagacctgctacaaccaagaccttatggtccaggtctcagtttggagaagatttagctgtctaccacttcttgtgtagtgttcctgtgaagttttatttttggttgcaagtatctggaaaacagatgcagatgtttttgtggatgttgttgagacttttgagacttctgtttctaaggtacacatgatgggacccaaactctcctggagagttccattcacttcctgaaacgtgcacctgtttcaggtgcatgtttattcagtgtgcatggatatttaagatttgctggagcaggctgggcggggtggctcacccctgtggtcccgacactttgggaggccaaggcgggtggatcacctgaggtcagggagtttgagaccagcccggccaacagagtgaaaccccgtctctactaaaaatacaaaaattggacgacgcccaccatcatgccccggctggtgcgtcggtataacacagtagagacggggtttcaccatgttagccgggatggtctcgatctcctgacctcgtgatccgcctgcctcggcctcccaaagtgctgg

SEQ ID NO: 459665 - DNA, 1130 bp, Homo sapiens
tgtttctctgcaagggagttagagaaagtcggaagcccccagatgagctgctcgtcttgataccacagaaagcagggctccacccccacgggcccaggtgaggacaggcactcctgctttcgccggctgttgcattttccaagaccactgtggcccaccatgcccccgtcctgggcctataaaaaccggagtccctagcacaacagagacacaagccgctggacttagagaggagcacattggcggaagaaggcgcaagcggctgattgtggagagggcctccagaggagagcgcgggcagaagagcaggacaggcacccgctggccgggaggtcattgactggcagaacgacgcggaatttggctggagcagtcggaggagagcccaggacgcccagcagcccgactccagaacaaaaccatctcccttctggctcccccatctgcatccttgctgagccttacttctactcaacaaagccttacacattctcgcagcccacgtatcccctgtcggcatttctgtcttcttttctgagctcaggaagctgacctctgcagattgcatcaagtgggtctgagacccctttcctttggctttcttgcggtttcagccaatgacaaccactgtagcagagcagagggggactcattctgctgaaagccacagctcctatccggtggtcttagagcttgatccatcagatctcatgagacttaagatctatggttttataaaggttaaattcctggtgaccagcaattccaatcaatctgaccagagaaaccagccctttcagtgtgaagaatactctcatcctttcctactggcaggctgtgaatactggcttccaccccaggcacccaccacccacccacaggctctttcacagcaatgcactaagctctctctgcctgggcattccagcagctgggatgttctactggttggtgcttctcacatcttctgtacaaagagagctgatgttcctgagattacttcaatgcccttcaagatccagtgaatccccaatgcctatcacagattccattttcaatgtaattttcagtttaaaactgtttgcaaatttagagttggaaacctcaacttcaagatcagagagtgcctt

SEQ ID NO: 459666 - DNA, 972 bp, Homo sapiens
tgtttctctgcaagggagttagagaaagtcggaagcccccagatgagctgctcgtcttgataccacagaaagcagggctccacccccacgggcccaggtgaggacaggcactcctgctttcgccggctgttgcattttccaagaccactgtggcccaccatgcccccgtcctgggcctataaaaaccggagtccctagcacaacagagacacaagccgctggacttagagaggagcacattggcggaagaaggcgcaagcggctgattgtggagagggcctccagaggagagcgcgggcagaagagcaggacaggcacccgctggccgggaggtcattgactggcagaacgacgcggaatttggctggagcagtcggaggagagcccaggacgcccagcagcccgactccagaacaaaaccatctcccttctggctcccccatctgcatccttgctgagccttacttctactcaacaaagccttacacattctcgcagcccacgtgtgatccgattcttctggtacaccaagatcccctgtcggcatttctgtcttcttttctgagctcaggaagctgacctctgcagattgcatcaagtgggtctgagacccctttcctttggctttcttgcggtttcagccaatgacaaccactgtagcagagcagagggggactcattctgctgaaagccacagctcctatccggtggtcttagagcttggtaggtcctgtaactacctgcatccttgcttgtaggtttaagggtggcagtcacttcccttttgctagccccagaggggctttacagagtcttggtttccttgcccttactttcatataacctccttttatttaaaaaaactgtttaattatcacatttgagtgtcttctttttctggcacatgcagctatgtagattaaaggggtaactgtactttaaaaaaaatcaataaatcagacttttcattac

SEQ ID NO: 459667 - DNA, 626 bp, Homo sapiens
tgtttctctgcaagggagttagagaaagtcggaagcccccagatgagctgctcgtcttgataccacagaaagcagggctccacccccacgggcccaggtgaggacaggcactcctgctttcgccggctgttgcattttccaagaccactgtggcccaccatgcccccgtcctgggcctataaaaaccggagtccctagcacaacagagacacaagccgctggacttagagaggagcacattggcggaagaaggcgcaagcggctgattgtggagagggcctccagaggagagcgcgggcagaagagcaggacaggcacccgctggccgggaggtcattgactggcagaacgacgcggaatttggctggagcagtcggaggagagcccaggacgcccagcagcccgactccagaacaaaaccatctcccttctggctcccccatctgcatccttgctgagccttacttctactcaaccacctggtggttgagggatggagttggggggctggagaggaagataatagcacaaattccagtattaggctggacttcttctgaaggtgcctggcggttgagaatttagctatgggacccagtgtttcttttctgaaggatcccagtagc

SEQ ID NO: 459668 - DNA, 5083 bp, Homo sapiens
ggcattccttgagctcagtgctagccaccttggcgatggggaaggtaggtctctgctagctcccagccttccatggcagtgcaaagggaaccttcccaacaaagtaagagccaaaggctaagatggcagtctgtggtttgtagaaccttctagaagaccacgagacttgagcctctgcctggaatgttctcctcctcttccctcttctccttggctagctctttctacctgccctgtctcaggctgtgggtgtcaggagcagtactcagagcctgtaccagggaccaggagaaatcactcctaaaaccgaggagatggagaaaacagttggaatgtctcagccccgcgctcttgccggccgacaccacagtgtgggaatcgagaatatcggcttcggcttggaatttaaggaggaggagagaaaaaggatagctcggctggtcttcaatgattttcttgtaaaacttttacaagggagacttaggctgtttgatgttcatggtggaaggcaaatgaggaacaaagtcacgttttacatggcagcaggcaaagagaccgtgggaggggaactgccctctataaaaccatcagatctcatgagacttattcactatcatgagaacagcacaggaaaaatccacccccatgattcaattacctcccaccaggtccctcccatgacacatgggaattacaggagctgcaattcaacataggtggagacacaaccatatcaatatctattgtacaatcccatttgaaaaatatataaatacatatctatgaggaagcatgtatgtgtgtgggtacgtgtactcatgaaaacataataaaaagtctggaaaaaaatgtactcgtgaaaacataatacaaagtctggaaaaaactgttaactgtggttacctctggagaagagtgtaggacagtggtgataaagaaagtgttttctttttccacattgtattttttatacttctaaaactctagctctttttttttttttacaataaagatatattacttttataattaaagtgttttttaaatgacctagaaagggagaagagactcagagtgagtcctgacagaattgttcgggtcctaagggaccttggcagggaatgctggttaacccttgatatccttctccccacctccccaccgtcttccatagaacctcaattttacattcccagactcccttgcagctaggtgtggtcatgtgataagttctggccaaagggaagtgagcagaaatgatttgctaacagccagtccgtggccttaaagggaaggggctctggcccaattcagcctccacatgtaaccttgaaatctttaggccaagatggctacattagagagaaatacacttctatcttgtttaagcctctgttattttagatccttgtttcagcagctgaaactttatgcaatcctatacagaaaactagaaattaattagtaaatattaaggagtgtgcccagcctctgccactccttaaagggatgaaaagaaacatgagactcatttcttctgcccaaggggctcaaaacctagcagataaggcaagtctgattcactttttctaattgtgcaggagagtttatcagaggctaacttgtgtgccagacacaggaaggtcttcatttcaatgcagtgcattacatgagtcctgccctgttttatcaaaggatgagaagttggtcatacaaaatataaggtgaaaaaaagagaccatccaaacagaagaaagagatggacaagaggaaaagacttttgggtccaataccttggcaggatgagttttgttggtaaaaataaacaaataaataaataatggcagggcctaatgaccaaggagtgagaagagggagtccctctagctgttgctgagtccttccttgtgccttctatagccactgcaagttaaatatcaagctgcatatacttacaaatgcacccaaatgtccatcaaaaacctatgtgaattgcttgctctagactgagcatcagtctttatccgaggagccctacctttagtgagaaatagtatttaaggaccataatctgggctctctttgttgctgaattggttgctgtttcttaatgtttaagtggaaagtgctgaaagatatttttttaagggaaaatacatcatgagtttaaacaaacaatccaattctaattctattgggtttttacttatttgattttatatatgtatttcttttatgatgaaaatcttgattcctaaagagcaccaacgtaattacttattttgaagacgtaaaatagtatcaaaataacatcagtattaatgctaacaacatgattttaaaggtacaaaatgagagtggatcatcgtcatatcagcaaacggctatcaaagacttctgtaattgtgtcagaggacatagaactaaccaaaagtggctccccactcaccgaaggtggagaaatctgcacagtaaaataataactgctttaaatcaaagcacatcaaatatgttccaatccatgagttcacagtgatacttttctttaaaactctccaccttcatcaacctgattcctgtgtcaccctacctttgatagcctgccatgctccctcctacatgggccatctccttctcagaggaaggaagcatgaagaggctagtggatttggcattcccagcctgaagattggttcttctcatttggccacgcttgacactttctcttccatgcatgttggctataaaagtgcctggaatgcagaaattactatgaatattcatgaagttacattatgaataatacttctgtaaaaatgaatagtcttcaccctgggaaatggaattctttgtccacactttgagtcacttggagattgtcaatagcagtgttcagcaaactatatagcccataggccaaaggtgctccaccatctattctcatatggcctgcaagccaagactggatttcacatctgtaaatgtttgaaaaaaaatcaaaagaagaaaactattttgtgatatataaaattatattaaattcatatttcagtgtctatacagttttattgaaacacagccacactcatttgcttatattttgccaaagtctgctttcatgctacaaggacagtgtcaagtaattgtgatggacacatgacccacacagcctaaaacatttagtatctagccctttacagaaaaagtttgttgaccactggtctgtaggcttgaggttctcctaaatgcattcttggtgattccaaactcttgtctcatagagctgaactgcagtgccatacattgccagtaggctccattttccctccttctgggaagcaggtctaaagtctggaatgcttctctcctccactgtgactgtatagttagggtaagctgaattcacccacagctccaggtctttaagccaatacgtttcacctgtccccacccataatgtctggttcaggtatctgcagccaggtgagagacccccaggaagaaggcctggccccagccccgagcttcaaggctttctatttatatgcgaaattgcttgcgttttcctagttagtggcagatctgcctgtttgatgttaatgagtttgtgaacccaacaaaaacatgaaagacgaggcttttccaaagaggaaaaatagaaaataaaatgccatccaaaatgagacaggcttgaaatccgccttgcatctcaccagcccctttctctgtcttcccaaaggggcacctttcatccaattgaggaaatcaagataaaatgccagcctggtgaatatcctgcaaaaccaaattgatctgatttgcctggacaaagaaaatgaggaatttggctgatcaaagtgggcacagctccctcttaagccccacccaccccatcaggcctcctgtggataagaaacacaaatctctcgcacatcagcgctgctctcatattcattttcaaatagccccttgcatcctggtgcaaatcttagctgtctcctaataacccactttaggacatagatgttctcatctgatattattaaatggaaaggggccgctttctaatctggagagaggcaggggcatttgtaacagccagaatcaaaggcctggtctctttctgttcctaattatcaatagtgttttataatcttattaatattgatacacagtatactgaagatctgttaaggcgtaatgtatgtggaagataattaacaagatccgagtcagatcaatcgcctatttgacagccaacggtgtgtggcttataaattatacatattctaggtattgctcaaaatgtttaaagtttcagtccaatccttccgatccagcgctgggggaaggcatgaacctaaaggtaccgtccccagcctattggagccttctctgcacacgcaggactcactcttacttaaaaatcaaagggttctgttaactgccaagatctacacagagcataaaacacaccttctccttgtaaagtgcagaaaaacaaaaggtgaaatcttgtaagaaaagagatgattaacaaaaggaagctgagtttaatgtttaccatgaacccaccagattagtggtttgggtatacccaaacctgcttataccacgacattgccatgaactaatttaacagaaaagtatggcagccaatgaaataggaagaagcaaagagagcatagtggtatctatgaaaactaaaagcatactttggaattataaaggcaagttgctaaaaaaaaatccttaaaattaaggaattatttgggggtaatagaaatgcattgtagcttgattgtgtttcacagctgtataagactgtatccaactgtttaatgacattgaattatgtgttgtaactagatgcagttgattatatgtaaattattcctccataaagttgataggaaaaatactaagctttggagttaggcaaactgagattgaattttgcctctgcttactggcctctctgagctttggtttagtctttcctagctgcaaagtagagataataaaacctactaattctggttatgtattgctgtgtaactatgtatctcaaaatttaatgact

SEQ ID NO: 459669 - DNA, 875 bp, Homo sapiens
tatcagctgcctcaggaggaaatgcttagcagggagctgggagtcttgacgcaacctgaaaatactcaacgagggaattctttctccatacagcatcttctaaagtttggcctcttttaccaaggacctgccaagatgggcagccttcacaccaaaacagtgaagaaggtagcctgggtcatcatagaaaagtattacatgcaccccggtaatgatttccacatgaacaagcaagtgggtgaagactgtcattatccccagcaagaagctctgcaacaagatagcaggctgagtcacgcatctgaagaagcagattcacaggggcccaataaaagcacacaggtcctcaaattggagaagctgcacacacctgcagaagttcacgccatttgcagcggggaggagcctgttcctgtgtggcgacctgggcttcaatctgtgaggcgggaaacctgctagcaggactcttgctttgtggtctcctgtgagaagaacataccccaggtagcctcttctttgagaagcacaaggaaacacgtggtggtggaactgaacacaacccacagcctggagctaaacccaacctaagccagccaagctcttccaagatcacccaaactcaagttgacctgtagatccatgggcaaggaaagaaatgcctgctgttttaagatctcaagttttaggttgatttgttatgcagcattattgcagtaaaaatgaactaatacactacctaatcccatttttctattcaacagttatttgttgggtagctgatatgtgccacacacttataatacaggcttcagggataccatggttaataaaataaagagggcaaaagtaaatgaacaagataattttgcattttg

SEQ ID NO: 459670 - DNA, 1259 bp, Homo sapiens
  misc_feature (4)..(4): n is a, c, g, or t
  misc_feature (6)..(7): n is a, c, g, or t
  misc_feature (9)..(9): n is a, c, g, or t
cccncnnanaggtcctcggagtccagagtcctcgaagggaaatctgacacaaagaagcaggtgtgagaccggcccctttctcccatgccttagacagggctccagggactgcttcaggggagatgtcagagggcagcagggaccgggaagggaggaagaaagcagagtgacagtgagaggtgggaaaactacaagaggaattgtttgtacgcttggatctggacttttagaactggtcaggacctgacagatcctccagcccagttctcccggctctcaaacactggcatcatttataattccctggaaaatcaccagcaggtaaatgaaggagaaaagaaaagaacaaaatccaccgggaaccagagacttccaggctccaaagacaggcaatctccaccaggaaacacaggagaagccctgaaaagttagtcttctggaagagaaatttacatctacaaaggaaatctccatttgtaagtgtgtcttcttctgcactaggaagagaaggatgactaaatcagagaagtctcttgtcagagaaagcacggacttcagtcttcagactgaagagaatataccttcgttttatgatgatttttctggccatctcatcttaactgggtccaagatggctgctgaggttccagccatcacactaaaattgcatccgactgaaagaggaaaggaagaagaaagtgccctggctcacctttttggagacttcctgaagaatggtaaccgagacctgaaaggctgcacgactcattaccaattaccaattcccagggccatccggttccctggcagaaaagcttccgatgaatttgcgttgcaaattgaaaacatactgtcaatagcaacaagtccaaaagatgtttaccttaatttttccaaggcaggcttttatatgtggatgtttttgtttaaggaccagcattctcgatttcctgctgtttctggggttggtgctgttgttacaaaagggctgtcacaatctcatgatggagaggagaaatgaagtggctacgtgaagactctctggcactggagcctgagacataactttgcatggggcacgggttggcaaatgtcacggctgacacacagccattcaattttcctaagggtttaggcacctgggacatgatcctgttgaagggctccctttgcagataagtaaagtgaggtccagattgataatgtcacttttccaaggaaacccccatagttagcatcatggttgagtctagaagttc

SEQ ID NO: 459671 - DNA, 1604 bp, Homo sapiens
gctggaaccactgagtttacgaggacacgcagcggtagcggcagcggcagcggcagcgcagtcaggaggctggagaacatgtcttgtgtcttgaagcacagtcctgaagaagcaccttacctctgtctgagatcacatcagggaggcagccagctgctcctgacactgagcaagtctgcacacaagcgcttcccttcgaccctgcagaagaggccccgtagaccagttaccagtgaaatagccgtgatggcagccaaggttttgaatgtgtttgcatggattggtttagcccctcgggcttctgttatgcaccataagaagagcattttctgggagctgttgttcctagacacctggtgcccagaggccccaggaaccccatctgaagcaaagccaaaccagccagcccacaaacctgtggcagataccagagaatcaacaaggaggtgtgatgtggtttggatgtttgtccctctcaagtctcatgttgatgtgattctcaatcccttatgaatggtttagcaccgtcccttcgatgatgagggagccctcggaacagccccaccagttaagatccatccctgacttccaactctgtaactagggacaagttaattgactcctcttagcccttagtgtcctcatcaattattacgtggtaataacccctcagagagtcgccgggagaattagctcggcgcggtgcatggggctagaactcagggcccagcaggtctgacaatgcaggtttccccgctcgcctgttgggtttttgaaacgccctcagcggggttttcctcctaattctggtttggaggagccatctctctccatcccgtctgccagcggggtttgcttcacacacagacgtgggcagatggcatcggggacacagggaaacctgaccttagaggaaatggaaaagttggagagacactgagcactgatacgaaataattctcttgctgaaatacacgaaaggagtcccagcagccatattagtatttccacgtcctgtgtcagccccaagtagagagaacttggaatgggaggggaaatggcagccatcaggaaatgaaatgctggcccagagaattctaagcaagtcaatcaccagtccaagtaaggaggtgttttttgtttttgtttttgtttttgtttttgtttttaaatatccacttgccatttgttttacccaattcaaaattttttcccaagaaaaaaaaatacacttgtaaaatgcctcattaacagcaaagatgaattggacctcaacttttgaatgccatgctgctttaaaggaaactgtagaagttcgtggaatgaaagaatactgccagcatgcattcggactattttccatctgtgtggtagagtctgagctgtgtgttctacagaagctccagttggcagaaggacgactttggccctgaattttcatttatttttgtttcaaaaatgaaaggatagttgctatttttccaaaatttagaattttaaatcactacccacttttgatctctgatttaaatcttgttttgagagacacattagacagtctctacatattatattattttgcaagggaaaaaaggagaaagatc

SEQ ID NO: 459672 - DNA, 1308 bp, Homo sapiens
aaagaactgggaacaagtgaagctgattgacgtgtttgcttccccttctgccatgattataagtttcctgaggcctccccacccctatggaactgtgagtcaattcaacctcttcattataaattatcgagtcctggaaaaggacaggaaaatgtgggaaagtttggaacttcctggagacttaaagggctcagaagacagaaagatgtgggaaagtttggaacttcctagagacttgttaaatggctttgaccaaaatgctgacagtgataaggacaatgaagtccaggatgagattgtctcagatagagatgagaaacttcttgggacatggtggcctgcattcccactgcttcggctccagtcatgtctaagaggggccaatgcacagcttgagtcattgcttcagaggatgcaagcccaagccctagcagcttctacatggtcttggccctgtgtatgtgcaggagataagaactgagcttccctacttttaaagttttgggacttggaattgcttcctggctcctcagcttgcagacagcctattgtgggacttcaccttatgatcatgtctcagcaggacagcttatctctgctccatgtggcctaactggggttggatgacccacctccaagatggcttactttcatgaatggtgacctcacactgggagcctgaaaccagccatggtgagagtattgatggacagaaatcagcaaatgctacaaatcaggactctactcctccccagagctgatgaataagtgagtgaggaagaaagtggccccaaatgaagttgttgtggaaataggcagggctggatcattcacggccttgcaggtcatggtgaggagttgagattgagttgcctttagaaagtctacgaggacaaaagtaaaagctgtgagatcctctggttgacaaagaagtccagacaacagatgatgacagcttggaccacactagtgacagcaataatggaaaaaagccttcaatggattgcacgaagcccaaccatactggggaaggcaatctacttcactcagtctacacaataactcccttctttttctgctgattcagaggcatgttcaaagtgtccaggtggcactcttatcttgcagttcaatggaatcattgttgtgtctcttggtggaaccatttctccatttggaactaagacttctaggccagcagagaacagggtcataggaacaaggaaaaaaaagttttgctagtgggtcattagcaaattgtgaatgtgaatggaatgtaattgtgaatggtgcaactctcacttttca

SEQ ID NO: 459673 - DNA, 1111 bp, Homo sapiens
attggccagatattttggggactgccattccctctgggtttgcctggtgtgtcctcatgattaggctgtaggaaaggctttccccttctgacacacgcaacgacgtggatgaaacttgaggatattacgttaagtgaaataagacagtcacaaaatgcaggcaggaagacattttcaaattccagaaatgctgacggacctccagcgtttccatgttcctccccacctgaagaatgttaagataagcttaatgtgattataacgagacttatatgcccaacaagcatagtttgggaaagagatttgctttgaatactgtgaaataagctttaatctgtcaggtttaaaaaaaaaagttcctgtgaattaataatgcaaacagcactgtgctttctgagtgcgactataaaagaatttaatgacctcctattgtaaggaggatggccacctcctcggtgggatttcccaagggctcctgctagaatgcgatggatttccctggatggcgtttcacagcggaaaccgtgggattgattttgaacgtaatggtttaaagagtaaaccatctgggtcccatttccatacaacttttgctgacattgatcatcttatcctaggctcttctcaggaagccaagtgccggtcgtgcggtgccttgcgaggtcgttcttggtctgtagagtggctctgtgctgatgggtctacttgtgctccattctcaggcccactaagtgacttctttccagacaaggacttgtttatatctgaggaatctacttccataatacgaaagctggggagctcaccacaggaagtttcaggatgcaaacccaggaagagaagggtggacgctcagaccccatctgtttgcaccaagacatctttgccagcagccttcactttcctcgccttggaccttggccacattattgatttcacaaggtctcaggctccaccgacagccattcagaagaaggccagagtgcatgtggaatcaccgctttgccacatgatgatctgcttaagacaaagtctacactgcagtagagccaggcaggagtttaagaccagcctggccaacatggtgaaaccccatctctactaaaagtat

SEQ ID NO: 459674 - DNA, 3323 bp, Homo sapiens
  misc_feature (6)..(6): n is a, c, g, or t
  misc_feature (8)..(10): n is a, c, g, or t
taagantnnnccaaagagggagttcatgctggatcctacacactacctggacctaaagagctgcagcatggcaccatttggagaggacagccctcactatactacattttaccctgggtaccctggggcccaatataccctattttacccattctggacccccactgatatacacccatatcaacccagagggctgcagcagtgcaatgctggctgtacccagcagtgtgtccaggtcctcagcactctggaccatagtgaattagaaaagggtaaggaagaggagttggtcaacaggaagcagatggttggttatgcaatcatgacagttgaggagtttcatgtctcactgtccaacagcagtgacctgctgtgtttctgctctgtgatattatctgagagacctgatggttggttccctgagaaaggaactcagaatcctattaaacaggagttgatttctagagaagtgcttggaaatgccatcagaactggcagtagaggaggcaagcatagtgtagtagaagaaaaggcctgggatgggatttgggttcccaatctaaattttattgggaacagctagtttgacaagcatagaccagatgtccagttgtcattcattcagcaggagcagcaagattcaatcatgtttttattatattatttcctgaaacttgtggctgtaacaatgaagtttgaggattggtctgtgtaagtatggcagaagtgatgttaagtcgcttatgagattagggtataaaagactaaggcttccatgcttccatcttggtctctgtctctcagagaacagtcatgtgaatgattcttcttgaaagtaaatcttccagccccagtccagtattcaaatgatccagcaacattgcaacttatgagagaccttgagccatccaggtaacatgcttccaaatcctgacccttaaaacctgtaaaataataaatgtggttttaaactcttaagtaatttgttacatagtaataaatagctaatacaccgtcctgactattgtcattctttacaatatttcataagcactagtcattaaactatctgtagtccctaaaatatttatcaatcctttaagcctctataagttcacagatttttatgtgtagatatttattcctctgtcaaatatctaatgcaatattttctctttcaaatttggctagtgtcctttctagagaattttatgacctcaccaatctgaattaagcaccatcgccattcctggtttcatagaagcagatgcccatgtctaacttagcactagtcacactgttatgttcacaagattgtaagctactaagattgggaccttagttttattaagtttacataatgtcagatacattgcctagcaaaaaagaacttgcttaattattgttttttaaaattaaatactaacagaatgaatggttaaacaccattaaataaatatgttagttcagattatatattgatgtatggtcattagtttcctacaaaagagaaatttcatgtttttctatctaaatgtataatgctccctccagccctacagacatactatttttttcaaaagaataaagagacatgaacaatataaattcaaactgcaagacggttgtgtcacatttcctggactatgttgtagcctccgttttgtagctgcacctccaggataacttgtgaatccttagggtcatggaaagaagcccagtaagtggatttctttctgaacagggctgtctttgtttcatcatggagcaccttgtcctcttcatccagcattatgatttgctcttggcctttctctgggacacaatatgtggctcatagttctgaattagaggagaaagatggttttagcattatagttgcaaatataaagcatttctctggatttagcctgttctttaccagggagcttgaagtacctaaggaggaagtcattacatattaaactcagaataaaacacctaaattccaggacatgactaaagtgtgttggtgacaaaaacttctggaaaactaactctgccaattcagaaaatgttactggcctcataaagtaatggtacagatctatagacaatttaaattgccaagagagttttgggtacaagagctctccattttcatccctgtatccacagtggttggaccactgaatgttcttaatacagagagagtaaaagaatgtgcttaaagttgttgttagtgggctggttcagtttcttgactttgctgcaccaacgaatttgagagagagtctaaagtaaaggttaagggacaaaacccatagacattaatgaaggtgtggtcccacaaagtttccctctctctcacaacctgctggttgtgcagcctgctgtctccagatttcccataggcctttgtaggcacctttcttctctcatggatctttgaataataaattgcttctgttatttcatgtgttttgttatgctgcttcctcagtgtctcactctcctctcagtcagggctctcctagaggttgactatattggtaggagtaaactggatacagatcacacaagaaccaccagagtgtctgccagtataaagacatttcctgtgagaaggacactggtcacgggttggacccttaggcttcaggctgtttgcaagggcaaagtagtatcccatgtaaggtgttttcacatttttattcaagtatttgctgaatgcatattatgttgtatagtccatggaaattaaaaatagacgttgtactttcaaggagcttaacatttatttgaataaaacagagcttttataaataaatattatatgttattataataattaaaaaagagaaggtatggaaaagtatatcaaatgctcaaatcattatggaaaacaaaagggaaaaataatgatcaaatctatgtggaaggctgacagagaggacttcatagaggaggtgaccacttagccaagtccagaaaaataagtagggatatcaaagatagattattgaaagggagattattttagatacagagaataaccttaaatatgtttggaagatgttattttttaattattgcagcttaataggtttgatgtattatctcacctttcccttatctttttactgtagtttgatgttaagtgtatagaaaatgctgaggtcagacatttttaaagtatgctatgagaaatgtaggtctatcatttgaaccctagtctcactgtttatgattgtgtcctacatctaaagcttaatttccttatgaaaaatgaagagtaacgtcacccatttttttgttgtgaagtttaagagagacaataaaag

SEQ ID NO: 459675 - DNA, 948 bp, Homo sapiens
ctgtctcactagtatagagactcatggcccactccgaatctactggtgacagcagcttccctgaattcatgggctgcccagggccagattttggctttggaatgacttgtcagtatcgttcagatttcctgaccattggtggatttgacatggaagtgaaaggttggggtggagaagatgttcatctttatcgaaaatacttacatggtgacctcattgtgattcggactccggtttctggtcttttccacctctggcatgaaaagcgctgtgctgatgagctgacccccgagcagtaccgcatgtgcatccagtctaaagccatgaatgaggcctctcactcccacctgggaatgctggtcttcagggaggaaatagagacgcatcttcataaacaggcatacaggacaaacagtgaagctgttggttgaaatcataattaatgcgttactgtatgaaccacaaaacagcactatttatttagccttacttctacttccagatgcagtgcctcttttggagaagacatgtttatttttcatgttctttctgacattactttagcaattcaacttgatgtgagaagaaaaaacaaatgtttcaacacaaaatctctgttttgtgagaatactgcactatggaataattgacaaattgaaatctcatattttaaatcatatcatctgaaatattacaaatttcaaatttctaggtgctatattaattcaatattacaataactcttacctaattattcttacaagttttaagttgtggtagtttagtgatttttttaaaagatgtgtgaaatgttctctgcaaaataattcaggccactgtctccttttatatattattataattatttattatgaagaccagtgaattacgatatttaaagtgagagaacttaattatttgcaaagggaaggtctgtggatagcaaac

SEQ ID NO: 459676 - DNA, 1659 bp, Homo sapiens
tcagctgtgggtcagctgtgggttgtctgcaactttgctggccattcctgggctcagatcatcatcacatcatcaccatcatcacctcatcctcatcaccatcatcaccatcatcatggcattatcatcatcatcacctgatcctcatcaccatcattaccatcatcatcacatcatcaccatcatcacctcatcctcatcaccatcatcaccatcatcacattatcaccatcatcacatcatcatcttcatatcattatcattaccatcatcatcacatcatcaccattatcattacatcatcatcacatcatcattatcacattatcatcatcacatcatgattatcaccatcatcatatcatcatcatcatatcattatcatcatcaccacatcatcacatcaccattatcatcaaatcatcatcatcacaccatcaccgtcatcatcacatcagcatcatcatcatattatcgccatcatcacgttatcatcatcaccaccatcatcatatcatcatcacaacaggccatacagaaccctgcagagtgctccactgggaacccaagcagcagcctgacaaccagggaagagcatccggagagctgacgacgtgggggccaggtttaataaggaagaattgtcaaaccattctgtcaaggaacacagataatgagaacatttgtgtagataaggtggagttggatatgtgtgcttgaagccgcaggatgaagacaacatcaggtgattcctggaaccagagcgatctctcagggccgctgcagaccccacatatgctcttccatctgaaggtctcagcccataactgccatcaagaacctgaagacatagcttcctctatgccagacttaaggacatctaaatatctacctctgaacacctatttgaagaaaagattatttcctggaacctaccaattaattgttttactataacaaggaatcatccaacatgttttatttcttcgttttcaaaatgtttggaagtgcctttacagagacattaaatatacggtggaacatacacaacagatcatactgaaaccataggtaatataatgagatagatacattatacaaaaaggtatatagaagcacaatgtcataacagcatgctctgtttataatatctggtgtttaccagggaacaagaatccaattcagaaatgtggaaagtaagggataacaccttttcaaatgccagacaaaacttgtccccactgtttgctgccttgcaatcaccccaaagcacactactggctgggctgtgtaggtttggccactcactatgttctgcagctgagatccggtccacctgcctgagaagagtctgaggctgggaactgatacctaagatgcacatttcaattttgagacaacagcatgccctgtagacacacattaaacatgagcagtattgtaaaaattatttgccatgggaagacacacactacctccctctaagagcacgggtctgttgcatgatacacgctatgtggatgtgactatctttcagtgttttatagccacttatttttccctaggtttgatcatttccttatgacttaattctccactctcagcctttcatagttatggtgtttgcttatgcccacaaataatgtgtggggaatacct

SEQ ID NO: 459677 - DNA, 3557 bp, Homo sapiens
ctatgttgcctgttgatcctgtgaaagaaaattttatgttcttaaagggaaaacttttttcaattgccttcccaactcctttcaaatcaagagtacctcttgtagcagtttcaaaggaagttctagaagatattttggaccttgatttatctgtctcagaaacagacgattttatccagcttgtaagtggcgaaaagacagtgtttggatccattccactggctcatccctatgggggccagcagaggtgtcctgttttcactgtcacggacatcaagccggcactttctgtctgccagaagtgttattacttccacatggctgttgacacaggccccatcatctctgacattgaaatgccacttacaattcattatttattagaactatatttggcaaaaatttaaacaatcttttattggtacataaaataaggaggcatcacacaattcagggtgccttccatgaagtggaatatggtatatacaacaggacgatgcttacatgtgataaatggattcaaagaatggataaatatagttgggaagttcaatatcttaaaaaactgctataaataaagcacttatatttgctactttattttcctaataacaaaactacactaaaatgattaatctgtaattattgacatatatataataaatctagatataataaaaatatgtttctaataaaatgtacatgtaaatcaacaagcacagataaaaagtttctcttctgaaaatgctaaaagttcacagaatatactaatccacaaaaaataaaaattaaaatatagaaagtgaaaaattattttaatctgtgcaaaattcatattcctgctcttccccaaaattatttcattaataataaacttttactaataacattgtacttgttcaatgcagaaatcaaagataataaaaaggaaaaacattttatattaaaacaaatgccctcaaataacaaattttatcatatttcgtacataatttcagataacacaagaccatcatctgtatgtataaacaaactgaactttacccttacttggtacaccaaaatacattttcaaatgtcaacatacttctgtatatgtttctacattcagtggtcacatattatcccacgctgtaaattcactgaaatgtatttataaaagccattgtatggattcttcttaatacactgatattttaagcagcgctcaaaaaagaaattgtgtgtatgtttccttattttctaaaaatatcttaatgtaatagaattgatcaccaacaggcatatacaattttttaaatatggtacttaccaccaaattgtctatttgaaaagtcatctgcaacttaaactttaagcagcagtataaatatcactgctctttatcctcataaactttgtggatagaaaacagtatttgattcctgttttaacttaaatgccttctctaacgaggaacactaaatattgtttcctgtgtgcataagtcacttgcagatctagaagaaggagtttgcccaattttaaattagaggcaaagtacttttcttagatctgcaatttacatctctaatttaaattgcccaattttaaatagaggatttttttgttgatttgagtgaattctctgtaaaatgaagatttttaaatctgctatatatacacacatgcacatacatgtgtagtaaatattttacaagtatgctgccttttattttttctcaaatgcagggtaatttttgttttgctaaattaaccttcacaatgcttatttctgagagtcttagaaaggttttgtcaacataaaaatgtatctgtgtaaataggcatttatattttcttctgattttttttcattttgtatattaaaaatttttaatctatattccatcaggaacttatttcttttatgtactgtaactttggcatttttttctagagatcatcaaacccaagagagtctagattttctcctgttattttccagaagttttatagttttgtatttgacatttaggtccgtgattcattttgacttaatttttgtgagaaggtaagatctgattcattttttttacatgtgggtattcagttgttccagcaccactttctgaagaaaccaacctttgtttcatcatgttgcctttactttttcatcaaagattaattaaatatatcgatgtgtcgctatttctaaactctctgtcttgtttcattaacctgtctattctttcatcaatatgatactgccttgattaccgtagccttacagtaagtcttgaagttgagtagtgcctgtctgtcctccagctttgttctccttcaatattgtgttagctattcaaggtctttttcttccccatataagctttagaattactttttctatatccataaaataatttgcttccattttgattagaagtgcattgaatctgtacattggtaagaaatgacatcctgatgatactgagttattctattcatgaatatgatgtatcttctccatctcttcagttctttttttatttccatcatcacatatggacagtttatgaaattacataactccctctaccttgaccaaaggacagtgatgaattcctcgttctgcagccaacaagtcacctctgagggccatgtgtctaaacatagacaggagggacacctgttgcttcagccaacacctgctggcatgtgctgaggatgctggtgctgctggctttcccagccctgcccccggggctgctttgggtgtgtgcctcttgactttagtgagaatgtactttttcatccctaccatgggtgaaaagttttcacaaataaaaactttttaaaataatgccaacttttgtattagatagaggtgctgcgtgtgcaggccccagtgtgtgttgtttccctctatgtgtccatgtgttctcatcatttagctcccacttacaagtgagaacatgctgtatttggttttctgttcctgaattcctttgcaagataatggtctccacctccgtccatgcccttgcaaaggtacatatacaccatggaataccatacagccataaaatcaacttattaattaaagtacttttgatgtcttaataatgttgaccctgcctaatcatgtaatgtcataatttttcatttatacaaatctatttttaggtttttaagaaacatttcgcaccaattccatactaattaaattattttaaataattttctttaaaatgttggcattatctcttttccatctatgaacacaagacattctcattaattcaattaacataatttgttgtgttaatgaatttcctaacgcgatgagtctcacctgcatttctggaataaatggacttcctaatgatctaatattttaaagggttggcacaatggtttttaacattcaaaaattttactttcatattaatatgctctaattatgtataatactccatgcggcatcaaacaagtaaagttatcatatcagtttttttcatttttaaaatagttcagttttattctgctagtaccataaaaacaatgtaaacacaagc

SEQ ID NO: 459678 - DNA, 1082 bp, Homo sapiens
ctcctcctccataagctaggaggcagaaggaactcgaggccagcctgggcaacatggcaaaacacaggctctacaaaaaaacacaaaaattagccggggtgtggtgacaagtgcctgcaatcccagctacttgggaggctgaggtggaaggatcacctgagcccagggaggtaggctgaggctgcatgattctcctgcctcagcctcccaagtaactgggattacaggtatgcgccaccatgcccggctaattttgtatttttagtagagacagggtttctccacgttggtcaggctagtctcgaactcctgatctcaggtgatccgcccagctcggcctcccaaagtgctgggattacaggtgtgagccactaagcctggcccatattttttaaaagattaaaacttttattatttcaggctgggcatggtggctcagagcaagactgtctcaaaaaaaaaattattattttgaataaataaataaaaataataagaaaaaagaatgggtcagaattgtggtacaaagagctacccagatctacacatactaaaaggaaagtggtcatctatcctatgcgccttcctgtgatccaggtgctactggactatggatcaaatcagctgacatggagaacccagacaaacctgcccctcaaggcaatcacagaagacaaggaagacctgggctttgagctttctaacttctgtggtatgaacctgggaatggcactcttcagtgagattagctcgtgcactggtcgaagccctcaggaaccagaaccacccattaacaagtggctgggaggaagggggccgcttttgggcattgttagatgtgctgctacacagactgtggacaagggaatgctgggtgttttgaaggaggcaagcagccaagtctgtagctctccacctctgaattcactcagagatggcagggaagaaaagatggctccaagaggaatacagctcctacccaacaaatcctaaaaggcagctctaactggcaataggaatggcggcataaacgaagacccaaagaagaaacccacccaggatacctctcatcagtagaattt

SEQ ID NO: 459679 - DNA, 2855 bp, Homo sapiens
aatcccaccagggctgggcctgaacatgaggtgggtcggcacatgccctcccaggctcatgtctgggtgtacatccctcagggggcctgcagagaggaaaatggcaaagcgcagactacaccttgtctcagaaagagcaaggatgccctgcagtggaatagcacttaccagtgcattctgggacaaaaggaaaaaggcagggaggagaaagcagatggtggccataatatcaataatggccattccctgagggcctgcgatgagctagccatggttctaggccccagagaatgcaaagcaggtgagaagaccaagacaggaacaaacttgcgggtgtcctgcattgtccagatcttccaggactattgggggaccaatgctgagcacttggtcctgaaagattttcactgcagtggacagctccactttggtagagtggagctaaaaatatctggaccacctgctcacagggtcatgagaatcaaaggagaaaccacatatgagggtgtccaacagatgtcaggaatgactttcattctgttctagcagttaaggagcaagagttcctgcctggagaaggcatctcccaagttctagggccttgtgtcttcctcacttgctgctgccctcaaagtcagcctaatttgtacctgaacctcagccctctgccttggtggtaatcagtgtttccttggcttgcctttctctgccttacataccttgctctctgctgtgccaatgtccaccatgcgtcgacctcgccctggttgtactttagacaaagttcttgcaatgccatctgcctccagttctgcatttggagagcaaaacttgtctcctagctggagatctcaagcccaacccaaagcacaatgtctagaacttagtaagatcttagccttaaagggtccaacatataggaagtcctcaggaaatccatgttaatttaaatggaattgaaagcaggtatgtttcccttctttctacagcctctgtacccaaagattggatgaaccagtggcaagaaaatgccaggtggaaacatcccaacagacagtccatgagcgatggtggaactctgtgctgcaccacccacatgcctcgcagctgagtccttctccagaactttccttcacctggaggaaggtgcctagttcaagcttaggattcatcctgccaagcctccctcggatgctgaggagaagccactctatgagatgttcaaggaggcctcatcacggacctatccggctgagaagttccattggtccagctccttcactacccagcacaggtaatgacaacgcacttgaggaaactcgataggttggctaccttgaaatggagaaggaggtcaagaaacacatatcctaactttcagaaggaactgtctgggataattaatcaacacatcaccaacaccaagggattgttttatatcagaagacgtataattaaaaaaaaacaatagcaggcttgttgtgtgttttgtttctaaggaatgttaattatgtttggcaccttgacacatccaaagttctcccccaatatttagaaatcaaacagaacttggcttcgagatctttcttagccaacagaacttggcttcgaggtctggacttagcacaggcagggtcgtagaaacaaaatgggcctccaacaggtctttgaatgggcctgtgattgctgtactagtgaggaaggcacttgcaattgctaaattgcactcactattgcttaattacacctttggatcagcacctaatttgcttagggtgcaactgagctgccatgggtgtaattgcttgtatgctacttgacaatacagccactgccagaggagactggagcctcacttggctctgctcagagaggctacagccccatagctgtggtttccagggccacagaccccccagcagcccagaacagcagaaggcagccctggctagctagctgctcgctggaagcaacctgcatgccagaaaccttagaaaggtccttcggaggtgttcacagagcgactaggaggacactcccaggctaaccctcccagtgggttcctccctagtgggccctctctgggaggcagctctaggacatgagcaactccacctaggttctgcctcagctatcctggttactctgggctgccagctcctgctggggcctggttcccatggttaatctgtgctgcgacatagcaggggagatagtggctaaagctgctggcacccaagggggacaggaccatgaccacaggcacccaaggccccaggtaagagagcaaagccctcctcctgagacccctgtagccctgctgatgtccacagtatggccagactggcaacatcaagattcatgtcccacagaggaagggggaggcatccacgtttccccctaaacacacacacacacagaggccacacaccacacccagccagaattgcatacgtatttttagttctacttagcatttgctgctttggggaatgtttctggaaattttggagagcatcttgttaaatgagacccacagatcctagaagtgttcttgctgtatacctgaaattacatgagcttagtcaggggagctgggcagggtgggaatggcagaaatgggcagcatcaccaggctccacccagtaggagagcccccttcccaggaccagggctggagagtctggtttacctggatccaacagggatctcatctttggggaaagtggagactgaattctggacagagctcagagtccatgccagctgggcagcagtcaccacacaggcgtctgctcatcctgtggggcatcccctcttgggacagtcaaattattaaagaatcgtggtactgc

SEQ ID NO: 459680 - DNA, 1445 bp, Homo sapiens
agctactgcgcccgagaggcagcgctcagacagcggggaggaggcggccgcggagcccccggagatggagggtgaaggcctgctttcaaagtatcccacgtcgttcagcaaagattcgtcatttagaattcagacctgccaagaccacggatgctttgtctcagctcggatatcttcatttctccttcttacagtttccttgtttccgaggaaaaacacaagatcttgacaactgcaatcacctggtaaccaatcatgaatctggtatggaccactttcaccctgcaccctgtcaggcagtttccatcttctcacaatcttcacaagaatcctacagaaacaagacgtatcccccgatttactgatgatgatccttcagcccagagatgcactctccatcggctgaacccaactggaagtcggagggtaaagggcccatgactcagtccgttcaggctgacccgcctggggctcagagcataacagacaagggtggggaagaaaaaagaatggacttggagaagcaaatgggaaatattcaggcacttctgatctcagtttggccagtcggctcccctctctctgactgtaaacacagagatacagaaactgtcattagaaatgagtagtgttaatgatccatgacagaaagctcgtgaatttctactgctgaggaggcttgagcttttctgttttcattctttctacacatcgggagcggagctccccaatgcctttctgatacatcgctacttctgcttcacctaatcaaaggcacttactgctgctcagaacctcaggcctccaactgaacaatgaacaggttttctctccatcaccccctgttctctagtataaaaacttcgggccctcagggcctgtggccacaagtggagcaattagatatgggcatccagaaaacctccattagtgaagcctacagatgttcatcagagactcctgtcaatgctttatgggtgtacagatattcggatgaaacctcgtgcttcgtgcttgcactgcaagctctcttcatccaagcgctcctgtcggggctgtccgtgagaaaccatcctcccttcatgcatggtgccctcctcaccctcctgatgccccacttctccccttcttttcttctagcatctttcataaaatatcagtccacaaaccttctcacgggcaaggagaacaggcttttcagcaatatgagaaattgcataactgaacaatagaaacattcaccttcttgttagctaggaccaaaaaatgctaatattttaggtggattccagaatctctcacacagagtctggggtacagacacagaaggttaattcagacaaaggaggcaagggtggctaaagaaaaaaaaaaaagcaaggaaccagcttgtgtcagggtttgatacacaatgtttatcaaacaatgcttatcaaatgttattt

SEQ ID NO: 459681 - DNA, 1894 bp, Homo sapiens
agttaccaaatgtctacatcagatgcatatttcatctgcatcttgttattgggccgcaagaaacagcagcctaaccctcagtttggcctggaaacagaatgtggcatgccagccaggagagaccaggacggtgctgtgtccagcagccagaggcttgtgaccagacagtgttcaggaggatcccagcagctgccagtgagattttcccgggaacccttttgaagggtcctgtgggtaaaaaatgcacatctctttcactactggggaagaacggagatcaagagcagacatgctcaaaagggagtgacatgaatggatttacattttgaaaagcctcttctggcatgttgtgggaagtcagggaccctgaatggagggaccggctggagctgcggcagaggaacataaattctcctgggcacatggcaccactcacatatcacagtgcgcactgggaatggtggctgtggtggggtctcaaggaagccaacataaacttcaaggagaggtgctttgtgcatcccagctgtcctgtggacagtccagaagatagtggtggcaaatggccaacttctgcagccctcgccctgaaggacatgtgccagacctggttctggaggttcctcattggctgggcaggacccatttattcactgacaaggaagaagccctgggttgggcaaggaagtgccaaaatgccagcaggagtcacttggaagctctgtgtaacagctcttaatgaatcagtacagaattagtttgatatttcaacacctagaggatccctagaagatgtttgggtttgctaaacattaactctgtgagaagaaacactcataatcaaacccaatattattaaagtgaggactaagcaacattgtttctcactcacaatgctagctcaccttctatgtgtgactgggagtagctgtggctagcaaccatttggctcttaaatctgtctatatctgtgtattcgtatgtatctcatatatatgtgcatatatgtgtagatacttttaggcagaaatcaacatgcataacagaaactcgttctcctcctctacccacatttactgctgaacagccaaaattttagactccatttagtttcagactcttatcagaatgacctagccagccagcaccttcttataaattctatgtacaagatactttgtggtgatctaactccttagctacattttcaccattttatcttgctatgacactctatgttcttgccatattgaactacgtatagatccttgaacaagcactttattattaataagattttctctccttggaatgtctctcaggcccccttcatttataggttgttgcgggaagtcagggaccccaaatggagggactggctggagctgcagcagaggaacatagattgtgaagatttcatggacatttatcagttcccaaataatacttttataatttcttatgcctgtctttactttaatctcttaatcctgttatctttctaagctgaggatgtacgtcacctcaggaccactgaggtgttacctgtacaaattgattgtaaaacctgtgtttgaacactataaaatcagcgcaccttgaaaaagaacagtgatttttagggaacaagggaagacaaccataaggtctgactgcctgcagggatcataatgtaaaaatatctagtaaacaattgtaaaaagaaaattataaagggaaattctaaaactgctgaattgttatcatttcaatgaacaaactgtagttttatatgatactttactttcaaattttaatcagctatcatttgaaacaaatgcaaacacatgtgtccaacacaaaaacaaaagttggaatcagctgcttcatgtatttgcaatatatgtgtcccttt

SEQ ID NO: 459682 - DNA, 1254 bp, Homo sapiens
tggagctgatggatgagtttggcatttttcttttcaatttttttttttttgagctgagggggagaacttcttccccttctagaatgtaaagctccctgaggggaggacttgtggattctgttcactgctatattcctagcacctagaacaatgccaggcacatgacaagctttcaataaatacgtgttgaataaataaatatatagagagacataattttagtggcaaaatgaagactagactctattattattattattttgagacagagtctcactctgttgcccagactggacggcagctgggcaacaagagcgaaactccatctcaaaaaaaaaaaaaaagagtattagcatgcttttacattcccttcacgcttatatgttgactttatttgcctctttttgttttaattaattttaatatacaaccttttattttggaataattttagatttacaaagaagttgcaaaacagtaaagagagttcctgtatacccctcatccagttttagcttcccctgatgttatcatcttacattgttgtggtacatttgtcaaaactaaggaaccatcattgctatattactatttaactcaactccagatttcatttggatttcaccagctttccctttactgtcttttttttctattctaggacctagtccagggcaccacattgcatttgaaatcttacgctaactgctatcgtcttacagaaagttctcaagacttacggctgctaacaccttctctcattttccagtactaatgtacccttttcttcagaataattcaccgtcagatatggcagaccagggggagaagaaggagcctgaggaaatggaaggaaagaaaggtgacaaaaaagagacaaattcagaagatgattatgtcaaagtgaaggaattagattttaaaaaaaggaaagcagcagcaaatacacagaaggaaatgggcaatgccacatactgtgacaagcagtatgaatgtacaggtgacaagagcacacagaagtactgctgtcttagacctgaggttgcagatgacttctcagaagaagtgatatctgagctaaagtttagaagagggataggaattaagaaaaatcctgaagtatcagaatccaaggagagttataagacaaaagcaggagctgcagaatataaaactggcacagctccctttctttttaggtagagctgatgtgaggacattttacacatgttacttagttatcttatttcctcc

SEQ ID NO: 459683 - DNA, 6142 bp, Homo sapiens
tccagaatagggaaatccagagagatagaaagtggatttatggctgcctagggctggagctgggacctgttctgggagtgagtgccacatggttaaatcggtgctgagagaaccttagccatcccaagcattgatgaaagaatcattgttaccagggggagtgggtttgctgacctgtaaccactcaaacctttccctgccctgactgtggggcagtgactcagagctggaactgtgttcctgcctggttgccagattttgtgtggggggtggagaggaacgagaatgaatgagcaggaacaagtggctgctggatttgtaacaccttgggaggcagctgctcaagaaccgaaattgagagacagcaggcaggctgggagtctccctccctgtctgacctgaacctaagatttaataaggtggtgcagctggggaagacactatccgaacgtggagcccaaagggagggtgagtgtgtcccctgccttttccggtgggctctggcacctgagctggaaattcttgggcttttcttagtgtggcggggttctgacagactaagtgtgtctcagaggaaaggcccacatttctccccctgtgaaatctttgatgaccagggtcaccagacattgctgactgacctgtcgtgtctgtactccttccattcacacgaattctcatccatcttctctctttctctttagccataaccagcagaccacagcattcaggcatcctgtgacgggacagttttctccagaaaatagtgaattcattcttcaagaagagccgaatccacatatgtcgaagcaagacagaaaccaaagaccgtccagcatggtcagtgaaacatccacggctgggaccgcctccaccctggaggccaagcctggacccaagatcataaagtccagcagtaaagtccacagctttgggaagagagaccaggccattcggaggaaccccaatgttcccgtggtggtgaggggctggctgcacaagcaggacagttctgggatgaggctgtggaaaaggaggtggtttgtgcttgctgattactgcttattttactataaagacagccgagaagaagcggtcctcgggagcatccccttgcccagctacgtgatctctcctgtggcccctgaggatcgcataagccgcaaatattcctttaaggctgtgcacacggggatgcgagcgctcatctataacagctccacagcgggctctcaggccgagcagtcaggcatgaggacctactacttcagtgccgacacccaggaggacatgaacgcttgggtcagggccatgaaccaggctgcacaggtgctgtctcgatcgtcactgaagagggatatggagaaggtggagcggcaggctgtcccccaggccaaccacacagagtcctgtcatgaatgtggccgggtgggacccggacatacgagagattgtcctcatcgtggccatgatgacattgtcaacttcgagaggcaggagcaggagggagagcagtaccgttcccagagggacccactggagggcaagcgggaccggagcaaggccaggtctccgtactcgccagccgaggaggatgccttgtttatggatttacccactggcccaagaggccagcaggcacagccccaacgggcagagaagaatggaatgctgcctgcctcatatggcccaggagaacagaatgggactggtgggtaccagcgggcctttcctcccaggaccaaccctgaaaaacacagccaaaggaagagcaatctggcccaggtggagcactgggcaagggcccagaaaggggatagcaggagtcttcccttggaccagacgcttcctcgccagggtcctggccaatccctgtccttcccagaaaactaccagactcttcccaagagcacccgacacccctcggggggctcctcgccacctccccgaaacctgccaagtgactacaagtatgcgcaggaccgagccagccacctgaagatgtcgagtgaagagcgccgggcgcaccgggatggcaccgtgtggcagctctacgagtggcagcagcgccagcagttccggcacggcagccccacagcgcccatctgccttggctccccagagttcaccgaccagggccggagcaggagcatgctagaggtgccccgctccatctctgtgcctccatctccctcggacatccctcccccaggacccccaagggtcttcccaccccggcggccacacacaccagcagagcgagtcacagtgaagccaccggaccagaggaggagtgtggacatctcgctgggggattctccaaggagggcacggggccacgctgtcaagaactcatctcatgtggaccgacgttccatgccctccatgggttacatgacccacaccgtcagcgctcccagtttacatggaaaatcggctgatgatacctacctccagctgaagaaagacctggagtacctggatctaaagatgacaggccgggaccttctcaaggatcgaagtctgaagcctgtgaagatcgctgagagcgacactgacgtcaaactgagcatcttctgtgaacaagacagggtcctccaggacttggaagacaagatacgagcccttaaagagaacaaagaccagctagaatctgtgctggaggtgttgcacagacagatggagcagtaccgagaccagccccagcacttggagaagattgcctaccagcagaagttgctgcaggaggaccttgtccatatccgagctgagctctccagagagtccactgagatggaaaatgcttggaacgaatacctgaagttggagaatgatgtggaacagctgaagcagaccctgcaggagcaacacagaagagccttttttttccaggagaaatcgcagatacagaaagatctatggagaattgaagatgtcactgcaggcctgagtgcaaataaagagaacttcagaattctagtggagtcagtaaaaaatccggagagaaaaacggtgcctttgtttcctcacccgcctgtgccttcactctcaacttctgagagcaagccgcccccacagcccagtcctcccaccagccctgtgcggacccctctggaggttcgactcttcccccagctgcaaacctacgtgccgtaccgacctcacccaccccagctgaggaaagtgacatccccccttcagtcaccaactaaggcgaagcccaaagttactgtcagaactggaagagccctggaagatgatctaacccaactctcccattttgcagttgggaaaactgaggcccaccaagaagaagtgagcgtgctgagtagggtggagtttgtgatctgcagagaggtgtgtggctgtggacgaagctgtccccatgcaaacctttgtgcaaatccgcagggggctctcctgcagttacacagcctgtgggcaatttttgccaacaaaggcttggaggagacttacctgggcattgtgtgtgcctggacctctgatgaggtcagtgcacagtgctgggtaaaacacatgagttctgctgccctggtcttcaccatctacctgcttccagccatagtccagggcccagagctggacccaggatatggcccagcacccagccagagagtcactgtggatttcagcatcttgagatctccttcccaatcccagatccaagaggtggactggagctctagccctaaaacaggagagggaaaattccaaaacaaacagcaggaatgtctggggcagatggctgccaacatagggcagaatgctgccagctgggacagggcactctgtccttgttcaggtccccaccttgctgaaggcgccagagctcgtgtagggccaatgagccggctcaggctgagcactgctgagtgggtagatgttactctccagcaggaagatgaagcacctcccaggcccccactccccgaactctacagcccagaggaccagcccccggctgtgccgcctctgccaagagaggccaccatcatccggcacacatctgtgcggggcctcaagcggcagtcagacgagaggaagcgagaccgggagctggggcagtgtgtgaatggggattccagggtggagctgcggtcgtatgtcagtgagcctgagctggcgaccctcagcggggacatggcccagccctccctaggacttgtgggccctgagagcaggtaccagacgctgccaggcagagggctctcagggtccacgtcaaggctccagcagtcgtccaccattgctccctacgtcacactccggaggggtctcaatgccgaaagcagcaaggcgaccttccctagacctaagagtgccttggagcgcctgtactcaggggatcaccagcgaggcaagatgagtgcagaggagcagctggagcgcatgaagcgacaccagaaggccctggtccgagagcgcaagaggacactgggccaaggggagaggacgggcctgccctcatctcgctacctcagccggccgctccctggagatcttggctcagtatgttaggaggggccaggcagcggggcagggacagggagccgagtgcccctcagagtcccccaaacacaagcacatcacacctcccagtgagagagctgtccattgacctacatggttcagagaacaccccacggggctgtttgtccacgacccaggctggacgaatgcctggtcagagggtgacctgaaccagagctggagtgaggatcaaacaggcccaggagcctgaggaaatacccagtcagtcctcccagccgcgatggagaggggcctttgcaggcgttcggaatctcggctgaattcaggacctgggaatacagggttcagagaggagaggaggaagatggtgacatgatttggttagaagcacaagcaaactgatcagcctcccagacctgccagcagatgctgtgtgagggtgatggagcacggggtcacacccctgccccaagggccactggtctccctgggcttgcagtgcagaggcctcagggtgtctgggattgctggggaggcctgtgctgccccctggtggcgcttcctggcgctgcgccctgtccacagtcaccttaggtccctttggaaacattccatttgacttttccctgttgtttgaaatcccatgtttccctaaacctctagcctgattgttctttccctaattcattgcacaagctcctttgcttttagtgttaccgctcattgcctctctaatcctgcctgattgtgtttacagaagcttctgatttgcattgaacatgctctaactggcctgtgctacttattaccgggcttgtaatagcggttcttgtctccatagcctgttgagtgttcccagatgtgactcacctttctgctgccctcttcatgcaggcctactgactcataattcacttgtcccaaaagccaccccacaagcctgagccaacctgctgcctgacgccacagtcattggcagaggtctgggcattattaatttataaaaatccatgctttacacctggacagtagacagggacttcagagattgcacgtttgaatacattctcccaagactgaggttgttcggttttaattcctgtagtccaatcacacaatttcttatggaaaaccttttgtgtttctggtatttaataacttgaagggatagcaaaatatactgtgtattcagagggcctctctgcagctgctagctcagacaccaaaggggtaaggcccaggacattcatatctttaaaagctgcaaacctggtaacctttaaacttttaaaacaaatgtcatatggggtaacactgaccttttataatttgatgtctcaaatgtagagattatctaaaaatcgtaacttgaataccttgtaatttttctcttaaaaaagaagacttgtgtaagtctctgcatcaacgccaataaacatgttgcttaataataatggattggcgtggttcttccccaggataccttatagagtctagtgaacttttcctgtttgtggaaacaatcaggctgggtttaaatgaggacttgtctctatttggagcatttgtgagcgtgtaaggaaatgagtgttttctttgtgaatcattaaattgattttttcatctttgg

SEQ ID NO: 459684 - DNA, 4513 bp, Homo sapiens
tgcgactctagagtgaagcaccgcaggtagctcaatggaatgctgcctgcctcatatggcccaggagaacagaatgggactggtgggtaccagcgggcctttcctcccaggaccaaccctgaaaaacacagccaaaggaagagcaatctggcccaggtggagcactgggcaagggcccagaaaggggatagcaggagtcttcccttggaccagacgcttcctcgccagggtcctggccaatccctgtccttcccagaaaactaccagactcttcccaagagcacccgacacccctcggggggctcctcgccacctccccgaaacctgccaagtgactacaagtatgcgcaggaccgagccagccacctgaagatgtcgagtgaagagcgccgggcgcaccgggatggcaccgtgtggcagctctacgagtggcagcagcgccagcagttccggcacggcagccccacagcgcccatctgccttggctccccagagttcaccgaccagggccggagcaggagcatgctagaggtgccccgctccatctctgtgcctccatctccctcggacatccctcccccaggacccccaagggtcttcccaccccggcggccacacacaccagcagagcgagtcacagtgaagccaccggaccagaggaggagtgtggacatctcgctgggggattctccaaggagggcacggggccacgctgtcaagaactcatctcatgtggaccgacgttccatgccctccatgggttacatgacccacaccgtcagcgctcccagtttacatggaaaatcggctgatgatacctacctccagctgaagaaagacctggagtacctggatctaaagatgacaggccgggaccttctcaaggatcgaagtctgaagcctgtgaagatcgctgagagcgacactgacgtcaaactgagcatcttctgtgaacaagacagggtcctccaggacttggaagacaagatacgagcccttaaagagaacaaagaccagctagaatctgtgctggaggtgttgcacagacagatggagcagtaccgagaccagccccagcacttggagaagattgcctaccagcagaagttgctgcaggaggaccttgtccatatccgagctgagctctccagagagtccactgagatggaaaatgcttggaacgaatacctgaagttggagaatgatgtggaacagctgaagcagaccctgcaggagcaacacagaagagccttttttttccaggagaaatcgcagatacagaaagatctatggagaattgaagatgtcactgcaggcctgagtgcaaataaagagaacttcagaattctagtggagtcagtaaaaaatccggagagaaaaacggtgcctttgtttcctcacccgcctgtgccttcactctcaacttctgagagcaagccgcccccacagcccagtcctcccaccagccctgtgcggacccctctggaggttcgactcttcccccagctgcaaacctacgtgccgtaccgacctcacccaccccagctgaggaaagtgacatccccccttcagtcaccaactaaggcgaagcccaaagttactgtcagaactggaagagccctggaagatgatctaacccaactctcccattttgcagttgggaaaactgaggcccaccaagaagaagtgagcgtgctgagtagggtggagtttgtgatctgcagagaggtgtgtggctgtggacgaagctgtccccatgcaaacctttgtgcaaatccgcagggggctctcctgcagttacacagcctgtgggcaatttttgccaacaaaggcttggaggagacttacctgggcattgtgtgtgcctggacctctgatgaggtcagtgcacagtgctgggtaaaacacatgagttctgctgccctggtcttcaccatctacctgcttccagccatagtccagggcccagagctggacccaggatatggcccagcacccagccagagagtcactgtggatttcagcatcttgagatctccttcccaatcccagatccaagaggtggactggagctctagccctaaaacaggagagggaaaattccaaaacaaacagcaggaatgtctggggcagatggctgccaacatagggcagaatgctgccagctgggacagggcactctgtccttgttcaggtccccaccttgctgaaggcgccagagctcgtgtagggccaatgagccggctcaggctgagcactgctgagtgggtagatgttactctccagcaggaagatgaagcacctcccaggcccccactccccgaactctacagcccagaggaccagcccccggctgtgccgcctctgccaagagaggccaccatcatccggcacacatctgtgcggggcctcaagcggcagtcagacgagaggaagcgagaccgggagctggggcagtgtgtgaatggggattccagggtggagctgcggtcgtatgtcagtgagcctgagctggcgaccctcagcggggacatggcccagccctccctaggacttgtgggccctgagagcaggtaccagacgctgccaggcagagggctctcagggtccacgtcaaggctccagcagtcgtccaccattgctccctacgtcacactccggaggggtctcaatgccgaaagcagcaaggcgaccttccctagacctaagagtgccttggagcgcctgtactcaggggatcaccagcgaggcaagatgagtgcagaggagcagctggagcgcatgaagcgacaccagaaggccctggtccgagagcgcaagaggacactgggccaaggggagaggacgggcctgccctcatctcgctacctcagccggccgctccctggagatcttggctcagtatgttaggaggggccaggcagcggggcagggacagggagccgagtgcccctcagagtcccccaaacacaagcacatcacacctcccagtgagagagctgtccattgacctacatggttcagagaacaccccacggggctgtttgtccacgacccaggctggacgaatgcctggtcagagggtgacctgaaccagagctggagtgaggatcaaacaggcccaggagcctgaggaaatacccagtcagtcctcccagccgcgatggagaggggcctttgcaggcgttcggaatctcggctgaattcaggacctgggaatacagggttcagagaggagaggaggaagatggtgacatgatttggttagaagcacaagcaaactgatcagcctcccagacctgccagcagatgctgtgtgagggtgatggagcacggggtcacacccctgccccaagggccactggtctccctgggcttgcagtgcagaggcctcagggtgtctgggattgctggggaggcctgtgctgccccctggtggcgcttcctggcgctgcgccctgtccacagtcaccttaggtccctttggaaacattccatttgacttttccctgttgtttgaaatcccatgtttccctaaacctctagcctgattgttctttccctaattcattgcacaagctcctttgcttttagtgttaccgctcattgcctctctaatcctgcctgattgtgtttacagaagcttctgatttgcattgaacatgctctaactggcctgtgctacttattaccgggcttgtaatagcggttcttgtctccatagcctgttgagtgttcccagatgtgactcacctttctgctgccctcttcatgcaggcctactgactcataattcacttgtcccaaaagccaccccacaagcctgagccaacctgctgcctgacgccacagtcattggcagaggtctgggcattattaatttataaaaatccatgctttacacctggacagtagacagggacttcagagattgcacgtttgaatacattctcccaagactgaggttgttcggttttaattcctgtagtccaatcacacaatttcttatggaaaaccttttgtgtttctggtatttaataacttgaagggatagcaaaatatactgtgtattcagagggcctctctgcagctgctagctcagacaccaaaggggtaaggcccaggacattcatatctttaaaagctgcaaacctggtaacctttaaacttttaaaacaaatgtcatatggggtaacactgaccttttataatttgatgtctcaaatgtagagattatctaaaaatcgtaacttgaataccttgtaatttttctcttaaaaaagaagacttgtgtaagtctctgcatcaacgccaataaacatgttgcttaataataatggattggcgtggttcttccccaggataccttatagagtctagtgaacttttcctgtttgtggaaacaatcaggctgggtttaaatgaggacttgtctctatttggagcatttgtgagcgtgtaaggaaatgagtgttttctttgtgaatcattaaattgattttttcatctttgg

SEQ ID NO: 459685 - DNA, 378 bp, Homo sapiens
gttgcagtgagccgagatcatgctcttgactccagcttgggcaacaagagcgaaactccgtctcaaaaaaaaaaataaataaataaaaagaatgggtagagctttgcctgtgtgtgggttgggggaggatggacattacaaggggaggaaacaacttggctgaagttctggaagcagtgggacagatgagcccagggaaactgcccagaaggttgttctgatgcatttttccattcaaagacagccgagaagaagcggtcctcgggagcatccccttgcccagctacgtgatctctcctgtggcccctgaggatcgcataagccgcaaatattcctttaaggtactgcccctgcacctctaatgcagccattctgtct

SEQ ID NO: 459686 - DNA, 479 bp, Homo sapiens
actccttccattcacacgaattctcatccatcttctctctttctctttagccataaccagcagaccacagcattcaggcatcctgtgacgggacagttttctccagaaaatagtgaattcattcttcaagaagagtaagtctttttatgtattctccttatctgggcagagtatgggagactaaaggcatttgctgaaaacaaaacttactggactgttttctctgagacagaggggcttggggtgagtgggttggttgattcaaacaggaatatgagaagaattttatttttcaaccttcacacttctttcagtggcaagatatggaagaggagagttgatacagggatgtgctatgatgggtattgtcagagcctctttaaagttccctttcccctgaatgaaccctttctcctgctatatcttctggcacattagccctgtttgaagaggacccactcatctgggtgaaaatatag

SEQ ID NO: 459687 - DNA, 5213 bp, Homo sapiens
ggcttcacggaggagggcgccagctacttcatcgagccgaatccacatatgtcgaagcaagacagaaaccaaagaccgtccagcatggtcagtgaaacatccacggctgggaccgcctccaccctggaggccaagcctggacccaagatcataaagtccagcagtaaagtccacagctttgggaagagagaccaggccattcggaggaaccccaatgttcccgtggtggtgaggggctggctgcacaagcaggacagttctgggatgaggctgtggaaaaggaggtggtttgtgcttgctgattactgcttattttactataaagacagccgagaagaagcggtcctcgggagcatccccttgcccagctacgtgatctctcctgtggcccctgaggatcgcataagccgcaaatattcctttaagggatatggagaaggtggagcggcaggctgtcccccaggccaaccacacagagtcctgtcatgaatgtggccgggtgggacccggacatacgagagattgtcctcatcgtggccatgatgacattgtcaacttcgagaggcaggagcaggagggagagcagtaccgttcccagagggacccactggagggcaagcgggaccggagcaaggccaggtctccgtactcgccagccgaggaggatgccttgtttatggatttacccactggcccaagaggccagcaggcacagccccaacgggcagagaagaatggaatgctgcctgcctcatatggcccaggagaacagaatgggactggtgggtaccagcgggcctttcctcccaggaccaaccctgaaaaacacagccaaaggaagagcaatctggcccaggtggagcactgggcaagggcccagaaaggggatagcaggagtcttcccttggaccagacgcttcctcgccagggtcctggccaatccctgtccttcccagaaaactaccagactcttcccaagagcacccgacacccctcggggggctcctcgccacctccccgaaacctgccaagtgactacaagtatgcgcaggaccgagccagccacctgaagatgtcgagtgaagagcgccgggcgcaccgggatggcaccgtgtggcagctctacgagtggcagcagcgccagcagttccggcacggcagccccacagcgcccatctgccttggctccccagagttcaccgaccagggccggagcaggagcatgctagaggtgccccgctccatctctgtgcctccatctccctcggacatccctcccccaggacccccaagggtcttcccaccccggcggccacacacaccagcagagcgagtcacagtgaagccaccggaccagaggaggagtgtggacatctcgctgggggattctccaaggagggcacggggccacgctgtcaagaactcatctcatgtggaccgacgttccatgccctccatgggttacatgacccacaccgtcagcgctcccagtttacatggaaaatcggctgatgatacctacctccagctgaagaaagacctggagtacctggatctaaagatgacaggccgggaccttctcaaggatcgaagtctgaagcctgtgaagatcgctgagagcgacactgacgtcaaactgagcatcttctgtgaacaagacagggtcctccaggacttggaagacaagatacgagcccttaaagagaacaaagaccagctagaatctgtgctggaggtgttgcacagacagatggagcagtaccgagaccagccccagcacttggagaagattgcctaccagcagaagttgctgcaggaggaccttgtccatatccgagctgagctctccagagagtccactgagatggaaaatgcttggaacgaatacctgaagttggagaatgatgtggaacagctgaagcagaccctgcaggagcaacacagaagagccttttttttccaggagaaatcgcagatacagaaagatctatggagaattgaagatgtcactgcaggcctgagtgcaaataaagagaacttcagaattctagtggagtcagtaaaaaatccggagagaaaaacggtgcctttgtttcctcacccgcctgtgccttcactctcaacttctgagagcaagccgcccccacagcccagtcctcccaccagccctgtgcggacccctctggaggttcgactcttcccccagctgcaaacctacgtgccgtaccgacctcacccaccccagctgaggaaagtgacatccccccttcagtcaccaactaaggcgaagcccaaagttactgtcagaactggaagagccctggaagatgatctaacccaactctcccattttgcagttgggaaaactgaggcccaccaagaagaagtgagcgtgctgagtagggtggagtttgtgatctgcagagaggtgtgtggctgtggacgaagctgtccccatgcaaacctttgtgcaaatccgcagggggctctcctgcagttacacagcctgtgggcaatttttgccaacaaaggcttggaggagacttacctgggcattgtgtgtgcctggacctctgatgaggtcagtgcacagtgctgggtaaaacacatgagttctgctgccctggtcttcaccatctacctgcttccagccatagtccagggcccagagctggacccaggatatggcccagcacccagccagagagtcactgtggatttcagcatcttgagatctccttcccaatcccagatccaagaggtggactggagctctagccctaaaacaggagagggaaaattccaaaacaaacagcaggaatgtctggggcagatggctgccaacatagggcagaatgctgccagctgggacagggcactctgtccttgttcaggtccccaccttgctgaaggcgccagagctcgtgtagggccaatgagccggctcaggctgagcactgctgagtgggtagatgttactctccagcaggaagatgaagcacctcccaggcccccactccccgaactctacagcccagaggaccagcccccggctgtgccgcctctgccaagagaggccaccatcatccggcacacatctgtgcggggcctcaagcggcagtcagacgagaggaagcgagaccgggagctggggcagtgtgtgaatggggattccagggtggagctgcggtcgtatgtcagtgagcctgagctggcgaccctcagcggggacatggcccagccctccctaggacttgtgggccctgagagcaggtaccagacgctgccaggcagagggctctcagggtccacgtcaaggctccagcagtcgtccaccattgctccctacgtcacactccggaggggtctcaatgccgaaagcagcaaggcgaccttccctagacctaagagtgccttggagcgcctgtactcaggggatcaccagcgaggcaagatgagtgcagaggagcagctggagcgcatgaagcgacaccagaaggccctggtccgagagcgcaagaggacactgggccaaggggagaggacgggcctgccctcatctcgctacctcagccggccgctccctggagatcttggctcagtatgttaggaggggccaggcagcggggcagggacagggagccgagtgcccctcagagtcccccaaacacaagcacatcacacctcccagtgagagagctgtccattgacctacatggttcagagaacaccccacggggctgtttgtccacgacccaggctggacgaatgcctggtcagagggtgacctgaaccagagctggagtgaggatcaaacaggcccaggagcctgaggaaatacccagtcagtcctcccagccgcgatggagaggggcctttgcaggcgttcggaatctcggctgaattcaggacctgggaatacagggttcagagaggagaggaggaagatggtgacatgatttggttagaagcacaagcaaactgatcagcctcccagacctgccagcagatgctgtgtgagggtgatggagcacggggtcacacccctgccccaagggccactggtctccctgggcttgcagtgcagaggcctcagggtgtctgggattgctggggaggcctgtgctgccccctggtggcgcttcctggcgctgcgccctgtccacagtcaccttaggtccctttggaaacattccatttgacttttccctgttgtttgaaatcccatgtttccctaaacctctagcctgattgttctttccctaattcattgcacaagctcctttgcttttagtgttaccgctcattgcctctctaatcctgcctgattgtgtttacagaagcttctgatttgcattgaacatgctctaactggcctgtgctacttattaccgggcttgtaatagcggttcttgtctccatagcctgttgagtgttcccagatgtgactcacctttctgctgccctcttcatgcaggcctactgactcataattcacttgtcccaaaagccaccccacaagcctgagccaacctgctgcctgacgccacagtcattggcagaggtctgggcattattaatttataaaaatccatgctttacacctggacagtagacagggacttcagagattgcacgtttgaatacattctcccaagactgaggttgttcggttttaattcctgtagtccaatcacacaatttcttatggaaaaccttttgtgtttctggtatttaataacttgaagggatagcaaaatatactgtgtattcagagggcctctctgcagctgctagctcagacaccaaaggggtaaggcccaggacattcatatctttaaaagctgcaaacctggtaacctttaaacttttaaaacaaatgtcatatggggtaacactgaccttttataatttgatgtctcaaatgtagagattatctaaaaatcgtaacttgaataccttgtaatttttctcttaaaaaagaagacttgtgtaagtctctgcatcaacgccaataaacatgttgcttaataataatggattggcgtggttcttccccaggataccttatagagtctagtgaacttttcctgtttgtggaaacaatcaggctgggtttaaatgaggacttgtctctatttggagcatttgtgagcgtgtaaggaaatgagtgttttctttgtgaatcattaaattgattttttcatctttgg

SEQ ID NO: 459688 - DNA, 307 bp, Homo sapiens
ggcttcacggaggagggcgccagctacttcatcgagccgaatccacatatgtcgaagcaagacagaaaccaaagaccgtccagcatggtcagtgaaacatccacggctgggaccgcctccaccctggaggccaagcctggacccaagatcataaagtccagcagtaaagtccacagctttgggaagagagaccaggccattcggaggaaccccaatgttcccgtggtggtgaggggctggctgcacaagcaggtgaggaagccgaggagtgagaatcctggaggaaatggctctggctgagttttct

SEQ ID NO: 459689 - DNA, 651 bp, Homo sapiens
cttttcttgtacagcttaaattttcggatcccaataatgtacctatggtgaacaagttgttgcaactggagctcaatgatgaatttataggaaattatactacggacgagaatggcgaagctcaattttccattgacacttcagacatatttgatccagagttcaacctaaaagccacatatgttcgacctaagagctgctatcttcccagctggttgacgcctcagtacttggatgctcacttcttagtctcacgcttttactcccgaacgaacagcttcctgaagattgttccagaaccaaagcagcttgaatgtaatcaccagaaggttgttactgtgcattactccctaaacagtgaagcatatgaggatgattccaatgtaaagttcttctatttgatgatggtaaaaggagctatcttactcagtggacaaaaggaaatcagaaacaaaggtatacataatgtattcattttaaaatatgtgctctaacttcattttttcttgttaaggatatatagacattatatatatggggattatatatattaagaaaatatatttatatatagtcaaacatatatgtgtgtgtgtatatatatatgtgtgtatatatgtatgtgtatatatatatagtgaaaagaagaac

SEQ ID NO: 459690 - DNA, 1904 bp, Homo sapiens
gcagggggcgcgtggtcaagagccgccctcgacctggcctggtcggtcctggcccggcgtaggtgacgatggcggggaccgcgaggcgccggacacccgaggccacgagcagcgtcgcccctcgctttttcgcgcccctccagccctgcagtccttcctctaagtccgtctgcccctcaccgattgaaagtggccccgagaatattggatgacctactgatgtgttgacagagtgatctggtgtcaggactgtaaaatacgcctatgaaaactgggggagaggaataaaacaagctggcagaacgtttttcatcgttgaagctgcgtgatgcgagcatatgtgctcatcatacagtctctttacttgtgtatctgaaattttccataataaaaagtttaaagaagtgaaccagcgattgcctctagggaggacaagtcttgctctgtcgcccaggctggaatgtagtggaggttgcagtgagccaagatcacaccattgcactccagtctgggcaacaagagcaaaactttttctcaaaaatactaataagttatgttcaactcttctatatctttaataatttcttttgtctgcttgacctataatggcaaaacatgcatgaaaacctcccactataagagtaatctttttcatttctccctgtagttctatttttctttctgcattttgaggctattttattgggcacatactgtacaagttagaattgctatctcttcctggtagaattgaaagcttttaaagtaatatgggagataaattgcaaaaattgcctgaattttccactcactcctccctgtagccacaccttttgcaatgtgacttggcagctcctcccagaatctcagctggattttaactcaccttggcctaaagaaaatgacagaagtgataaagtcctcagcctgagccttaagaaaccttaaacgcttccacattctctttgggatccctgcttctgccatgagaacagggctgggctaaatcaagacggtgcctgatgccctacctagcccctctccagcacacaggagccccgggcccttggcaatcatgtctgcgcagcttggaccccatatccaaaaggggagcacgccccaatttactctcaccccaccagggacacccgaccccgcgtggtccgggctacccaaggacgtcccgaggcgtggcggagactttggcggctgagtgcaggccgggctgcggcccagcgggacctgggcgaggcctgcgacctgggcggggccagggttgggctctgccagagctgcgccgcagccgccctgcccgggcctccccgcccccacctgtgacctggattccgcggttcctgcgcgggggtggagggcgtaaaggacacgcgcaaataaaggtctgtggcccaggaaaacttcaagtcctgaaatcggtgcaccaaggatactttaaggcgaggggtcggggctgtgtaatcatttacccggttcgtccgtgtacaccggcctctctagcttacaccaacacatgtttactggggcttagcaaccgcagccatggcagccccaacgacgtgaacatccgcacctctgagcctccccctgagaagtaccttcgaggtgaggcctgcgcagccccaggaagagggtgtgggcgcaaacctgaggtggggagcaaggcccgccggctacacggttcctgccatcctcgctgcgccctttctcccatgctcgcggcctccatccggcagaaactggcacagcaaacccgacagccacagacctgtggccccttccttccctcctcgcctcctcggcaacccttgaaagcactcgagtacgaagttataattgcaattataattagctgagtccaacttgggcttccccaggtcttggcttcc

SEQ ID NO: 459691 - DNA, 1983 bp, Homo sapiens
gcagggggcgcgtggtcaagagccgccctcgacctggcctggtcggtcctggcccggcgtaggtgacgatggcggggaccgcgaggcgccggacacccgaggccacgagcagcgtcgcccctcgctttttcgcgcccctccagccctgcagtccttcctctaagtccgtctgcccctcaccgattgaaagtggccccgagaatattggatggtattgagcaattatcattaactttgttgggtgtggtaacggtaatgtggttatggttttttgtttttttttttttaagacctactgatgtgttgacagagtgatctggtgtcaggactgtaaaatacgcctatgaaaactgggggagaggaataaaacaagctggcagaacgtttttcatcgttgaagctgcgtgatgcgagcatatgtgctcatcatacagtctctttacttgtgtatctgaaattttccataataaaaagtttaaagaagtgaaccagcgattgcctctagggaggacaagtcttgctctgtcgcccaggctggaatgtagtggaggttgcagtgagccaagatcacaccattgcactccagtctgggcaacaagagcaaaactttttctcaaaaatactaataagttatgttcaactcttctatatctttaataatttcttttgtctgcttgacctataatggcaaaacatgcatgaaaacctcccactataagagtaatctttttcatttctccctgtagttctatttttctttctgcattttgaggctattttattgggcacatactgtacaagttagaattgctatctcttcctggtagaattgaaagcttttaaagtaatatgggagataaattgcaaaaattgcctgaattttccactcactcctccctgtagccacaccttttgcaatgtgacttggcagctcctcccagaatctcagctggattttaactcaccttggcctaaagaaaatgacagaagtgataaagtcctcagcctgagccttaagaaaccttaaacgcttccacattctctttgggatccctgcttctgccatgagaacagggctgggctaaatcaagacggtgcctgatgccctacctagcccctctccagcacacaggagccccgggcccttggcaatcatgtctgcgcagcttggaccccatatccaaaaggggagcacgccccaatttactctcaccccaccagggacacccgaccccgcgtggtccgggctacccaaggacgtcccgaggcgtggcggagactttggcggctgagtgcaggccgggctgcggcccagcgggacctgggcgaggcctgcgacctgggcggggccagggttgggctctgccagagctgcgccgcagccgccctgcccgggcctccccgcccccacctgtgacctggattccgcggttcctgcgcgggggtggagggcgtaaaggacacgcgcaaataaaggtctgtggcccaggaaaacttcaagtcctgaaatcggtgcaccaaggatactttaaggcgaggggtcggggctgtgtaatcatttacccggttcgtccgtgtacaccggcctctctagcttacaccaacacatgtttactggggcttagcaaccgcagccatggcagccccaacgacgtgaacatccgcacctctgagcctccccctgagaagtaccttcgaggtgaggcctgcgcagccccaggaagagggtgtgggcgcaaacctgaggtggggagcaaggcccgccggctacacggttcctgccatcctcgctgcgccctttctcccatgctcgcggcctccatccggcagaaactggcacagcaaacccgacagccacagacctgtggccccttccttccctcctcgcctcctcggcaacccttgaaagcactcgagtacgaagttataattgcaattataattagctgagtccaacttgggcttccccaggtcttggcttcc

SEQ ID NO: 459692 - DNA, 1262 bp, Homo sapiens
ctagggatcatcaacttacaatgaatgatgctaaaattactgaaaccaaatctgcctcgcgcagtgtctgggattcatagaaccctcttccccccgctcctgaatcagactgggcaggctccaaagcagtggagtctggcgctactcccaccgccacctcgtggatctcagaaaggctccaaacaccgcaccctcagctggccctgcttggggctggcattgggggacagcgtgttccgggcgcctcttctcctctgtgctagggccttcgcctttgctggctgcccactcatagatgtcagagccgcaggaaggctccgcagaagccctgtgcgggccctgcctggggctggctttggtgcacatgcgacaggccagcgtggtattcaaaaattatatattcattttatgtttttgaaaataacacacatattcaaactagcacgtgtaatagagaaatttcctaaaatttgtacactgagtaaaccatatttttctaatgatttcgttgatagagcagctttctagatgcagccctgttcacatgtgactggtatttaccttctttcatcaaacatgtctttagaatcgactcaaggcaagatgcagtagagaaatgtaagagccaactagaggagccatttaactactaggtgcatcttctccagcaagttcttcagcatcctttccagaagcattcgacagccaaggaagcaggctacgcctcacctactccttcctgggctaaagatctcagacttagttgcttaatttgggaaaaataaattaaagaagtcttctatcattatacgcaacatagaataatctgtttaagaaattatttttgatcctccacattttgatgccaatcccacatttggtaataatgattatatatgcaaatatttttagccgattaaattggaacatattctttgaaacaacttcatgatgatttttgttctaatcatttcatgtttgttgaccacttccctcttttgattgttcatttttgtaaaatgtcacatgctagcttcttatgaagttttaaattttgttaacaagcagtggtgttgaatttcatcaaaagcctttttgatatttattgaaataattatttgatttttctcctatgagtttttccaataaaaaatgatactgattgaacaataggttaaaattaaagtttcatcaaagaccgccagaatataatagctctgaaagtccaaatcaccatacgtaggttttcatagcaaatatcc

SEQ ID NO: 459693 - DNA, 861 bp, Homo sapiens
actatattaaaattactgtaacccaatgtgcttcatgcactatctggcatccaaaggatcctctttcgcccatgttggggttttcgaaactggaaagaagactgatttctgcagagcagctttctagatgcagccctgttcacatgtgactggtatttaccttctttcatcaaacatgtctttagaatcgactcaaggcaagatgcagtagagaaatgtaagagccaactagaggagccatttaactactaggtgcatcttctccagcaagttcttcagcatcctttccagaagcattcgacagccaaggaagcaggctacgcctcacctactccttcctgggctaaagatctcagacttagttgcttaatttgggaaaaataaattaaagaagtcttctatcattatacgcaacatagaataatctgtttaagaaattatttttgatcctccacattttgatgccaatcccacatttggtaataatgattatatatgcaaatatttttagccgattaaattggaacatattctttgaaacaacttcatgatgatttttgttctaatcatttcatgtttgttgaccacttccctcttttgattgttcatttttgtaaaatgtcacatgctagcttcttatgaagttttaaattttgttaacaagcagtggtgttgaatttcatcaaaagcctttttgatatttattgaaataattatttgatttttctcctatgagtttttccaataaaaaatgatactgattgaacaataggttaaaattaaagtttcatcaaagaccgccagaatataatagctctgaaagtccaaatcaccatacgtaggttttcatagcaaatatcc

SEQ ID NO: 459694 - DNA, 2066 bp, Homo sapiens
gggaaggacatcctgacaggaaagggggcaaaaatgggatacagaggatgctgggtaacttttaaatccagcagttatgaggatttgggaaagattccctgggtagtggtaatgtcgcatgaattcccttacatctggaggcatttcagaggagatgggaacctgggaaggaccaggttaattcagaattggtggactagaagaaaagtacgacaagaacatggacctgaaaggaaaataagtttcccacaatgggaaaaggactataaccttcagccgatgaatgcctatggactcttcgatgaatacttagaaatgattcttcagtttggattcacaactatctttgtggcagcttttcccctagcaccacttctggccttactgaataacataattgaaattcgacttgatgcttacaaatttgtcacacagtggaggagacctttagcttcaagggccaaagacataggaatttggtatggaattcttgaaggcattggaattctctctgttatcacaaatgcatttgtcatagcgataacatctgactttatccctcgcttggtgtatgcttataagtatggaccttgtgcaggccaaggagaagctgggcaaaagtgcatggttggctatgtgaatgccagcttgtctgtatttcgaatttctgactttgagaaccgatctgagcctgaatctgatggcagtgagttctcggggactcctcttaagtactgcagataccgggactaccgtgacccgcctcattcactggtgccctatggctacacactgcagttttggcatgtcctagctgctcgattagcttttatcattgtctttgagcacctcgtgttttgtataaagcacctcatttcatatctgatcccagacctcccaaaagacctaagggatcgaatgagaagagagaagtacttgattcaggagatgatgtatgaagcagaactggaacgtctccagaaggaacgaaaggagaggaagaagaatggaaaagcacaccacaacgagtggccgtgaccataaaatagtccctttccaggccaaggacctgaattctgtttacttcttctggctgtgcaaaagcacactcaagtgaatgactaaaaatgcaaccacagtgcatgttgcagataccggcggccgcaggaggggcagcatccagtagaggactggcgttggagtcacactgctgtgaaatcacgttgcagtccagcgcacaattgctatctatccatagaccattcttgaccaagcaagcatgcacattatgggcagttacattctcaagtttttaaaatcaaggggaacttgtatactgggcctgtttttcagcctgtttgctaccttttttgcattctatcccatgtgaattttacagacactgggctaaaaagggtattcagacacatggacacacattcctagaatgtcatcatatggtcctaattccatgtcaccaacaacacagacaagaccctgtttacaactttttctttccttttttttaattttagacctttctgagaagattattatatatgacatatctatagctatgtgtatggccatagatgtatttctgtgtgtacatatgtatagtcatgtattcctgcatatgtacatacaaatacagagatatataaagtacatagaaattccttacttgtaaatagccaaaaagtactgacatgagtgaattttcacatttaaatagtcatcaatatgaagccatgattaatgcttgtataatgtgatgcaataaaatttaaaataaatttctgcacatggaatattttcagctggctcttctgacattctgttgtatttttgtctcatagaataagagaaatcacagaataagtaagtggaatctttaatgtgaggagaatatctgagggactgtgcaagaaatcagatgtttgtttattgcataaatgcatgcaaaaacaaacaatatagccaaatatcagcgtatgtttctgatgaacttttttccccagtcttgatggtggaatattttaaatataagccaaaatgaatatgcc

SEQ ID NO: 459695 - DNA, 696 bp, Homo sapiens
agccttcgggacttggggttgcaatgaatcttaggttttttccaggagtcttttattcctccagcgtctccgtgcgcctgtccgctccaacacctgacattttccttcaactccaccctcccctccccgagtccacagacacacacccacccacacgcctcttcccttcccctccaccctcagtcagcggcagagtcagtccatccaataggcaggagcccaaaagactgtccacggacagctctgctccatttcctgtggtctattcttgcacagttaggtctacaagccaggttcaaggccaccaactgaggcacctgtcccgagacaggaccattctaatctgccctgaaaaggacatcccattgatcatactaaatttgtggatggatacctatctgttgaccagaccctccctcttcaatgaaaactgcctctccttccactccatctgtgaggcacccttggatgctgacatgtgcttacataggacttcctgtccacagccagaattagccagaattcactgacccatggttggactcctaaaatactcaagatgagagacatgttacttttctttactatagtaactatcaaatgcatcccataaccttatgttgtaaatgtcaaatatgcacaataaaatttatttgaaaaaataaagctggaaaattgaaagtaatgaatgttcag

SEQ ID NO: 459696 - DNA, 850 bp, Homo sapiens
  misc_feature (780)..(780): n is a, c, g, or t
  misc_feature (783)..(783): n is a, c, g, or t
agcggggggttgggtaatttttttcttctgtagatacggagtctccctgcgttgcccaggctgatctagaactcttgggctcaagcctaccgcactcctgagctcaagccgcggcctcccgaagtgctgggattacagatgtgagccactgcgcctggccagtttcatccttttatcctgtaatctgtcaccatgaccctgacaaaaggttccttcacctactccagtggggaggaatatcgtggcgagtggaaggagggccgcaggcatggttttggtcaactgatgtttgcagatggtggcacctacctgggtcattttgagaatgggctctttaatggctttggggtattgaccttctcagatggttcaaggtatgagggggagtttgcccagggcaagtttaatggcgtcggagtcttcattcgatatgacaacatgacctttgagggggaatttaaaaatggcagagtagatggttttggcctgctgactttccctgatggttctcatggaatcccccgcaatgaaggtctctttgagaacaacaagctgctgcgacgtgagaagtgttctgccattgttcagcgggcccagagcgcctccaagtcagccagaaatctcactgcctgacagcgcagtgggcaccagctgataagtattgggtaaagccagtgcccctgttgttgattcgaggtgaacaaatgaatcagagctgagatgagttgacaatgacagtggagcagaggccttgtatgtgccctgtcacctgccattccnaanggggcccgaaatgtggggatggtggcacgaccgcacagctaggggttgattcctacctttggtggga

SEQ ID NO: 459697 - DNA, 2460 bp, Homo sapiens
agcggggggttgggtaatttttttcttctgtagatacggagtctccctgcgttgcccaggctgatctagaactcttgggctcaagcctaccgcactcctgagctcaagccgcggcctcccgaagtgctgggattacagatgtgagccactgcgcctggccagtttcatccttttatcctgtaatctgtcaccatgaccctgacaaaaggttccttcacctactccagtggggaggaatatcgtggcgagtggaaggagggccgcaggcatggttttggtcaactgatgtttgcagatggtggcacctacctgggtcattttgagaatgggctctttaatggctttggggtattgaccttctcagatggttcaaggtatgagggggagtttgcccagggcaagtttaatggcgtcggagtcttcattcgatatgacaacatgacctttgagggggaatttaaaaatggcagagtagatggttttggcctgctgactttccctgatggttctcatggaatcccccgcaatgaaggtctctttgagaacaacaagctgctgcgacgtgagaagtgttctgccattgttcagcgggcccagagcgcctccaagtcagccagaaatctcactgcctgacagcgcagtgggcaccagctgataagtattgggtaaagccagtgcccctgttgttgattcgaggtgaacaaatgaatcagagctgagatgagttgacaatgacagtggagcagaggccttgtatgtgccctgtcacctgccattccagaactggaccacagaaaagtgctgaggatgctggccagcagaccctgcagcagtcattggtggttctgtctttccctaacccttatgtgctggaggacagaggagccacctcttctcactggttgatactctgttcctaagacctcaggttacccagtgtagcctgctgtgacccttctgcttcattttctgccaagtgatacagaaccttcgttctgctgctttggggacaggtgatcctagccccagcttagggccagtgctctgtgccactctggagaaatagggaaaagataggggtggctcagtacagcagccctgtgaaagtcaaggccagagcttttcttttttaatttttttattattattattattattttattttttatttttgagatggagttttactctcgcccaggctagagtgcagtggcatgatctcagctcactgcaacttctgcctcccaggttcaagcaattcccctgcctcagcttcctgagtagctgggactacaggagcgcgccaccacacccagctaatttttgtatttttttttagtagagacggggtttcaccatattggccaggctggtctcaaactcctgacctcgtgatccacccgccttggtctcccaaagtgctgggattacaggcgtgagccaccacgctcagcctttaattttattattataaaaaattgagccagggtcttgctatgtggctcaggctcatctcaaaatcctgggctcaagtgatcctcctgcctgggcctgccaaagtgctaggattgcaggtgtgagccactgtgcctggctggcagagcttttccatatgttactcctcatgctggttggaatcatggctgcaggcttccacttggtctgatcagactggtattcattcctgcctatgtccccgtgaaggattcggtaagagtgctatttcctcctccctttagaagacaggctgtcttctttcatcaacttagagcagataatccccatgtgtgcctctctccttccttagatggggaacaggatccctttttgggacaatcaagaaaaaaactcatgtaaacagtaatcttattacttgtatttgtgactaactccagggaaaagggtagaatatttaggccacttcaggcactaccatggagtgaactgaattcatacggatggcttgggctgacacagtttcttcccagtggaccaataaatcagactcacccgaacccctggggttttggtagaattggacctactctaggactgtggggaactaaaggagcatttggctcactgtagctcttctatcatgagccttgaccgtcaggccgcaatcagaccttactgatgggatctctgcagtttattacgtaggcctcccgttaccctggtacccaaatacgtcccccacctctagctccctagcctcacattgaatgtctcttcaacagcagattgtggtggaagttatagccgtgtgcctctatttattctctgaattgtactgtagaaaaaggtgtttataaagaataaagaaatcaccagaactgcctatacctagttttcctgactttctggccctgcgtcttcatgaatatcaacccatttgctgtttgtaaaagttaatcgggttagcccttggaactgaccctgcacactttatcaagtcat

SEQ ID NO: 459698 - DNA, 848 bp, Homo sapiens
atctagacctcaataatcaactgatgcctggctcttgtggcccaggcgcgttacaatttacaaagctgcctctctgaagctggatttaggatctgccttaaactccgcggcggggcccttgacagcagtggggactggagcaagatcagagccgctcgcgttgatggtcactgttgcttcgggcgcaggtttggttttctttggggttgccatttcaactagacggcctctgggtaggccagatctggatcctctgtctttatctgcgttgcagaggtgggaccacccctctttcacatagtcagcccgggttcgcaaacactcggccccgcacaaagatggcgtggagccgggctgggccaatgcggagtggcgttgctcccggttgcctaggtaacagccaatgggcagcgggaattgtacccagtgcggtcgcccaggatggcggcgtcaagtggggcaatcgctggtggaggtggcggagagcaaggtggcagccgggagcccatcagaggaaaagtccgaggcgctggaaccctgcgtccaggcgtgacggtcatcccgaaaggccggccccagtttcatccttttatcctgtaatctgtcaccatgaccctgacaaaaggttccttcacctactccagtggggaggaatatcgtggcgagtggaaggagggtgagaaggacccctggggagtatccatgatgaacacttcatttgctggaggacaaatacatcaggatatatagccaactttatggatcttcattttcaactccaggatttaattccatatagtgcctgccattcctttattccattttaggattaaataaaggaatttgaa

SEQ ID NO: 459699 - DNA, 2877 bp, Homo sapiens
atctagacctcaataatcaactgatgcctggctcttgtggcccaggcgcgttacaatttacaaagctgcctctctgaagctggatttaggatctgccttaaactccgcggcggggcccttgacagcagtggggactggagcaagatcagagccgctcgcgttgatggtcactgttgcttcgggcgcaggtttggttttctttggggttgccatttcaactagacggcctctgggtaggccagatctggatcctctgtctttatctgcgttgcagaggtgggaccacccctctttcacatagtcagcccgggttcgcaaacactcggccccgcacaaagatggcgtggagccgggctgggccaatgcggagtggcgttgctcccggttgcctaggtaacagccaatgggcagcgggaattgtacccagtgcggtcgcccaggatggcggcgtcaagtggggcaatcgctggtggaggtggcggagagcaaggtggcagccgggagcccatcagaggaaaagtccgaggcgctggaaccctgcgtccaggcgtgacggtcatcccgaaaggccggccccagtttcatccttttatcctgtaatctgtcaccatgaccctgacaaaaggttccttcacctactccagtggggaggaatatcgtggcgagtggaaggagggccgcaggcatggttttggtcaactgatgtttgcagatggtggcacctacctgggtcattttgagaatgggctctttaatggctttggggtattgaccttctcagatggttcaaggtatgagggggagtttgcccagggcaagtttaatggcgtcggagtcttcattcgatatgacaacatgacctttgagggggaatttaaaaatggcagagtagatggttttggcctgctgactttccctgatggttctcatggaatcccccgcaatgaaggtctctttgagaacaacaagctgctgcgacgtgagaagtgttctgccattgttcagcgggcccagagcgcctccaagtcagccagaaatctcactgcctgacagcgcagtgggcaccagctgataagtattgggtaaagccagtgcccctgttgttgattcgaggtgaacaaatgaatcagagctgagatgagttgacaatgacagtggagcagaggccttgtatgtgccctgtcacctgccattccagaactggaccacagaaaagtgctgaggatgctggccagcagaccctgcagcagtcattggtggttctgtctttccctaacccttatgtgctggaggacagaggagccacctcttctcactggttgatactctgttcctaagacctcaggttacccagtgtagcctgctgtgacccttctgcttcattttctgccaagtgatacagaaccttcgttctgctgctttggggacaggtgatcctagccccagcttagggccagtgctctgtgccactctggagaaatagggaaaagataggggtggctcagtacagcagccctgtgaaagtcaaggccagagcttttcttttttaatttttttattattattattattattttattttttatttttgagatggagttttactctcgcccaggctagagtgcagtggcatgatctcagctcactgcaacttctgcctcccaggttcaagcaattcccctgcctcagcttcctgagtagctgggactacaggagcgcgccaccacacccagctaatttttgtatttttttttagtagagacggggtttcaccatattggccaggctggtctcaaactcctgacctcgtgatccacccgccttggtctcccaaagtgctgggattacaggcgtgagccaccacgctcagcctttaattttattattataaaaaattgagccagggtcttgctatgtggctcaggctcatctcaaaatcctgggctcaagtgatcctcctgcctgggcctgccaaagtgctaggattgcaggtgtgagccactgtgcctggctggcagagcttttccatatgttactcctcatgctggttggaatcatggctgcaggcttccacttggtctgatcagactggtattcattcctgcctatgtccccgtgaaggattcggtaagagtgctatttcctcctccctttagaagacaggctgtcttctttcatcaacttagagcagataatccccatgtgtgcctctctccttccttagatggggaacaggatccctttttgggacaatcaagaaaaaaactcatgtaaacagtaatcttattacttgtatttgtgactaactccagggaaaagggtagaatatttaggccacttcaggcactaccatggagtgaactgaattcatacggatggcttgggctgacacagtttcttcccagtggaccaataaatcagactcacccgaacccctggggttttggtagaattggacctactctaggactgtggggaactaaaggagcatttggctcactgtagctcttctatcatgagccttgaccgtcaggccgcaatcagaccttactgatgggatctctgcagtttattacgtaggcctcccgttaccctggtacccaaatacgtcccccacctctagctccctagcctcacattgaatgtctcttcaacagcagattgtggtggaagttatagccgtgtgcctctatttattctctgaattgtactgtagaaaaaggtgtttataaagaataaagaaatcaccagaactgcctatacctagttttcctgactttctggccctgcgtcttcatgaatatcaacccatttgctgtttgtaaaagttaatcgggttagcccttggaactgaccctgcacactttatcaagtcat

SEQ ID NO: 459700 - DNA, 2753 bp, Homo sapiens
atctagacctcaataatcaactgatgcctggctcttgtggcccaggcgcgttacaatttacaaagctgcctctctgaagctggatttaggatctgccttaaactccgcggcggggcccttgacagcagtggggactggagcaagatcagagccgctcgcgttgatggtcactgttgcttcgggcgcaggtttggttttctttggggttgccatttcaactagacggcctctgggtaggccagatctggatcctctgtctttatctgcgttgcagaggtgggaccacccctctttcacatagtcagcccgggttcgcaaacactcggccccgcacaaagatggcgtggagccgggctgggccaatgcggagtggcgttgctcccggttgcctaggtaacagccaatgggcagcgggaattgtacccagtgcggtcgcccaggatggcggcgtcaagtggggcaatcgctggtggaggtggcggagagcaaggtggcagccgggagcccatcagaggaaaagtccgaggcgctggaaccctgcgtccaggcgtgacggtcatcccgaaaggccggccccagtttcatccttttatcctgtaatctgtcaccatgaccctgacaaaaggttccttcacctactccagtggggaggaatatcgtggcgagtggaaggagggccgcaggcatggttttggtcaactgatgtttgcagatggtggcacctacctgggtcattttgagaatgggctctttaatggctttggggtattgaccttctcagatggttcaaggtatgagggggagtttgcccagggcaagtttaatggcgtcggagtcttcattcgatatgacaacatgacctttgagggggaatttaaaaatggcagagtagatggttttggcctgctgactttccctgatggttctcatggaatcccccgcaatgaaggtctctttgagaacaacaagctgctgcgacgtgagaagtgttctgccattgttcagcgggcccagagcgcctccaagtcagccagaaatctcactgcctgacagcgcagtgggcaccagctgataagtattgggtaaagccagtgcccctgttgttgattcgaggtgaacaaatgaatcagagctgagatgagttgacaatgacagtggagcagaggccttgtatgtgccctgtcacctgccattccagaactggaccacagaaaagtgctgaggatgctggccagcagaccctgcagcagtcattggtggttctgtctttccctaacccttatgtgctggaggacagaggagccacctcttctcactggttgatactctgttcctaagacctcaggttacccagtgtagcctgctgtgacccttctgcttcattttctgccaagtgatacagaaccttcgttctgctgctttggggacaggtgatcctagccccagcttagggccagtgctctgtgccactctggagaaatagggaaaagataggggtggctcagtacagcagccctgtgaaagtcaaggccagagcttttcttttttaatttttttattattattattattattttattttttatttttgagatggagttttactctcgcccaggctagagtgcagtggcatgatctcagctcactgcaacttctgcctcccaggttcaagcaattcccctgcctcagcttcctgagtagctgggactacaggagcgcgccaccacacccagctaatttttgtatttttttttagtagagacggggtttcaccatattggccaggctggtctcaaactcctgacctcgtgatccacccgccttggtctcccaaagtgctgggattacaggcgtgagccaccacgctcagcctttaattttattattataaaaaattgagccagggtcttgctatgtggctcaggctcatctcaaaatcctgggctcaagtgatcctcctgcctgggcctgccaaagtgctaggattgcaggtgtgagccactgtgcctggctggcagagcttttccatatgttactcctcatgctggttggaatcatggctgcaggcttccacttggtctgatcagactggtattcattcctgcctatgtccccgtgaaggattcggtaagagtgctatttcctcctccctttagaagacaggctgtcttctttcatcaacttagagcagataatccccatgtgtgcctctctccttccttagatggggaacaggatccctttttgggacaatcaagaaaaaaactcatgtaaacagtaatcttattacttgtatttgtgactaactccagggaaaagggtagaatatttaggccacttcaggcactaccatggagtgaactgaattcatacggatggcttgggctgacacagtttcttcccagtggaccaataaatcagactcacccgaacccctggggttttggtagaattggacctactctaggactgtggggaactaaaggagcatttggctcactgtagctcttctatcatgagccttgaccgtcaggccgcaatcagaccttactgatgggatctctgcagtttattacgtaggcctcccgttaccctggtacccaaatacgtcccccacctctagctccctagcctcacattgaatgtctcttcaacagcagattgtggtggaagttatagccgtgtgcctctatttattctctgaattgtactgtagaatagtcgtagaagataaagcacctcggggggggtgg

SEQ ID NO: 459701 - DNA, 2780 bp, Homo sapiens
atctagacctcaataatcaactgatgcctggctcttgtggcccaggcgcgttacaatttacaaagctgcctctctgaagctggatttaggatctgccttaaactccgcggcggggcccttgacagcagtggggactggagcaagatcagagccgctcgcgttgatggtcactgttgcttcgggcgcaggtttggttttctttggggttgccatttcaactagacggcctctgggtaggccagatctggatcctctgtctttatctgcgttgcagaggtgggaccacccctctttcacatagtcagcccgggttcgcaaacactcggccccgcacaaagatggcgtggagccgggctgggccaatgcggagtggcgttgctcccggttgcctaggtaacagccaatgggcagcgggaattgtacccagtgcggtcgcccaggatggcggcgtcaagtggggcaatcgctggtggaggtggcggagagcaaggtggcagccgggagcccatcagaggaaaagtccgaggcgctggaaccctgcgtccaggcgtgacggtcatcccgaaaggccggccccaggccgcaggcatggttttggtcaactgatgtttgcagatggtggcacctacctgggtcattttgagaatgggctctttaatggctttggggtattgaccttctcagatggttcaaggtatgagggggagtttgcccagggcaagtttaatggcgtcggagtcttcattcgatatgacaacatgacctttgagggggaatttaaaaatggcagagtagatggttttggcctgctgactttccctgatggttctcatggaatcccccgcaatgaaggtctctttgagaacaacaagctgctgcgacgtgagaagtgttctgccattgttcagcgggcccagagcgcctccaagtcagccagaaatctcactgcctgacagcgcagtgggcaccagctgataagtattgggtaaagccagtgcccctgttgttgattcgaggtgaacaaatgaatcagagctgagatgagttgacaatgacagtggagcagaggccttgtatgtgccctgtcacctgccattccagaactggaccacagaaaagtgctgaggatgctggccagcagaccctgcagcagtcattggtggttctgtctttccctaacccttatgtgctggaggacagaggagccacctcttctcactggttgatactctgttcctaagacctcaggttacccagtgtagcctgctgtgacccttctgcttcattttctgccaagtgatacagaaccttcgttctgctgctttggggacaggtgatcctagccccagcttagggccagtgctctgtgccactctggagaaatagggaaaagataggggtggctcagtacagcagccctgtgaaagtcaaggccagagcttttcttttttaatttttttattattattattattattttattttttatttttgagatggagttttactctcgcccaggctagagtgcagtggcatgatctcagctcactgcaacttctgcctcccaggttcaagcaattcccctgcctcagcttcctgagtagctgggactacaggagcgcgccaccacacccagctaatttttgtatttttttttagtagagacggggtttcaccatattggccaggctggtctcaaactcctgacctcgtgatccacccgccttggtctcccaaagtgctgggattacaggcgtgagccaccacgctcagcctttaattttattattataaaaaattgagccagggtcttgctatgtggctcaggctcatctcaaaatcctgggctcaagtgatcctcctgcctgggcctgccaaagtgctaggattgcaggtgtgagccactgtgcctggctggcagagcttttccatatgttactcctcatgctggttggaatcatggctgcaggcttccacttggtctgatcagactggtattcattcctgcctatgtccccgtgaaggattcggtaagagtgctatttcctcctccctttagaagacaggctgtcttctttcatcaacttagagcagataatccccatgtgtgcctctctccttccttagatggggaacaggatccctttttgggacaatcaagaaaaaaactcatgtaaacagtaatcttattacttgtatttgtgactaactccagggaaaagggtagaatatttaggccacttcaggcactaccatggagtgaactgaattcatacggatggcttgggctgacacagtttcttcccagtggaccaataaatcagactcacccgaacccctggggttttggtagaattggacctactctaggactgtggggaactaaaggagcatttggctcactgtagctcttctatcatgagccttgaccgtcaggccgcaatcagaccttactgatgggatctctgcagtttattacgtaggcctcccgttaccctggtacccaaatacgtcccccacctctagctccctagcctcacattgaatgtctcttcaacagcagattgtggtggaagttatagccgtgtgcctctatttattctctgaattgtactgtagaaaaaggtgtttataaagaataaagaaatcaccagaactgcctatacctagttttcctgactttctggccctgcgtcttcatgaatatcaacccatttgctgtttgtaaaagttaatcgggttagcccttggaactgaccctgcacactttatcaagtcat

SEQ ID NO: 459702 - DNA, 1850 bp, Homo sapiens
aaggaaccactgcagtagacccctgacatttgtgagagctgtatcctgcaatcttgaatactaccatggcacacaatgtcctgcattagggacaatcaagcagccgtgggcgctgcgacccttctctcactgtcagaggggcgggagctctcggcctgcgccgcctccgctgcctgcttggtcgcgggcttgccgggaatggtgacagcccgggccccctcttggccaaagaagtcctcgaaagcgttcggcgcacgggctttgtccagctttttaaaccgtaacaaggaccggggccgggcgcggtggctcacgcctgtaatcccagcattttgggaagtcgaggcggacggattacttgaggtcatgagttcgagaccagcctggccaacacgatggagtcttgctcccatgctggagtgcagtggcgtgatctcggctgactgtaacctccgcctcccgggttcaagtgattctcctgcctcagcctccggagtagctgggattacagcaaagatatccagacgctgtatgcaggaagaactgaatttcagaggacaccgtttgatcttcaacacctggcagtttacaaaacagagacggggtgtcgccatgttgcccaggctggtctcgaactctggagctcaagcgatctgcctgcctcggcctttcaaagtgctgagactacagcctgaagaggagagggggaatcctggtgagaagcatttggaattcaagctcagagaagaagacacggagtcccagctgagaactcaaactggtagaaggaagattatttttccttctctataggtgcttggaggtaacgaggggaaaggagttgaaaggaaggtgacatttcaggtattgatgggacagcacgtgcgaggcctagaggactgaaagttcttgatgggatctgtcagaagaaaacagctgcgtgtacaggggagaagtgggaggggcgggtcggctagcgagctgagacggagctgcgcgtgcgtcgaagtcggggctgtgggggcggggtgggtccggggcgcgctcaccggatcgccggcgagctacggctaccacccgtcatctcttttcagctaatctgcttcgcgctacttttttgaggtgggcacctgggatggaggcaaggaatcacgaagtggcgtctcctcggaaggggcagcctgatgtctttaaccactgaactgtggtttccaactggatgcgctttgggttcagggctaagacacgcgtaggcggtgcagacagttcaattcgtgggcggctttttctctcccctgcgcggttttgcagaactgaggattcacgtttgccacgcagtctctaaatgtaaggagaacttgctttatttaacgaatgtgtattcagctgccaaagaacaagctaatcacccttcctccccacgcccgacttagcctcctcccagccctcgccggatttctgcatcggaattggattggatcacacacaaaagaagagcccaggaactcgttcaccaccttgcaccttgcctgttagttcacggcataatggtaacagagtcttcattaatggaagcaacgttactaccgtgagcccggatagctcagtcggtagagcatcagacttttaatctgagggtccagggttcaagtccctgttcgggcggtatcttttttttcctcattaaaagagtaagaaccaattttaggatcttttgtttgttaacacactgcaaaagaagggaataaagtcctggattgtgtaaactgcgaccccaaacacttctcggagggtaagccctctatggggataggcctttgtgcagagggagagaaacaggtaagtttctc

SEQ ID NO: 459703 - DNA, 1070 bp, Homo sapiens
ataggagaaaccatgcttggcttctgaatattatgactgtttccttctcatgagtgaatgaaggggcaccgatgctcgagttttatttgcttcatggaaaatctgcctctgcatttactttctattataataatttatgtactcatataattatgcctactatatttgagagcatttttacatttccagttccagatagagttctttttacgtggaagctgctcagtaaatttttatcccatcaagtggataataatgctccacttcaaaaccctcaccagttcaaacctctacaaccagtttgttgttgttgttccagcgtgcctgctcaagaaccccatggcactctcttctgcaatttcagtggtacttccactcatctccccactttctacttccctcctatccaggtcttcgctgaaacatgggcactcgtgggaagtgctttctgttccccaggctcagagacaggtctccctatggtgttgcccaggctggtcttgaactcctagcctcaagtgatcctcctgcttcagcctgccaaagtgctggattacaggtgtaagccacctctggacatcttatctgtgaaattttaggcattgatcagtgcagaaagaaccatgaactgcaggatgttctcagagactctgacattatggcccacaagaagctgcccactcagcttctagtcagttaggtgtggacttcatcaatcacagaatgaagactcagacagcctcccaggaggacacaaagtcagcctcagagaggcatggaggtgttaaagagggaagtgcctgctagaatttcagtgggttggatatgctctttaacgatgcacaaatcataggtatacattttctgacaattggaatctattattactcttgaaccagctgttccccaggctgtttcctgtaatggaagggatactttgagtttatatcttttcaatcctacatcctcagaaatctacactgatactaataaagggactcatttctcctataagaacccctatgcgagaaaagtatgtttgggtattgcctaatgcactcataataaat

SEQ ID NO: 459704 - DNA, 1253 bp, Homo sapiens
caagtcctggcccagacctaagcaaccagataagtaaaactgtggttcaaagaggccctgggaccacctgcgaagatcctgggattcatcaggggtctgaaccttggatcacacctgctccggctattctgatgtcatctccatctcctggagacagttgctgcatgagaacaaaggcagggcccagacgaggtctggagggataagcggcagggatctgggcactgagctgaggcactgggcaggcagagccattgccctcgcccctaccatgaacccctacagagatgctgctagaaccttgctttctaaggggtaggagggtctggctgcctctgcctctactcaccccatagacacacaggccttctctccatccagggagaacatagctgccaagagcagtcctgcccccacaccaggctccccagcagtgaggagctgggctgggctgtcctcacccgccctcttggcctcaccctggcccttccctggccctgcctcgggatgccaggacccatagcaggtgcctggacaggcttggggatggaaagggggctgggcacagaaggccagcttctggccaagaacagaactcatagagaaacaagttccagaatcctcttcatcctccttttccccacccactctttagttttgatgggctctgttcctaatatctgtcatccaggcaaggaaggcccatggcccaagatccctcttggaaccatggggccccaagtggcaggtatccccagcctgttgaggcgcatgggccataaatcaccttcccaagccagggggaaagcagcaatccaggagagcttcacggaggtggcaggacgggatgtaggacggaggcaaaccatagactcgcaggcggcgttaggtctccactcagaggtatgtggctggggcagctgctgggggctgcagctggtgtctgtcccagagcccaacggctgtgtgtccccacagccgccctctggatcttgctacatgtgccaccccatcaccaggtcctcgtcaccagctatcccctcagccctgagctgctcctccctcagcccttagagggaggtctgacctccttgagggaagagatgatggtgttgacaaacctctctccaaagaggagacgcaaccagaagggtgattccaggcaggtgtggatgccaggcatggagaggtctgaaatggtcaccgagttcagtgagttccaatctttttttgagcaacggaagcctggtagc

SEQ ID NO: 459705 - DNA, 1499 bp, Homo sapiens
caagtcctggcccagacctaagcaaccaggttccaccctgttccctcttacccaccctacgccagcggctaaaagctgccttggctagctcagaccctgagagctaagggatgggaagggttccggtggggacacatggccagtggctgttcttccatattcatctgtctttaatattcagatgaatggaagtacatgaccttgctagtgttttggggtaggaaaggcaagagagtcctcagaagtcatctaaatcatgcctttttatttttcagataagtaaaactgtggttcaaagaggccctgggaccacctgcgaagatcctgggattcatcaggggtctgaaccttggatcacacctgctccggctattctgatgtcatctccatctcctggagacagttgctgcatgagaacaaaggcagggcccagacgaggtctggagggataagcggcagggatctgggcactgagctgaggcactgggcaggcagagccattgccctcgcccctaccatgaacccctacagagatgctgctagaaccttgctttctaaggggtaggagggtctggctgcctctgcctctactcaccccatagacacacaggccttctctccatccagggagaacatagctgccaagagcagtcctgcccccacaccaggctccccagcagtgaggagctgggctgggctgtcctcacccgccctcttggcctcaccctggcccttccctggccctgcctcgggatgccaggacccatagcaggtgcctggacaggcttggggatggaaagggggctgggcacagaaggccagcttctggccaagaacagaactcatagagaaacaagttccagaatcctcttcatcctccttttccccacccactctttagttttgatgggctctgttcctaatatctgtcatccaggcaaggaaggcccatggcccaagatccctcttggaaccatggggccccaagtggcaggtatccccagcctgttgaggcgcatgggccataaatcaccttcccaagccagggggaaagcagcaatccaggagagcttcacggaggtggcaggacgggatgtaggacggaggcaaaccatagactcgcaggcggcgttaggtctccactcagaggtatgtggctggggcagctgctgggggctgcagctggtgtctgtcccagagcccaacggctgtgtgtccccacagccgccctctggatcttgctacatgtgccaccccatcaccaggtcctcgtcaccagctatcccctcagccctgagctgctcctccctcagcccttagagggaggtctgacctccttgagggaagagatgatggtgttgacaaacctctctccaaagaggagacgcaaccagaagggtgattccaggcaggtgtggatgccaggcatggagaggtctgaaatggtcaccgagttcagtgagttccaatctttttttgagcaacggaagcctggtagc

SEQ ID NO: 459706 - DNA, 1593 bp, Homo sapiens
gagggtgtatacgtcctgtgatattgggagtaatatcaacttctcggcctctgaatatgaggaagaatatcacagggtgggtgtatacctcgtgctctattatgcggagtcgtatctgtctattatggggagtaatatcattctctccctttcaggatattaataacaatttcacaggctgggtgaacacagccggcgatgctgaaattattatcatcctctccccctcttcccctcctggctctcagtccccgcctcacgggttatgtagcgggttatggcaagaagacaaactgcagtttcctgcacagaacagcacaaacaatgatccaagctcagttacaacacaatattggtcatcatttgaccatggacttcaatatcaacccttagaaaccttcctaaaacaggtcagcaaaacaccaagaagcaatatcctgaatgataggaaaatatccttgcttgtgcaaattgtttccacttaatttttttcaacaaatgttaattatatttttactttctaaaaatttttaataaaatatagcctacttggttaaaaatggtgtcaaagcttttctaaaagttaaggcattacataattcagtggcccctgtggctgccatggataattcttttttttctgttcatcttcaaagaagggaattcagaatcaggaaaagatctttggaaattcattagcatatggttttactccgaaactaagaccaaacacaaagagaaatgcagatttttctcatggaaataaaactgcttttttgcattttcaatttgtttccaagtaaggaaaaacatgtcattgtttctcataccccccatttctcctgttttccttcttttcatttgcttttcccagtgtatagcccacagaactagagcgaaagctttctttttggcccgtatataatttgaacagagtatcatcaggtgtctaatgtaccaccaagagtggtgcttacgacaaaaatgtcctctagacttattctatgttcgctgtgtgaatgaagatactaatggtcataaattcctggaacgggagacctcatttcattcatttctatttagaggcttcctagtagagtgcctcatacacaataactggccaataaataattgttgaggaaataaaataagattaataagataataagaatcttattaccaaagattcttcttctcagaaagggtttgttgtgatagctttactattaatatctcactcgtcatagagttacagcttctgcattaaacatattgctattaatatcaggcctacattaatcacctggttggaagaaaagcctccatgggaattcatctgttgggcaagccactgcacaatcttactagcatagatgacattatctgagaaaaaggaagaattttcacatagtctgcataaaagtcatgggttacacataaagaaggatgaaaattccattcccgacctctgtttgtgctgaattgttcccctaaaattatatgttgaagccctaacaccaagtacctcaaaatgtggctgtatttggagataagactttttaaagaggtgattaagttaaaatgaagcttatg

SEQ ID NO: 459707 - DNA, 3408 bp, Homo sapiens
caggccagatgttttgttgatctcacagataactaccatcagagtcttcaaatgggacacattccagagttgcattctaaagatggaggaatgggggctcacagccttatctaatctccaaatgaagaatgggcccatctgacatatcctatgagcacaaagcttaggggactcttcaccgaaacctagacaaatatttgaatgcattttttttttttttttttggaaagggagataacgtccaatgggtctgttttataatgcatttgtgtaaggggaacgggaggaaatgagatttaaaaataaaactgtttacttcagaggcttgggttataaaagcataggtttctctttcaggactctctgaagttggaaagatggactctgggcggctgggcagagactgtgtgcaggttcgtacagctccgggcggttacagttctggtccccggcaatgccaagcaccctgtggaaaagtggcccaggcttcaagcttcagaatcggactcctaccccttaaagctgcaagctagcagaaaaaaagagagctgcaagggagctgtgaaggggaaggggtctcctccggagggagagacgactgggatagcctgtttgggactgagtgtggggaaatgtgacaaattcagccttttcatcgtgcgccctgagccgagcagaagcggggcggtaggagatgattccgcttgctccgagtttccaagctccttgctcctttccaaattgcttgcggcaatgtaattctttccttcggggacaggcagagctccactgtttttctggtttccagggtgtgcccatgagttacccagagtgggtggagcggtggggccactctggaatagccttgcggcagacgcggctgactgccctcgaacagaactggcggatcccaagaaaccaaccacgcggcaagatttggggagcccacagcttctactcagacacccctgcagagtgtttgctcattgctaaaaacgtgcaggcgtcgtagggagtgtccccagaggccattgcctagcttgcctgcaagcccttagtgagcacctgccctgtgcgaggttccgagctccactcacgcaggtcctgccctcaggagctcactgtattgcagagacacaagaggacaccagggtggctgtctgttctgtgctgggggaggccaagggactcctcacctgcccatctctcaggagtttccaacctttccccgccagtccagtctgtgactggcaagttaccaactgcccctcttccttgaaaacagccaccttcctaggtgggtcctgggtctctgagctttcctgagatctagagagaggaggaaaaagtgtctctgtcacagctggggcttccctagctgaccctcctcccccgccacctctggagctgaggttagcaaagccgtgcctacatcagctgagctggggagtttgccggatgagcaggcctggtggggcagtgacgtttgaacatgtcaggtggacagttgtatgtcaggaggtgagaggagaggggttggctggagagagcaggttggattcaccagcacttggagcacccagagggaaggggacccgccagagagggcgaggccagaggaggccagacgagcccgagggcagtgaggtcagcccctccacccgccagcctgcagggatgcctctgggtcaaggctgcatgagcagggtcctgcttggccacttatcagcccctacagccttagaagccaagccccagcccacttcctcctgtcgacagcactggctccaggccagtagctgtagtcatggcctgttgaccaagggctacacgggccagtggcaggaagctgctggggtgggagatgaccatgatgatgatggtggtggtggtgatgatgatgatgatgatgatagtggtggtggtggtggcgattatgtccttcagagctttgatcgcactttcctcatccagggtcgggtaggaatcctgccctgtctagcttgtgggaatctaggaggagggccaagggagagagtggcgaacttccaggcccagagaaatcaggccttccgtgggggctttgcagaaaagagctgcaccaggccttttggctccagttccagaaccttcctccaccagagctttgccaaacttcactcggtgcagctgagcctgcaccctcctggcagggcccaaggccccatagaggttgtatctgaacagacaaagttgctgtcccctctcctgctccctccccacggtggggaattctcttcagtcaaacacaccagctctaaggttctgttgtcatgagtcttagcatccacacctcccactgccctaatgtgtttttttaaccaggagtgttctggaaacagctcaagaactccaagtgttttcaagatttctccacactgtagcatggatcagcgcttcgcttctgtctatggctgtttattgcattgcatggatatgccgcattttgcttatccatcagttgatggacatttgggttgtttccactttggggctcctctgaatcacgctgctgtgaacatcagaaacactgtctcccattgaggcttgattttttatccatcaaccaaatgtggtcctccattatgtggccctgcagtgttcagcccctgtcccccgagaagctcctggcataatctgagcacctcctgacttgcaccacagctgtcaggggctcctcttgtgatccttctcagggctcagcccctgagaagcacctgtcatactcccctgtctctaacccactttggtggtttcttgtggattctttgaagaggtgctaggagaaggcagagccgtctctctaaaatgccaaaaacctttctccttgagacaggcaagttgagatgtctgtatgggaaaacccaaagcaagcctggttagcatggagggcaagcaacagggaagtagatccaaactcagacaactgggtttgaatctcccattttccagccatcgtgaccctgagccagttatcaaatctctcaggagtggcgcttgtgaaccctaaccctaaatgagaatgctaatgccgacctcattagatcatggctaaacccgaggaggggcacactgcaggcacagggaggcaggtgtgttgtgcatcccctcttctctttatttctcagatacaggagtcagaccgctttctgcatttatccctcagggctctgcttcagcatgctttcctctgagaagccacccgcgcacccacttctgactctgctacacgctggtgtgacactcttcgtgttccgccccactcatcccccttgtcatgactgcttctccacttccgcccctctctccagattataagtcccatgagggctagggcgctggctgtcttgtttactattgtgtccccca

SEQ ID NO: 459708 - DNA, 1905 bp, Homo sapiens
ggcgcccgtgcaacggagcgaggatccgcgcgcacgggaagttcttctgctgcagggctggagagcgccggccacgtcctagcctcggtccgactcgtccagcgtatggccctgtggggaaaggactgggtcagagagctgtgccagggccgggctcgccgggacgcgggcagtcactcaccgcggcgggctcatggcgtgcggggtttgggctgcggggatggcctggagggctccgagggctcggagggtgcggcggccgcggcagccacggcgtcctcggcgggtgcggcgggtgcggtgcgttcctggcggctgcgaaagtcctgcagggcgcggcggttctggaaatcgatgagcgccagcgcgatggccgcgttccagcagctctcgcccgcgcagcggaagtcgatctccttgtggtcggtggtgacgatggtgaagtacacgtacttgcccgtgcgctccacgcagtccaccttgaggatggagtggaagcgcagctccttggggcgcgcgcgggggctggcggggaacaggctcaggcggtcggagatgctgatggcggctgcatgacagtgtgaatatgcttagtgtgaatatactcagtgtgaatacgctcagtgtgaatatgctgagtatgctcggtgtgaatatgctcagtgtgaatatgctcagtgtgaatatgctcggtgtgaatacgctcggtgtgaatacgctcggtgtgaatatgctgtgtgaaaatgctcggtgtgaatacgcttggtgtgaatacgcttgtaatatgctcggtgtgaatatgctttgtgtgaatatgctttgtgtgaaaatgcttagtgtgaatacgctcagtgtgaatacgctcggtgtgaatatgctcggtgtgaatatgctcggtgtggtgtgaatatgcttgtaatatgctcggtgtgaatatgctttgtgtgaatatgctttgtgtgaaaatgcttagtgtgaatacgcttagtgtgaatacgctcggtgtgaatatgctcggtgtgaatatgctcggtgtgaatacgcttagtgtgaatacgctcggtgtgaatatgctcggtgtgaatatgctcggtgtggtgtgaatatgcttgtaatatgctcggtgtgaatatgctcagtgtgaaaatgcttagtgtgaatacgcttagtgtgaatatgcttggtgtgaatatgctcggtgtgaatatgcttggtgtgaatatgcttgtaatatgctcggtgtgaatatgctttgtgtgaatatgctgtgaatatgctcagtgtgaaaatgcttagtgtgaatacgcttagtgtgaatacgcttagtgtgaatatgcttagtgtgaatacgcttagtgtgaatatgctcggtgtgaatatgcttagtgtgaatacgctgtgaatacgcttagtgtgaatatgctcggtgtgaatatgctcggtgtgaatatgctcggtgtggtgtgaatatgcttgtaatatgctcggtgtaaatatgctcagtgtgaaaatgcttagtgtgaatacgcttagtgtgaatatgcttggtgtgaatatgctcggtgtgaatatgcttggtgtgaatatgcttgtaatatgctcggtgtgaatatgctttgtgtgaatatgctttgtgtgaatatgctcagtgtgaaaatgcttagtgtgaatacgcttagtgtgaatatgctcggtgtgaatatgctcggtgtgaatatgcttagtgtgaatacgctgtgaatacgcttagtgtgaatatgctgtgtgaatatgcttagtgtaactatgcttagtggcactgaactgtgcactttaaaaaatggttaagaatgtaacttgtgatgtaccctttaccagttttaaaaatgcatttacatatgaatatccatgcaggcgggggtatga

SEQ ID NO: 459709 - DNA, 6863 bp, Homo sapiens
ccagcagtcagcagtcaggtgccggctcacacacgcaaaatgctgtgcaagaggcggtccctttctctatgctggattcagtacagagctgctgcagttcatgaactttcactgttgttgttttttccttgtgcttttcctactgatgcatctcaaggttctacctccttcccaaaggtttccaacaactgtgattccatttttgtgaatgggaaggaaatgaagagcaaagtggacacgattgtgaacttcacccaccagcacttcacctcccagttcgaggtcactgtctgggcacccaggctccccctgcagattgagatctcagacaccgagctgagccagatcaagggctggaggatcccggttgctgccaacagaaggcctacccgggaaagcgatgacgaggacgatgaggagaagaagggacgaggctgctccctgcagtaccagcacgccacagtgcgtgtcctcacccagtttgtggccgagtcacctgacttagggcagctgacctacatgctgggccccgactggcagtttgacatcactgaccttgtgaccgagttcatgaaggtggaggagccgaaaatcgctcagttacaggacggcaggaccctggctggtcgggagccgggaataaccacggtgcaggtcctctcgccgttgtctgactccatcctggctgagaagacggtgattgtcctggatgaccgagtcaccatcgcggagctgggagtgcagctcgtagctggcatgtctctctccctgcagccacaccgagcagacaaaagggccatcgtctccacagctgctgccctggatgttcttcagtccccacagcaggaagcaatagtaagttcttggattttgttcagtgatggttcggtgacacctttagacatttacgatcctaaggattattctgttactgtctcatcattggatgaaatggtggtgtctgtccaggcaaaccttgagtccaaatggccaattgtggttgcagagggtgaaggacaagggcctttgattaagttagaaatgatgataagtgaaccttgtcagaagaccaagaggaagagtgttcttgccgtgggtaaaggaaatgtcaaggtcaaattcgaaccaagtagtgatgagcaccaaggaggcagcaatgatattgagggcataaatcgggaatataaagaccacctcagtaattccatagagcgcgaaggaaaccaggagagagcagtccaggaatggttccaccgtggcacacctgttggccaagaggaaagtaccaacaaaagcacaaccccccagtctcccatggaagggaagaataagttactcaaaagtggtggtccagatgcctttacaagcttccccactcaagggaagtcaccggaccccaataatcctagtgacctcacagtgacctcaagggggctaacggacttggagattggcatgtatgccttgctctgcgtcttctgtctggccattctggtcttcttgatcaactgcgtggcgtttgcctggaaatacagacacaaaaggtttgctgtgagtgagcagggcaacatcccccattcccacgactgggtctggcttgggaatgaagtggaacttttggagaaccctgttgacattacactcccatcagaggagtgcacaaccatgatagacaggggcctgcagttcgaggagaggaacttccttctgaatggcagttcccagaagacttttcatagtcaactactcagaccctctgactatgtctatgagaaagaaattaaaaatgaacctatgaattcttcgggcccaaagaggaagagagtcaagttcacttcctacaccaccatcctcccagaggacggcggcccatacaccaactccatcctgtttgacagcgatgataacatcaagtgggtctgccaagatatggggctgggggattcacaggactttagagactatatggaaagtctgcaagaccagatgtaaactcctttcttatgtttgtattcacctttatgccttctgttttttgaatgctggagcagtgagtttgatcagcaataggggatgatttaacaaagtttgatttgtggaggtctggtgggattcatttctaagcaggtaaaagaggtttggagagctatagaagctgggttttaagtttggaaatgcctctaaaacagccacatgtggggactggagaaattctaagacaacagttttatggactgcctggtacgagctcagtgcaaatgtattaaacctgaccccacagacattgttagtcatctcgtgacaaatggccatgtggaattagaaaagatttgggtgttgatttttctatttctagaccttttaaagcacagtggacacttattgccccttggcctgagtttagacatacatgaaagatgactgaatgtagctatcctgatttgtcatgagcgctgctcattatttttatatacatttgcacctgcacctgttcctttgacctctggaattctttttgaaacatgaagagaagaaatttcagtcttttccttgagctctgtttgatttacacatgagttttcttccctgggatttgccatgccatgttatttcctgggtctccatgcaggatgtcaggtttttccagttttctgcacttcatcatctagggatggtatccaagaagcttattctcactttgttttttccttccttttgttgttgaactttcttgtataacactgggacaaagggttttacttaaaatgttaatatacagtgagggagggccatctctttactgttttctatgtgaagtttcaaacatttggaaaaaagttgtcaatcacaaacatttatttttattctctgcttgttgaaaactcatggggaactcctggagtgcatttctgagggtaaaaaggccccaacatagctgtatttatacaagtgctttgtggccaacacaatttactatccaaactgaagtcttaaagtagaattgacctacacagaaaggaaattgcctaggcaatagatgcagattacactttccattttaccagaacaaaagtttttttttttttaaataagtagaatgacagttcaagttagcaatatatagaaatccatccatacaatgaccaaaataaataaataaataaaactcaatcatgactttggcagagataaaacattgacaagggtgtgcatttgtggagagaagcagtgggtttccccccaaaatccatacaaataaatgactattccagaactcaagaagcagctattatagaaaaaaaaattaaaaaccacagctattgaaaaattaaaacggcaagagaaaaaaagaaacaactcctgcataatgtttaaataaaaatgttattttaatagcatcatgaatggtcttaaggcaaaaatttcagattagcaaaatgtgatgacatatttattaagattgtattattggaaatgtagacactggactagtatgcctcattatgagctttactgagccatttgcatctctaagaaatatgattttaaaggcccaaagtaggaaggatctgcagggggtcacctgaagcagtgccctgactccaaatggctgataactgagctaatccaaggagaggcgttcagttgttctcttattatagatttccttgggtgggaacatgacaaccccgcctcctctagccatgacgtggcagccaaaaagttcttcctgtatctctggcccacaggactgtagtgtgtttgggaacagtgctgaaattgcaagtgatgtaggcctgacctccagagcccagcgttcagttagttgtataaaatggggcttaggaaccgaagctgatgaagttccaaaagtagttcagtttgatgggataaggaagcaaggagagccaggcattagctgcaaaaggagcttgcagagagatggctgacactttatgggaagattcctcagtcagccaaaagcttttcaaagagtttggtgcagaggtagctcagagccaaccatccaggaccgaagaaagctcatgtgctgattgacacatagctatccaggtgagtcggctccttctatgaggcttttcaatcgtctctccctttggatctctggcattccagaaagactgggaattcatttctgaaaatgatgaacctccgctgaaacggggaggaaatctcttacacacatacagcagggtcctgcccactggtaaagtgagacgttgggtagggggtgtaactggggaggaggtgaaggaaattatccctgccatggggagtgttattcaggaacataaaaattagagcattccctctgatggcagtgcttgacggggtgcagggaacaaactggggagcgttcaaacatgccagtggtttctcagcagggctggaaactggccacagtcctgaagatgcttcttgtgacaacttagagtcactgggagtcacacagctcctgtgtagccgcctttgctcctctgtgttaaaacccagtcagttcaaaataacaatcaaatggaaggccatgggggaagggttccttccaccatataacccacacccagatgtatataaacgcatatacatacatatacccgtgtgtgtgtgtgtgtgtgtgtgtgtgtgtgtgaatactgaagagccagacaacaaactatttagtaagaatcaacagtgactgtcaattgttctcagatttggcatggatactatttctcatgaaataatgtcattaaagtatttcctcctctaaatatttcctgaagatcataaaccatgggttatagcaccttgttttccagctagtcaatatacaactattaggtgctgtgccccaaaatatctaaaatgggggtaaagatataaactattaagccatgaaatctaattttctggggaccatgcatttgcctggattttccaggattttatggctgatagacccaaattattagtcttgataaacaacctgaaccaaacatttataaagtcccttcctctcccatgggaatggaatgctcagactcctgctgagggagacaccagcaagcctcttgagaaggcaccagacagtgaactctgtggtcacatgaagggaggttcagatgctagacgaccagcgtatgacctggaaccattgaggattgcaaccgctgcctccagggtccagatgtgctgcagtagagggcagagcacaggaatcaagaagcagctgccacaccaaagaactgatgcttaaacacacaggtgtgttgcatttgagagaaggcaagaagaaaagacaatagaaggttaccctggaaaaacaacacctagcaaacctcagaatactccatgtgtcccaagagaaggaataattgtctttctagctgttatatattgcacactggccaggataaattcccagactataataatcctgactatgtagacggaagtttctatttataaagtcatgcagggggaaagttgattaatttttgtcccattgccacatctgtagactaagtaatttttaacttgctaacttttagaatgtccacctttgtgcattttggtagcattcttgtttcattattttagaaaggggtcttcccattactgggatgtcggggccctgtcagagaactattattaaggctctgtgagggaactgttcagtctcacagcaaggaccacagagcgtggtttcatctgaaccctacaagtcagggacaccagtgtgttttctactcgagttacctaaaaatggtctcaattttccatttcattctctgtaaatgacacaatagatggtttatagactcagcagccctcaccttttattaaaattatatatgtgtgatgtaatgcatatcacctgtcatgtaaagggacggtatggatggtggaaaagttatgctaaaatatggattgcagatatttttgtatgtaatataggcaatataatgaaacaccgagttttttaaagtgaaagcatgcaaaatcgtagcttttaaatgtacagacatcccactcaaaaatatctaaactgatagtgggaaaaacatttgagacctagtaacatcatgaaatgcactgaatttggaattctggcctagaaaggctgtggcttatgttgggattgatgatggaatctgccagaacattttcatcttattcttcttgacttttggatttttttcttttctttttttctggaaatatttcggaaataaagtgacttcatttttcagcataaaagtatattctaaccacagggtaacacatcgtttttaacatgaaaataaacatttaaacattcttcagttgtttcattattttatctgcatgttccataaagcagctgtatggttggctataatatagatttattttttcttttcagccagagattttaatacccttgatgcagtaataaatggacatcaaaagaaaacatttcttaaaagttgccaacgtattttaccttgaaaacatttcttatttgttatcctagtaggctggggaaagcttctctccagatgtctcagaaaaagatctcctgtttctcatggccccgtccagggtcaaaccatgttgaaagtcagtgctgaaatgcatgatgctgcgggtgtttgagagcctttgacctctgtccaccctttggtctttgctcgtcaatggcttggtcttgtatatgtatctggggcaggggctttgtactgggcccagggtgctgagctttccagaacaggcagagctctagagacctaagaaaaccacaggacaggcggggattctttttgagaggctgaagtagatgtttcagctgaaagatgggtggtacgcttgccagtgcc

SEQ ID NO: 459710 - DNA, 5469 bp, Homo sapiens
catgcacgctgcaggctgcctgggaggagggaaactatgccccagacgtccgttgtcttctccagcatccttgggcccagctgtagcggacaggtgcagcctggcatgggggagcgtggaggcggggccggtggcggctccggggacctcatcttccaagatggacacctcatctctgggtccctggaggccctgatggagcaccttgttcccacggtggactattaccccgataggacgtacatcttcacctttctcctgagctcccgggtctttatgccccctcatgacctgctggcccgcgtggggcagatctgcgtggagcagaagcagcagctggaagccgggcctgaaaaggccaagctgaagtctttctcagccaagatcgtgcagctcctgaaggagtggaccgaggccttcccctatgacttccaggatgagaaggccatggccgagctgaaagccatcacacaccgtgtcacccagtgtgatgaggagaatggcacagtgaagaaggccattgcccagatgacacagagcctgttgctgtccttggctgcccggagccagctccaggaactgcgagagaagctccggccaccggctgtagacaaggggcccatcctcaagaccaagccaccagccgcccagaaggacatcctgggcgtgtgctgcgaccccctggtgctggcccagcagctgactcacattgagctggacagggtcagcagcatttaccctgaggacttgatgcagatcgtcagccacatggactccttggacaaccacaggtgccgaggggacctgaccaagacctacagcctggaggcctatgacaactggttcaactgcctgagcatgctggtggccactgaggtgtgccgggtggtgaagaagaaacaccggacccgcatgttggagttcttcattgatgtggcccgggagtgcttcaacatcgggaacttcaactccatgatggccatcatctctggcatgaacctcagtcctgtggcaaggctgaagaaaacttggtccaaggtcaagacagccaagtttgatgtcttggagaggggcatctggagcaggtcggaggggcatggggctgtgatgctcaccaggtcctccctgtgcccacagcatcacatggacccgtccagcaacttctgcaactaccgtacagccctgcagggggccacgcagaggtcccagatggccaacagcagccgtgaaaagatcgtcatccctgtgttcaacctcttcgttaaggacatctacttcctgcacaaaatccataccaaccacctgcccaacgggcacattaactttaagaaattctgggagatctccagacagatccatgagttcatgacatggacacaggtagagtgtcctttcgagaaggacaagaagattcagagttacctgctcacggcgcccatctacagcgaggaagctctcttcgtcgcctcctttgaaagtgagggtcccgagaaccacatggaaaaagacagctggaagaccctcaggaccacccttctgaacagagcctgaggcggatgcagcccgcgacgccagaggaagcacgtgcactaactgggtttaaattttgactgatgtgggttgagatgaggaggcctcactggttggggtccattttgtatataacttttatgagaaaaaaatggtaattatttcacgcatcaacctttggcacttacaaagttttttttgtttattttaaataacagggcagggccctgctttggggagggggaggggagagtatcatgggagatggtatccatgataacatcttattctaatgaaatgtagatttttattttctacttttgattattaacatcttatgaaaaaaatattttaaaaaacccagccaaaaccaacgtgagccctgcctgctcggacgcctttccagccagtgtctctgacgtcggggttagtgccttagagggtactggggtctggtcttcctgctctgtggtttgggctgcggtgagtcccactccacctgggcgcctgccctcaggagcctgggctgcgaggctccataggagggctggtggctgggaggtcgcgtccgcacacttctggaagtgagcctttgagtacgggctgtccaaagtttacattttcattttcctttcagggatttgtggggtcagggaggggcagggggcacctggcagcatattttctgtgacaatgtgtccagcaaatcattcttcaactacattttagaaaggaggaaatctaaaataaggtaagggagggaagcatggagttgtcagttttctgggctgtgactgaaagacacactgagctgtgatgaagaaaaatacatggccgactccagggtggtgacatttagagctagtcttgaaacctatcatctacagaggggagggcagccaacagccctcttcccacctgggtaggcagcgccctaattggaattggaaacagaaaattcgccaggccatactgctggagcccattcagataaaactgcccaatactgagaggtgttttctacacccagctagaggagcacactccattttcccatgtctgacttcgtggtgtgagccctgggccctactgaccatggcgcaggacagctgtccttcagaaagcacacggtcaatccacgtggaccgtctccctcgcaggaactccgcatccttgtccctctgcattcccagtttccgcaggagccttgatcaatggggaagcctgggtgaggatgggccaggtcccaattcccaaagctcctggaagagcctgaagacattgggaaaggctgggcctggggaggaggcagccctgggcccgctgcccatgcctctggtcctgggtggagcaggaatagttccactgtattgtcacagtgtgtttgcactttctgaggttctagctagtacagattgtatattgatagtacatattgctttgtttatgtctttgagatgagaaaggcttaaaacttgagaatatatatttggaatacagccttagaacggtttctgtacacacccacgtgcacttcacgggtgatcagttctagtacctacttgaaacagtgtctgtctgctactttattttcccaatttgatacataccctgatttgatgttttggtatttgagatgaactctgagtatgaagctgtaccataatgcaggacgtcagttttggtgtgactggacatacttgcttcaataaaagaatacatcactcccctcccttgcctgctgtgtgtgtacagtgagggggtggccttgctgctggccggagacatgggtcccctggggcagggaggagggtgaggctgccaggcctgctgtggccttcccaggagggactgggcaagagacttttgtctccagctggcaacactttgtgtgacaaagggctttccactgaataaggtgagactcgaaagaagctataggaggcacgttcagtcctgctttcctcattgtgagctccaaaaagatgtcactggctgctgtattgcatggtcacataagtaagtaagttcaggatacctagttaagccaggctgtatggactgtgttactgcagaggagtcagatggcctctctgggggcaggggaggttggagagcccctggacgcgatcctgcagggcagcctgcagaatgcaggtctggaggggccactcctggtgtcatgagttttatactcaagcgcaacagagaagaggggttcactgggggagcacatgagagctcgggaattgaaggaaaaaaactaaggctccagaacaggacatggtactcccctctgctcctccaacctgcccattcccacggttctcaggcctggacagggtggggactgcaccccagggataactcagctcatctttcactatgtgctcagtgtcatcattcccacgaggtgagcgccacccaacagaaacctttctggggtaagggaatgtcctgtatctgtgctgtccagtacagcagctgccaaccatatgtgggtcctgtctgctgggatgtggctagtgtgacccaggggctgaatttgggatgtgaatttggacagccaggggcccgtgttggacagaagctgggcctcggggccttgccaccccatgcagtgggcagtgcaggacaggtgctcgggtgtctgtggagcaaatggggacatggagatgatgcttgagcttttagtgaatgacattttttaggtctttaaatccaatggcatccctaatttcctggtgaagaagttatttttggaagtgttcatctgcctcagctgaagaagggggagtgcataatttgctctggccttggatacaacctcgagctgggagggccatcccctgccatgggcagttcctccagggcagtggctttcaagtgtgggtccttgggaacctgtttgaatgtccattcttaggcctctccacacacctcctgaattggcaatacggtgggggcctagtccaatccctgggccacacagtacgtgtgagaagcactcggtgggtgatagtctgtgtgccttgtgaccagtacatccctgtgtgatggctgagtgtcacccttcacaaacgttgcaggaacaaatggatgtcagagtgtcagatgtagcagaatgataagctaaggatctgtagtaagccatggagacttctgtgacacacactgcttgtgacacacaccgaccacgcccatacgagaacatagaccctgctcctcagggaggcacaaggcagcagggagggagcaaggagccggggaaactggagtgagagctggtttcagcccccagctggagaagcttggacaagctgtttaccttatagcctccatgtttttcatctgatcacggctctcttgcagggccgtggtagcagacagagcaggcacctggttcattgtcagcacagtcagtgctcgctgtagactggccttggtgccgaggacgccaagcagcacttctgcaaaaggccacagcaccttttgggaaaagtgaagcaaaggcttctaagaagcaaaggcagacagagcaggcacctggttcattgtcagcacagtcggtgcttgctatggactggccctggtgctgcggacgccaagcagcacttctgcaaaaggccacagcaccttttgggaaaagtgaagcaaaggcccccttctcaaaggaacacctggggtcctggtcaatacgaagcatgttagcattcacctaacatgtcactgttcacctaacagtcactgttcaatccaaccagcataaaaatataaatgggaaagaattcccacaaatttgcattcaaaacttcaagaagcaaaacttacaatccatctgcaggccagtttagaccacgttaacacaatttcaatctttattcccaacaaggaagtcaggatactgtgaggaaggtgaggggctgctgaacaccccac

SEQ ID NO: 459711 - DNA, 5519 bp, Homo sapiens
agcggggcggtggtcgcgcgctgctcggggcccgactgcggcgcgagggcggcgcgggagcgacgctggcccggaccgaggaaactatgccccagacgtccgttgtcttctccagcatccttgggcccagctgtagcggacaggtgcagcctggcatgggggagcgtggaggcggggccggtggcggctccggggacctcatcttccaagatggacacctcatctctgggtccctggaggccctgatggagcaccttgttcccacggtggactattaccccgataggacgtacatcttcacctttctcctgagctcccgggtctttatgccccctcatgacctgctggcccgcgtggggcagatctgcgtggagcagaagcagcagctggaagccgggcctgaaaaggccaagctgaagtctttctcagccaagatcgtgcagctcctgaaggagtggaccgaggccttcccctatgacttccaggatgagaaggccatggccgagctgaaagccatcacacaccgtgtcacccagtgtgatgaggagaatggcacagtgaagaaggccattgcccagatgacacagagcctgttgctgtccttggctgcccggagccagctccaggaactgcgagagaagctccggccaccggctgtagacaaggggcccatcctcaagaccaagccaccagccgcccagaaggacatcctgggcgtgtgctgcgaccccctggtgctggcccagcagctgactcacattgagctggacagggtcagcagcatttaccctgaggacttgatgcagatcgtcagccacatggactccttggacaaccacaggtgccgaggggacctgaccaagacctacagcctggaggcctatgacaactggttcaactgcctgagcatgctggtggccactgaggtgtgccgggtggtgaagaagaaacaccggacccgcatgttggagttcttcattgatgtggcccgggagtgcttcaacatcgggaacttcaactccatgatggccatcatctctggcatgaacctcagtcctgtggcaaggctgaagaaaacttggtccaaggtcaagacagccaagtttgatgtcttggagaggggcatctggagcaggtcggaggggcatggggctgtgatgctcaccaggtcctccctgtgcccacagcatcacatggacccgtccagcaacttctgcaactaccgtacagccctgcagggggccacgcagaggtcccagatggccaacagcagccgtgaaaagatcgtcatccctgtgttcaacctcttcgttaaggacatctacttcctgcacaaaatccataccaaccacctgcccaacgggcacattaactttaagaaattctgggagatctccagacagatccatgagttcatgacatggacacaggtagagtgtcctttcgagaaggacaagaagattcagagttacctgctcacggcgcccatctacagcgaggaagctctcttcgtcgcctcctttgaaagtgagggtcccgagaaccacatggaaaaagacagctggaagaccctcaggaccacccttctgaacagagcctgaggcggatgcagcccgcgacgccagaggaagcacgtgcactaactgggtttaaattttgactgatgtgggttgagatgaggaggcctcactggttggggtccattttgtatataacttttatgagaaaaaaatggtaattatttcacgcatcaacctttggcacttacaaagttttttttgtttattttaaataacagggcagggccctgctttggggagggggaggggagagtatcatgggagatggtatccatgataacatcttattctaatgaaatgtagatttttattttctacttttgattattaacatcttatgaaaaaaatattttaaaaaacccagccaaaaccaacgtgagccctgcctgctcggacgcctttccagccagtgtctctgacgtcggggttagtgccttagagggtactggggtctggtcttcctgctctgtggtttgggctgcggtgagtcccactccacctgggcgcctgccctcaggagcctgggctgcgaggctccataggagggctggtggctgggaggtcgcgtccgcacacttctggaagtgagcctttgagtacgggctgtccaaagtttacattttcattttcctttcagggatttgtggggtcagggaggggcagggggcacctggcagcatattttctgtgacaatgtgtccagcaaatcattcttcaactacattttagaaaggaggaaatctaaaataaggtaagggagggaagcatggagttgtcagttttctgggctgtgactgaaagacacactgagctgtgatgaagaaaaatacatggccgactccagggtggtgacatttagagctagtcttgaaacctatcatctacagaggggagggcagccaacagccctcttcccacctgggtaggcagcgccctaattggaattggaaacagaaaattcgccaggccatactgctggagcccattcagataaaactgcccaatactgagaggtgttttctacacccagctagaggagcacactccattttcccatgtctgacttcgtggtgtgagccctgggccctactgaccatggcgcaggacagctgtccttcagaaagcacacggtcaatccacgtggaccgtctccctcgcaggaactccgcatccttgtccctctgcattcccagtttccgcaggagccttgatcaatggggaagcctgggtgaggatgggccaggtcccaattcccaaagctcctggaagagcctgaagacattgggaaaggctgggcctggggaggaggcagccctgggcccgctgcccatgcctctggtcctgggtggagcaggaatagttccactgtattgtcacagtgtgtttgcactttctgaggttctagctagtacagattgtatattgatagtacatattgctttgtttatgtctttgagatgagaaaggcttaaaacttgagaatatatatttggaatacagccttagaacggtttctgtacacacccacgtgcacttcacgggtgatcagttctagtacctacttgaaacagtgtctgtctgctactttattttcccaatttgatacataccctgatttgatgttttggtatttgagatgaactctgagtatgaagctgtaccataatgcaggacgtcagttttggtgtgactggacatacttgcttcaataaaagaatacatcactcccctcccttgcctgctgtgtgtgtacagtgagggggtggccttgctgctggccggagacatgggtcccctggggcagggaggagggtgaggctgccaggcctgctgtggccttcccaggagggactgggcaagagacttttgtctccagctggcaacactttgtgtgacaaagggctttccactgaataaggtgagactcgaaagaagctataggaggcacgttcagtcctgctttcctcattgtgagctccaaaaagatgtcactggctgctgtattgcatggtcacataagtaagtaagttcaggatacctagttaagccaggctgtatggactgtgttactgcagaggagtcagatggcctctctgggggcaggggaggttggagagcccctggacgcgatcctgcagggcagcctgcagaatgcaggtctggaggggccactcctggtgtcatgagttttatactcaagcgcaacagagaagaggggttcactgggggagcacatgagagctcgggaattgaaggaaaaaaactaaggctccagaacaggacatggtactcccctctgctcctccaacctgcccattcccacggttctcaggcctggacagggtggggactgcaccccagggataactcagctcatctttcactatgtgctcagtgtcatcattcccacgaggtgagcgccacccaacagaaacctttctggggtaagggaatgtcctgtatctgtgctgtccagtacagcagctgccaaccatatgtgggtcctgtctgctgggatgtggctagtgtgacccaggggctgaatttgggatgtgaatttggacagccaggggcccgtgttggacagaagctgggcctcggggccttgccaccccatgcagtgggcagtgcaggacaggtgctcgggtgtctgtggagcaaatggggacatggagatgatgcttgagcttttagtgaatgacattttttaggtctttaaatccaatggcatccctaatttcctggtgaagaagttatttttggaagtgttcatctgcctcagctgaagaagggggagtgcataatttgctctggccttggatacaacctcgagctgggagggccatcccctgccatgggcagttcctccagggcagtggctttcaagtgtgggtccttgggaacctgtttgaatgtccattcttaggcctctccacacacctcctgaattggcaatacggtgggggcctagtccaatccctgggccacacagtacgtgtgagaagcactcggtgggtgatagtctgtgtgccttgtgaccagtacatccctgtgtgatggctgagtgtcacccttcacaaacgttgcaggaacaaatggatgtcagagtgtcagatgtagcagaatgataagctaaggatctgtagtaagccatggagacttctgtgacacacactgcttgtgacacacaccgaccacgcccatacgagaacatagaccctgctcctcagggaggcacaaggcagcagggagggagcaaggagccggggaaactggagtgagagctggtttcagcccccagctggagaagcttggacaagctgtttaccttatagcctccatgtttttcatctgatcacggctctcttgcagggccgtggtagcagacagagcaggcacctggttcattgtcagcacagtcagtgctcgctgtagactggccttggtgccgaggacgccaagcagcacttctgcaaaaggccacagcaccttttgggaaaagtgaagcaaaggcttctaagaagcaaaggcagacagagcaggcacctggttcattgtcagcacagtcggtgcttgctatggactggccctggtgctgcggacgccaagcagcacttctgcaaaaggccacagcaccttttgggaaaagtgaagcaaaggcccccttctcaaaggaacacctggggtcctggtcaatacgaagcatgttagcattcacctaacatgtcactgttcacctaacagtcactgttcaatccaaccagcataaaaatataaatgggaaagaattcccacaaatttgcattcaaaacttcaagaagcaaaacttacaatccatctgcaggccagtttagaccacgttaacacaatttcaatctttattcccaacaaggaagtcaggatactgtgaggaaggtgaggggctgctgaacaccccac

SEQ ID NO: 459712 - DNA, 803 bp, Homo sapiens
cttagagatggggtgggtttttttaatataagtttatttaagtgaaaaagaaagtcaacttaaggggaaggaagaaggaaccaaacaggagtcatgtggcggttcaggtttggccaaaccgcaggtggcacgcagttgggggctgtgcccagcacagggcctggggtgtggcttggggatgtgggaagcttgcaccatttgccatctagtaccctactctgccctgtggggccttactctgtatcccctgctgccccaggccaagctgaagtctttctcagccaagatcgtgcagctcctgaaggagtggaccgaggccttcccctatgacttccaggatgagaaggccatggccgagctgaaagccatcacacaccgtgtcacccagtgtgatgaggagaatggcacagtgaagaaggccattgcccagatgacacagagcctgttgctgtccttggctgcccggagccagctccaggaactgcgagagaagctccggccaccggctgtagacaaggggcccatcctcaagaccaagccaccagccgcccagaaggacatcctgggcgtgtgctgcgaccccctggtgctggcccagcagctgactcacattgagctggacagggtcagcagcatttaccctgaggacttgatgcagatcgtcagccacatggactccttggacaaccacaggccgaggggacctgacaaaaactaaagctggggggctttgaaaattggttcactgactgacaaggttggtggcctgattttccgggggggaaaaaaaaccgggacatttg

SEQ ID NO: 459713 - DNA, 1500 bp, Homo sapiens
tgggtacagagttttagtttgggaagatgaaaatgtctggtgatggacggcaatgatggttgtacaacaatgtgaatgtaccttaatgccgcttaaaatggctaaaatgctgtttgcagacaaggtcccaaagacagcagaaaattttcgtgctctgagcactggagagaaaggattggttataagggttcctgctttcacagaattattccagggtttatgtgtcagggtggtgacttcacacgccataatggcactggtggcaagtccatctatggggagaaatttgaagatgagaacttcatcctaaagcatacgggtcctggcatcttgtccatggcaaatgctggacccaacacaaatggttcccagtttttcatctgcactgccaagactgagtggttggatggcaagcatgtggtgtttggcaaagtgaaagaaggcatgaatattgtggaggccatggagcgctttgggtccaggaatggcaagaccagcaagaagatcaccattgctgactgtggacaactcgaataagtttgacttgtgttttatcttaaccaccagatcattccttctgtagctcaggagagcacccctccaccccatttgctcgcagtatcctagaatctttgtgctctcgctgcagttccttgggtccatgttttccttgttccctcccatgcctagctggattgcagagttaagtttatgattatgaataaaaaccaatacacaaaaaaacaagaaaagaaattattttagtcagatagagacaaaaggggtcctttggaagttttcgttttttaaagcatctctggaaaagtttcttgtaaagccccagctcttagagccaggctggcaacctttgataagcaaatgatggccattagaaactgggtccacccaaacatggccattcctgcagccttcttgcccttgccccacatgttcctggcaatatggccgcccccgcatatccccacatgtgtagaacatcatggcaccctgtatttgcatattaaaaagctagggtgggagagccagctttttcacgggctacgtgaatgacatgcctggccaaaccaatcccctgagccctatgtaaatcagacaccacctcctccagcctctgtatatatacctggctggagggcactagtaactccaactggtggcaccagaaagtcaggagctgaaaatatacaactatgacccaggttggtcaattaggttctcctataaaattgactgtccatcaactatcaacagaaatactaattcatcactaatttaaattcattaacagatatgacattccaaacaaaattaaaagaaggaaatatatttacgcacaagtaaagtatcgtcctcatcctagaggaaatataaatgaaaggcatttgaaaatgataagcattagaataaagcacaaattctgctgcttggttttcagcctcttcatgacctaggcccaactatctttttttttttttcctt

SEQ ID NO: 459714 - DNA, 1262 bp, Homo sapiens
gacgcgggcctggctgtaatttcactcgccaggacccgcagctcagctacagcacagatcagcaccatgaagcttctcacggtcctggcatcttgtccatggcaaatgctggacccaacacaaatggttcccagtttttcatctgcactgccaagactgagtggttggatggcaagcatgtggtgtttggcaaagtgaaagaaggcatgaatattgtggaggccatggagcgctttgggtccaggaatggcaagaccagcaagaagatcaccattgctgactgtggacaactcgaataagtttgacttgtgttttatcttaaccaccagatcattccttctgtagctcaggagagcacccctccaccccatttgctcgcagtatcctagaatctttgtgctctcgctgcagttccttgggtccatgttttccttgttccctcccatgcctagctggattgcagagttaagtttatgattatgaataaaaaccaatacacaaaaaaacaagaaaagaaattattttagtcagatagagacaaaaggggtcctttggaagttttcgttttttaaagcatctctggaaaagtttcttgtaaagccccagctcttagagccaggctggcaacctttgataagcaaatgatggccattagaaactgggtccacccaaacatggccattcctgcagccttcttgcccttgccccacatgttcctggcaatatggccgcccccgcatatccccacatgtgtagaacatcatggcaccctgtatttgcatattaaaaagctagggtgggagagccagctttttcacgggctacgtgaatgacatgcctggccaaaccaatcccctgagccctatgtaaatcagacaccacctcctccagcctctgtatatatacctggctggagggcactagtaactccaactggtggcaccagaaagtcaggagctgaaaatatacaactatgacccaggttggtcaattaggttctcctataaaattgactgtccatcaactatcaacagaaatactaattcatcactaatttaaattcattaacagatatgacattccaaacaaaattaaaagaaggaaatatatttacgcacaagtaaagtatcgtcctcatcctagaggaaatataaatgaaaggcatttgaaaatgataagcattagaataaagcacaaattctgctgcttggttttcagcctcttcatgacctaggcccaactatctttttttttttttcctt

SEQ ID NO: 459715 - DNA, 890 bp, Homo sapiens
tgtactattagccatggtcaaccccaccgtgttcttcgacattgccgtcgacggcgagcccttgggccgcgtctcctttgagctgtttgcagacaaggtcccaaagacagcagaaaattttcgtgctctgagcactggagagaaaggattggttataagggttcctgctttcacagaattattccagggtttatgtgtcagggtggtgacttcacacgccataatggcactggtggcaagtccatctatggggagaaatttgaagatgagaacttcatcctaaagcatacgggtcctggcatcttgtccatggcaaatgctggacccaacacaaatggttcccagtttttcatctgcactgccaagactgagtggttggatggcaagcatgtggtgtttggcaaagtgaaagaaggcatgaatattgtggaggccatggagcgctttgggtccaggaatggcaagaccagcaagaagatcaccattgctgactgtggacaactcgaataagtttgacttgtgttttatcttaaccaccagatcattccttctgtagctcaggagagcacccctccaccccatttgctcgcagtatcctagaatctttgtgctctcgctgcagttccttgggtccatgttttccttgttccctcccatgcctagctggattgcagagttaagtttatgattatgaataaaaaccaatacacaaaaaaaaaaagggggggggctaagtatcccagggcgagttacgcgaccagttttgtcaagggggccaagggggggtaaagaaaggggcgggtaaagtgggggaaggtcggtttggaaactttggggggatggaccaagtagcggataaatggtaggaggttgtgggattgtgttatacg

SEQ ID NO: 459716 - DNA, 1009 bp, Homo sapiens
gtaatcttttaaaagacattttaaatggcaattaaactcacatgtaattgcaacaatgtatacaactcaattaaagtgctaacaacatgaacaactgagaccaagttcacccatgcccaggtcttgatgacctcaccatggcagctccctggcccagggtgattataagatgccagtgattgcaagacttggcctgatttcagaagtgatgatgtggcaacacagacatcttagaattaaggaaatagttttaattcttggtgctctttcttggcattctgaaagtgttcctccagtttgccatctaagatattccttagttttctgccatgtccatttcactcatttactccttcctatatgacttttaattattgtttaataatttaattttcttgggaatatctttctcttgttacaaccagtttcctttatatcttttcttggactccattggccaaattctctttcataagcctgaagcccctaatatttaccctgagactgtattctagttagtagaatgtgaatggaggtgatgtgtgtgacatataggacttccccataagagcctttaatgagttgtcctctgttctctttcccctcttccagctgagtgccatgagaggacagtgacaaccttggggcctcatggtgaaggtggcagaaactttgttagcctgggtgctcagggtggacagctgctcttgccaaccgggaacatttgccttgagctcttttgtaagtgacagataagcttttattgtacttcagccaagatacaaacattggacgtatttgtacagcagctaaaggtactataataatacatattctgaaatcactatgtaccctaaaatattttaacaaaattcttgcaatatttgtatgagaactgctggattttgctttcttaccaaatttgctgttgctactgaaaaaagagaataacttggacaatgaaatgatctcaaatgaggtaataaaatcattactgaattttaaaaat

SEQ ID NO: 459717 - DNA, 1484 bp, Homo sapiens
agaagtcccttccccaggcagggcatgaactcttctgtttctagaaccatttagggaggtgacaacttggcttcgtcccagagattcagagcagcggcgccccctggtggcacgcggtaggatgggcggcaaagaagcactcggcgtgggcggggcgggtgggggtcgcaaggccacttctctccttcctgcaggttctcagagatggaaggtgtcttagaggcgatgtttgagggcagcattagacatttcttcttccggctctctttcagccggcccctccagacgatggccattcctgttgccttggtccgcaggaacgatgggttatgcatgaactttgtagaacatggccttgtcttcaccaacgcggaggagagcccgttcgggctggctcctgagtccctgaggccatgctgcctctcagagaaggctgcgggacctgctgccacagctggcagccaggatggcccaagtggagccggcctgcccagatttgggggtcctagttgttatacgttgtgcctggggccaggctgtgtggctttttcggatccccaagactgggaaggggcgtggagcacgtgtccgttggaaccctgggggaggtcggtgctggaagcgctcatctccacctccagtctgggtgcgctgccgcggttcggggagacgcggccgggaggtggcagcagcggccctctggcagacacggtgcgtgccggggggcggggacgcgggcggctccgggcgggcgtggtccctcttgcgggcgcctgggctggtcgggcggatcccggagagggggagccgcggggacgcagcgacagactcggggtgctggcagcggcagcccacgcctcccagggattgcaggcctgggcgccggggttggaccagtctcccgggcatggcacgccctggttattctgtacccgtgatttgtggcggggcaagacgttaagttgggtgacaccgaggtgagccacggtcctcggcaccagatgaggaaccactgtctcaataagtgacaccagtgatgctgttaaacaaggacaatccggttcatggattgtgacaacgcacgctgacatcaagcagaccctgccgtcaggtacagagggcaccacagtgaccaggaactgctgtcctttcataccaggttttaggaggctttaccagaaggaatggaaaatgctggtgggcagtaagattgaaacagcatctgaggactggttctgcacaaaaccttaaattcttcaaggactttgacatttgtttattcttgtaacaaattaaaacctatcctgtgtgttggttagagatcttcaaactgtaaataccttgaggcaggagtgaggtttttatcttttaaaggacaggcccctactctcctacgtaatgagtttctaaaaatggatgtgagcaccaatcaatatttctctggttgttaaagtcaagaataaaatggtatttttaagctcgca

SEQ ID NO: 459718 - DNA, 1557 bp, Homo sapiens
agaagtcccttccccaggcagggcatgaactcttctgtttctagaaccatttagggaggtgacaacttggcttcgtcccagagattcagagcagcggcgccccctggtggcacgcggtaggatgggcggcaaagaagcactcggcgtgggcggggcgggtgggggtcgcaaggccacttctctccttcctgcaggttctcagagatggaaggtgtcttagaggcgatgtttgagggcagcattagacatttcttcttccggctctctttcagccggcccctccagacgatggccattcctgttgccttggtccgcaggaacgatgggttatgcatgaactttgtagaacatggccttgtcttcaccaacgcggaggagagcccgttcgggctggctcctgagtccctgaggccatgctgcctctcagagaaggctgcgggacctgctgccacagctggcagccaggatggcccaagtggagccggcctgcccagatttgggggtcctagttgttatacgttgtgcctggggccaggctgtgtggctttttcggatccccaagactgggaaggggcgtggagcacgtgtccgttggaaccctgggggaggtcggtgctggaagcgctcatctccacctccagtctgggtgcgctgccgcggttcggggagacgcggccgggaggtggcagcagcggccctctggcagacacggtgcgtgccggggggcggggacgcgggcggctccgggcgggcgtggtccctcttgcgggcgcctgggctggtcgggcggatcccggagagggggagccgcggggacgcagcgacagactcggggtgctggcagcggcagcccacgcctcccagggattgcaggcctgggcgccggggttggaccagtctcccgggcatggcacgccctggttattctgtacccgtgatttgtggcggggcaagacgttaagttgggtgacaccgaggtgagccacggtcctcggcaccagatgaggaaccactgtctcaataaggtctcagtgctgtgtgtgtaatggttaccgtgagagcttccctgcaatccgaatttgtgtgtctcattctcagtgacaccagtgatgctgttaaacaaggacaatccggttcatggattgtgacaacgcacgctgacatcaagcagaccctgccgtcaggtacagagggcaccacagtgaccaggaactgctgtcctttcataccaggttttaggaggctttaccagaaggaatggaaaatgctggtgggcagtaagattgaaacagcatctgaggactggttctgcacaaaaccttaaattcttcaaggactttgacatttgtttattcttgtaacaaattaaaacctatcctgtgtgttggttagagatcttcaaactgtaaataccttgaggcaggagtgaggtttttatcttttaaaggacaggcccctactctcctacgtaatgagtttctaaaaatggatgtgagcaccaatcaatatttctctggttgttaaagtcaagaataaaatggtatttttaagctcgca

SEQ ID NO: 459719 - DNA, 973 bp, Homo sapiens
agaagtcccttccccaggcagggcatgaactcttctgtttctagaaccatttagggaggtgacaacttggcttcgtcccagagattcagagcagcggcgccccctggtggcacgcggtaggatgggcggcaaagaagcactcggcgtgggcggggcgggtgggggtcgcaaggccacttctctccttcctgcaggttctcagagatggaaggtgtcttagaggcgatgtttgagggcagcattagacatttcttcttccggctctctttcagccggcccctccagacgatggccattcctgttgccttggtccgcaggaacgatgggttatgcatgaactttgtagaacatggccttgtcttcaccaacgcggaggagagcccgttcggttccagagaggatgctgcctcatctcgtctctaaaagaggaggaaggggagcaggtcccttcacgttctctggtctcagctgagaactctccctggaagtagcgggccgtgaaatgtttcacaagtgacaccagtgatgctgttaaacaaggacaatccggttcatggattgtgacaacgcacgctgacatcaagcagaccctgccgtcaggtacagagggcaccacagtgaccaggaactgctgtcctttcataccaggttttaggaggctttaccagaaggaatggaaaatgctggtgggcagtaagattgaaacagcatctgaggactggttctgcacaaaaccttaaattcttcaaggactttgacatttgtttattcttgtaacaaattaaaacctatcctgtgtgttggttagagatcttcaaactgtaaataccttgaggcaggagtgaggtttttatcttttaaaggacaggcccctactctcctacgtaatgagtttctaaaaatggatgtgagcaccaatcaatatttctctggttgttaaagtcaagaataaaatggtatttttaagctcgca

SEQ ID NO: 459720 - DNA, 511 bp, Homo sapiens
agaagtcccttccccaggcagggcatgaactcttctgtttctagaaccatttagggaggtgacaacttggcttcgtcccagagattcagagcagcggcgccccctggtggcacgcggtaggatgggcggcaaagaagcactcggcgtgggcggggcgggtgggggtcgcaaggccacttctctccttcctgcaggttctcagagatggaaggtgtcttagaggcgatgtttgagggcagcattagacatttcttcttccggctctctttcagccggcccctccagacgatggccattcctgttgccttggtccgcaggaacgatgggttatgcatgaactttgtagaacatggccttgtcttcaccaacgcggaggagagcccgttcggttccagagaggatgctgcctcatctcgtctctaaaagaggaggaaggggagcaggtcccttcacgttctctggtctcagctgagaactctccccgcaagaagaaaatgatcgggtaccgagc

SEQ ID NO: 459721 - DNA, 3502 bp, Homo sapiens
agaagtcccttccccaggcagggcatgaactcttctgtttctagaaccatttagggaggtgacaacttggcttcgtcccagagattcagagcagcggcgccccctggtggcacgcggtaggatgggcggcaaagaagcactcggcgtgggcggggcgggtgggggtcgcaaggccacttctctccttcctgcaggttctcagagatggaaggtgtcttagaggcgatgtttgagggcagcattagacatttcttcttccggctctctttcagccggcccctccagacgatggccattcctgttgccttggtccgcaggaacgatgggttatgcatgaactttgtagaacatggccttgtcttcaccaacgcggaggagagcccgttcgggctggctcctgagtccctgaggccatgctgcctctcagagaaggctgcgggacctgctgccacagctggcagccaggatggcccaagtggagccggcctgcccagatttgggggtcctagttgttatacgttgtgcctggggccaggctgtgtggctttttcggatccccaagactgggaaggggcgtggagcacgtgtccgttggaaccctgggggaggtcggtgctggaagcgctcatctccacctccagtctgggtgcgctgccgcggttcggggagacgcggccgggaggtggcagcagcggccctctggcagacacggtgcgtgccggggggcggggacgcgggcggctccgggcgggcgtggtccctcttgcgggcgcctgggctggtcgggcggatcccggagagggggagccgcggggacgcagcgacagactcggggtgctggcagcggcagcccacgcctcccagggattgcaggcctgggcgccggggttggaccagtctcccgggcatggcacgccctggttattctgtacccgtgatttgtggcggggcaagacgttaagttgggtgacaccgaggtgagccacggtcctcggcaccagatgaggaaccactgtctcaataaggtctcagtgctgtgtgtgtaatggttaccgtgagagcttccctgcaatccgaatttgtgtgtctcattctcagtgacaccagtgatgctgttaaacaaggacaatccggttcatggattgtgacaacgcacgctgacatcaagcagaccctgccgtcaggtacagagggcaccacagtgaccaggaactgctgtcctttcataccaggttttaggaggctttaccagaaggaatggaaaatgctggtgggcagtaagattgaaacagcatctgaggactggttctgcacaaaaccttaaattcttcaaggactttgacatttgtttattcttgtaacaaattaaaacctatcctgtgtgttggttagagatcttcaaactgtaaataccttgaggcaggagtgaggtttttatcttttaaaggacaggcccctactctcctacgtaatgagtttctaaaaatggatgtgagcaccaatcaatatttctctggttgttaaagtcaagaataaaatggtatttttaagctcgcaactgtgtaggatgaattctgtacacttttatttccctctgttctcctttcctatttgaaagtttattagtttgtggacttgggatcggattattcatgcattattttttgatgttgtatgtctcttggttcttgggtatttttgacacatattctgtcttgtaaccatagttaaacaattgttttagaccaactctctgtgtgtaattggcttcaacactcactgctagtcctttgacgctctgtttttttccattcttgagtaattttaagtcatcacttgggcagttgaaatatattttaaagtgatttaaagaatatgtgagtggcagacattctgaactcttttggttgtctgtcctcaaaaactaaaacttatttgtgagtaaaattttcatctaagtgttttccatataaaaactctgtcagctactgctccattgtagtagacacaaaaaagtcagcacaattttcatccctccctccctcccttctcttccccttccccttcttgccctccttccttccttccttctttccttccttccttccttccttccttccttccttccttccttcctttttcttttgtttctgaatgtacaaagaaaacacttaaaaatttgcttgtaatttaaaaacttgtcaggatatttctggatttgagtgtttcttggttacttttacctggaacctggtgaactgagtccattcctctgtttgccctttctgtacttttttggaaagttttctttaattatatcttcaattattgtttctcttttgattgttctagattcttcttcagaaacataactcttaggctcaatctctattcctggtcttccatagctatcgtcttctttttaaagtactgtattttattgaatctaagctagtatttgttgtaagaagcactattattatatgtacaactaaggaagaaaaaatgctgccaattaaactgtgacataatgccatgattacagtcctgtgaaattgttcctcatttgtaaagtggagataatagaacttatcacatagggctaatttgaaaattaaacaaaatagtacatgcatctcatctagtctggtgcctgacacagtgaccagctacatgcatgttgtttctctgcctctttacaaatgtatatttccagctctcttcctgcagaagcctttctcatctgccctcatctcacactcctcactcatttgctctactatttccttgagaatcatattcacaccattatattgatacatgcttgtttatattaatttatcaataatttgttgagcacaaggaataatatgaatttagcagtgattgtgctccagccatgagcaaggctctaggtattatacgatgtttaaggcactgccatgattttgaagtgtcctggccaattgaaggatgcaattcatgcctccagggactcagaatctacttgggaagtgcaatccataacaaacatgtgagatatgaaaataacgaacaaaacattttatggttgtgtcaaaatgagtgtatagaggagaataagaatgtgtaaattcattcattcatttaaatatttaggtgtttgtgttaggtactgtggcagatgctgggaatataatgatgagtaaaacccacaggatcccagtcctcatggagtttatattctagtagagatgacagacactgaataaatggaatggatccacatataattagttacagttgtaataagtgataggaaagaaaaagtggggggtgggtgcttagtactcagaagatggggcagattgctacagcccagggtaattagagagtaatttgtgggagaggtccaattgaagaatggttgatgagaataactggagaggaaagatggggtccaaaggtcaggacatagaaacagtgttcagatgttaataataatagtttatatctggattac

SEQ ID NO: 459722 - DNA, 3429 bp, Homo sapiens
agaagtcccttccccaggcagggcatgaactcttctgtttctagaaccatttagggaggtgacaacttggcttcgtcccagagattcagagcagcggcgccccctggtggcacgcggtaggatgggcggcaaagaagcactcggcgtgggcggggcgggtgggggtcgcaaggccacttctctccttcctgcaggttctcagagatggaaggtgtcttagaggcgatgtttgagggcagcattagacatttcttcttccggctctctttcagccggcccctccagacgatggccattcctgttgccttggtccgcaggaacgatgggttatgcatgaactttgtagaacatggccttgtcttcaccaacgcggaggagagcccgttcgggctggctcctgagtccctgaggccatgctgcctctcagagaaggctgcgggacctgctgccacagctggcagccaggatggcccaagtggagccggcctgcccagatttgggggtcctagttgttatacgttgtgcctggggccaggctgtgtggctttttcggatccccaagactgggaaggggcgtggagcacgtgtccgttggaaccctgggggaggtcggtgctggaagcgctcatctccacctccagtctgggtgcgctgccgcggttcggggagacgcggccgggaggtggcagcagcggccctctggcagacacggtgcgtgccggggggcggggacgcgggcggctccgggcgggcgtggtccctcttgcgggcgcctgggctggtcgggcggatcccggagagggggagccgcggggacgcagcgacagactcggggtgctggcagcggcagcccacgcctcccagggattgcaggcctgggcgccggggttggaccagtctcccgggcatggcacgccctggttattctgtacccgtgatttgtggcggggcaagacgttaagttgggtgacaccgaggtgagccacggtcctcggcaccagatgaggaaccactgtctcaataagtgacaccagtgatgctgttaaacaaggacaatccggttcatggattgtgacaacgcacgctgacatcaagcagaccctgccgtcaggtacagagggcaccacagtgaccaggaactgctgtcctttcataccaggttttaggaggctttaccagaaggaatggaaaatgctggtgggcagtaagattgaaacagcatctgaggactggttctgcacaaaaccttaaattcttcaaggactttgacatttgtttattcttgtaacaaattaaaacctatcctgtgtgttggttagagatcttcaaactgtaaataccttgaggcaggagtgaggtttttatcttttaaaggacaggcccctactctcctacgtaatgagtttctaaaaatggatgtgagcaccaatcaatatttctctggttgttaaagtcaagaataaaatggtatttttaagctcgcaactgtgtaggatgaattctgtacacttttatttccctctgttctcctttcctatttgaaagtttattagtttgtggacttgggatcggattattcatgcattattttttgatgttgtatgtctcttggttcttgggtatttttgacacatattctgtcttgtaaccatagttaaacaattgttttagaccaactctctgtgtgtaattggcttcaacactcactgctagtcctttgacgctctgtttttttccattcttgagtaattttaagtcatcacttgggcagttgaaatatattttaaagtgatttaaagaatatgtgagtggcagacattctgaactcttttggttgtctgtcctcaaaaactaaaacttatttgtgagtaaaattttcatctaagtgttttccatataaaaactctgtcagctactgctccattgtagtagacacaaaaaagtcagcacaattttcatccctccctccctcccttctcttccccttccccttcttgccctccttccttccttccttctttccttccttccttccttccttccttccttccttccttccttcctttttcttttgtttctgaatgtacaaagaaaacacttaaaaatttgcttgtaatttaaaaacttgtcaggatatttctggatttgagtgtttcttggttacttttacctggaacctggtgaactgagtccattcctctgtttgccctttctgtacttttttggaaagttttctttaattatatcttcaattattgtttctcttttgattgttctagattcttcttcagaaacataactcttaggctcaatctctattcctggtcttccatagctatcgtcttctttttaaagtactgtattttattgaatctaagctagtatttgttgtaagaagcactattattatatgtacaactaaggaagaaaaaatgctgccaattaaactgtgacataatgccatgattacagtcctgtgaaattgttcctcatttgtaaagtggagataatagaacttatcacatagggctaatttgaaaattaaacaaaatagtacatgcatctcatctagtctggtgcctgacacagtgaccagctacatgcatgttgtttctctgcctctttacaaatgtatatttccagctctcttcctgcagaagcctttctcatctgccctcatctcacactcctcactcatttgctctactatttccttgagaatcatattcacaccattatattgatacatgcttgtttatattaatttatcaataatttgttgagcacaaggaataatatgaatttagcagtgattgtgctccagccatgagcaaggctctaggtattatacgatgtttaaggcactgccatgattttgaagtgtcctggccaattgaaggatgcaattcatgcctccagggactcagaatctacttgggaagtgcaatccataacaaacatgtgagatatgaaaataacgaacaaaacattttatggttgtgtcaaaatgagtgtatagaggagaataagaatgtgtaaattcattcattcatttaaatatttaggtgtttgtgttaggtactgtggcagatgctgggaatataatgatgagtaaaacccacaggatcccagtcctcatggagtttatattctagtagagatgacagacactgaataaatggaatggatccacatataattagttacagttgtaataagtgataggaaagaaaaagtggggggtgggtgcttagtactcagaagatggggcagattgctacagcccagggtaattagagagtaatttgtgggagaggtccaattgaagaatggttgatgagaataactggagaggaaagatggggtccaaaggtcaggacatagaaacagtgttcagatgttaataataatagtttatatctggattac

SEQ ID NO: 459723 - DNA, 715 bp, Homo sapiens
  misc_feature (692)..(692): n is a, c, g, or t
gtcttaacaattctaatttttaaaaaaaatattactattttttttcatcagagccattgcactggaaaataattttttattttcatgatagcctaccgttgaatttaccgttctgatattaatgaaacatctctataaagggttgaagtgtcttcccggattgtcaacttattttattttattttcttcaagcaacaattgctaaggaacagaattgtcaatttattaatgaaatatgacgtgtgttgaacaagacaagctgggtcaagcatttgaagatgcttttgaggttctgaggcaacattcaactggagatcttcagtactcgccagattacagaaattacctggctttaatcaaccatcgtcctcatgtcaaaggaaattccagctgctatggagtgttgcctacagaggagcctgtctataattggagaacggtaattgttggagtgcagtggtgcgattatagctcactgaagcttcaaattcctggggtcaagggatcctcctgcctcagcttcccaagtagctgggactatagacatgtgccaccaggcctggaacagtgctgcggacttctattttgaaggaaatattcatcaatctctgcagaacataactgaaaaccagctggtacaacccactcttctccagcaaaaggggggaaaaggcaggaaggaagcttccgantgttttggattaccttccacgga

SEQ ID NO: 459724 - DNA, 822 bp, Homo sapiens
gatggttatgtcttaacaattctaatttttaaaaaaaatattactattttttttcatcagagccattgcactggaaaataattttttattttcatgatagcctaccgttgaatttaccgttctgatattaatgaaacatctctataaagggttgaagtgtcttcccggtaagttctcagcttatgtttttctaaatatcttctaatcactgttcattttttcctttggcctaatgagtgtttctcactgtctgcgtgttcagatgcaagaaatattaagcaatcatagtaatcaataatgttttcaagctttttcttccttttagatttgctacttgtaatagctgcgatagtcttgtggagcattttagtcaaagagaacatgttcatttttaaatatttaattcaaaatacaacattcagtgcttctgcacttttgagtcaaagcagttaattgaaaatcactgacatggcttttaaaaaatatgtgctactgataatattcactaaagaccatgagccgaagagtgatttctggattttcttctattttcttttaactgacatgatgtaatgatttcaaagagccaagcagaattttgatatttaatatgttatgttgatatatgatggatatatataatattggcattagattacatcatctcattttattattcaaagttaaacactaaagagtaaacacattgtgtttgcgggtaaatactaagaagataaatacttgcataaaaagaactgctgggtttacttaatggaatgataagcaattttggacccaccacagttctttttattatgtggg

SEQ ID NO: 459725 - DNA, 1375 bp, Homo sapiens
gtcttaacaattctaatttttaaaaaaaatattactattttttttcatcagagccattgcactggaaaataattttttattttcatgatagcctaccgttgaatttaccgttctgatattaatgaaacatctctataaagggttgaagtgtcttcccggattgtcaacttattttattttattttcttcaagcaacaattgctaaggaacagaattgtcaatttattaatgaaatatgacgtgtgttgaacaagacaagctgggtcaagcatttgaagatgcttttgaggttctgaggcaacattcaactggagatcttcagtactcgccagattacagaaattacctggctttaatcaaccatcgtcctcatgtcaaaggaaattccagctgctatggagtgttgcctacagaggagcctgtctataattggagaacggtaattaacagtgctgcggacttctattttgaaggaaatattcatcaatctctgcagaacataactgaaaaccagctggtacaacccactcttctccagcaaaaggggggaaaaggcaggaagaagctccgactgtttgaataccttcacgaatccctgtataatccggagatggcatcttgtattcagtgggtagataaaaccaaaggcatctttcagtttgtatcaaaaaacaaagaaaaacttgccgagctttgggggaaaagaaaaggcaacaggaagaccatgacttaccagaaaatggccagggcactcagaaattacggaagaagtggggaaattaccaaaatccggaggaagctgacttaccagttcagtgaggccattctccaaagactctctccatcctatttcctggggaaagagatcttctattcacagtgtgttcaacctgatcaagaatatctcagtttaaataactggaatgcaaattataattatacatatgccaattaccatgagctaaatcaccatgattgctaaatatactttcatatttcatggtttactggcatcggaaatctctacaagttttaatgatttctccctccctctctttttttcctcctctgaagaaatttaggatttttctcttaaagcaaatactaaagaggaaaaaaaattaactttattgttgcttttatcaaagaagaaatgcaaattaaaaccacaataagatataatctctcacctgtcacaacgtcttaaaatgtttattattatgtttttaatcatcctgtactttatttcaaaacaatgttttcaaatgaagacacaaaagataagtgttggtaaggatgtagagcaaaggaaacacttgtacactgttggtggaaatgtaaattggtgtagccattatggaaaatggtatggaaa

SEQ ID NO: 459726 - DNA, 732 bp, Homo sapiens
ctcaccagttaaatgacaactgagttgggttcatttgtattcagcagaaatgggaaaggcttgaggcttgtcggccatgaaatatacatgttgaagagcaaaggagagaagtgcttggccgacaaggctaagacctcacacttaggagtgacccaaatgtttcctgaagatggtagaagagtgaaaaatcccacaggctctcctcttccaggaggggaaggtgcgggtgcccattgttgtcatggaatgggaactcacccatcacaatgggcaaaggagtcttctaaaccctcggaggattcttgccactggttccttgcagctgtgactccccagggtaagaggcaaagagccaccaggtcccagctgaggaagccctgtggtcagctcagacagggatgcggactgaagccgaagcaggtgttagtaattgtcgtacctacagacgaggaaaccgagcctccatgaagtgaagtgactcacccacagtcacacagctaatatatgccagagcccacagcagaacccagacgtactgaggccaagttccatgccagcataaaacaggctccagttctccctggattccaggaacaccatctccttcctcgtcccttccatcccagggaaggtctcctggttcttctagcccctctaacttcctctcatctctcctgtaacaacaatgatcagaatgatacctgaggaataaaccataagaaaaatgagcat

SEQ ID NO: 459727 - DNA, 1156 bp, Homo sapiens
ctcaccagttaaatgacaactgagttgggttcatttgtattcagcagaaatgggaaaggcttgaggcttgtcggccatgaaatatacatgttgaagagcaaaggagagaagtgcttggccgacaaggctaagacctcacacttaggagtgacccaaatgtttcctgaagatggtagaagagtgaaaaatcccacaggctctcctcttccaggaggggaaggtgcgggtgcccattgttgtcatggaatgggaactcacccatcacaatgggcaaaggagtcttctaaaccctcggaggattcttgccactggttccttgcagctgtgactccccagggtaagaggcaaagagccaccaggtcccagctgaggaagccctgtggtcagctcagacagggatgcggactgaagccgaagcaggtgttagtaattgtcgtacctacagacgaggaaaccgagcctccatgaagtgaagtgactcacccacagtcacacagctaatatatgccagagcccacagcagaacccagacgtactgaggccaagttccatgccagcataaaacaggctccagttctccctggattccaggaacaccatctccttcctcgtcccttccatcccagggaaggtttacactgaaaattttttgtgatgaaaagatttgaagaagatgacaggagatggagaagcaccagctgatctgcagactccaaggaggtcccaggaagaggtgtcatccactaagatcttctgggacaggaaagccctgtgatacctcttacatcacaccaaacagagccccacaccaagaaaagagctgcccacacctcacagaagccatgttagtggacatttctccactctggaagccttcctgcgtggtggaggccagtgcagaccatcctctgcccagaagagttgcattctaaatgacccctcagagagccctctggatggccgcctctcccacaggtccctgcaatcacataaaaaacactcattgcagccaagatgcacaaagcacagtattgatttcatactcaggtttttccaaaacaaatcataaacccacaccaattatgtccaatcagttttatggataaagaagcctgagactctccaacaggagagcttgagtttcccttctcactct

SEQ ID NO: 459728 - DNA, 1310 bp, Homo sapiens
cagcagaagacaaactggggactgcttaaggcactaactttgataatgggcaatttaaacaacatatgggaacatttagaaaaatctggacaagttaaagaagttggtggactcaagcagttgactgctatgcagccaaaatatatgttcccaacagaaggtgagctgcttcctacaatacacgtgaccattttccccggtccctctagtttgcaaagcctgtttggtggtctcttcacacggacgtgcatgagatttggtgctgtgactcagatcgggggacctccccttgggagatcaatccgctgtcctcctgttctttgctccatgagaaagatccacctacgacctcgggtccttagactgatcagcccaaggaactcatctcaccaatttcaaatcggatctcctcggcttagcggctgaagactgacgctgcctgatcgcctcagaagccccctggaccatcacgcacaccgagcttcgggtaactcttacagtggaggattctcagccgtatgaagacaccctagctggacgatcagttcttgttaagaatctgacccctcaaactctacaacctcgatggaccggaccctacttagtcatctatagtaccccgactgcggtccgcctgcaggatcctccccactgggttcaccgttccagaataaagctatgtccattggacagccagcctaatccgtcctcttcctcctggaagtcacaagtactctcccctacttcccttaaactcactcatatttctgaagaacagtaataacccttataagcctaatacatcccttcattctattaggtctgttcatccttaccctacttttgcaacagggctttatgcagtcacccccactacttacaccgggccccaaaaactagtcatccctactctcttctgtctagtcatactcctattctccattctcaactacttataaatgccctactcttgtttacactgctggtttacactgtttcttcaagccatcacagctgatatctcttggtgctatccccaaaccgccactcttaattccctcttagagtggatagatgatctttgttggcaggagaccctccaatactttcaccctgatgaagttctattctttacttttattctttacttttatactcactcttattctcattcccattcttatgccaccctcttcctctctccagctatctccaccatactatcaaccttaccctttctctcctagccatttctaatccctccttagcgaacaactgctggctttgcatttccctttcttccagcgcct

SEQ ID NO: 459729 - DNA, 1492 bp, Homo sapiens
gagggtctcccaggtcctgcaggagcagttggcttccttcagaggaacaatttctaaatacgtaaatacatggccatacatgtagacacaaaaagggctagaaaatatagtttagctgtgcatctgtgtgctcaggaagataaggagaataaatcaggtagaaaatggcagcagccttcactgattaagagaccaatctggaatcagagccctcactacctttaccccacttacaacaccagaacccacagtattcccttgccaaactcctgtgtttctctggcaatatgcagaccaaggaaaactgaagaaaatacaaccacaagcagatgggaagccataaagcagcaaacaggaaaaagctgtccctccttcctctccagctttgcagtcctcctctcgagccccctgctggaagaccctaccacagaacagcctggggaagcaaaaatgaagtttggtagagttctcaccacaccatcacaaagagagtagggttctagaggttgcctgcattccttgactcctgaatctctatcaccttcagagccagatatttcctgctgagtctttctgaggctgcatcaccctgaccctgactcttccatctccatccttcatgcttaaaggatcctggtgattacattggaccctcccgtacaatctaggatacatttttaaccttaaggtcttcaagggatcaccacactgtcttccacaatggttgaactaattttcacccccaccaatgatgctaccattgaatttaattatgatgctgtcttcaacatggaagttacataagaaaatctgaagccattgtgtatttcagctaggcttcttcttaggaaatagaggtcagcctagtgcagtgaagtctgattggaggtggacaatgaggatcctgccaaggtgctgtccttagcttctgttcagcctaatgtaagttcattccttttgattacagtcatttcaatgactttttttgcccataaaattatgaccacataattcttatagactcttctagcttttcaatgttggggaagaaagctcgcctaataagcaacttttcaacctcagaagcttaagtattatgaagcaataagacccaagatttgatgaaagaaaagccagaatttagtatggctgaagataggtggggatacagaccatggcaggcactggtaatacaaaggtgaacaagattcgggctgcattctaaagtatgaatgaataaaaaagtgtgcttattagaaatgactgaccaaatttagaatctaaagaaatattcaaagcagattcttggtgttcagaaactcaggtatctatctccattctacatcattcctacatcattttcatcccaaatgccaacatatactaatgagattttcaaaaaggaaaaacttgtgtatagtgatactctaaataggtaagtttgacatagattcttaacaaaagtataaaccagattattaacaatggtttt

SEQ ID NO: 459730 - DNA, 1870 bp, Homo sapiens
gcagcagtacagtccagcttcagctcggcatcagagtgaccctgtagctccaactactgggtcctcacagtcagtccactcctgcagaggaaactggagggtgaccaggaaccttcaagtcaatgtgggccacagacaggaaccgtctttaaaagatggttaaatgcccgtggtttacattcacttgtatgtgggaccagtgtgggaaggtcttgtttatgtgggaggggggaccacagataacaaagaacagccccttgcccccctcattgaaaaccagctgtgcatctagacctctgtcttcccacagtgccgccaagctcctggacaagaacccattctcggtcagtaacccgaaccctctgcttccttcacctgccagtctccagctggctcaactgcaggcccagctcaccctccaccggctgaagctggcacagacagctgtcaccaacaacactgcagccgccacagtcctgaaccaagtcctctccaaagtggccatgtcccagcctctcttcaatcaactgaggcatccgtctgtgatcactggcccccacggccatgctggggttccccaacatgctgcagccatacccagtacccggtttccctctaatgcaattgccttttcaccccccagccagacacgaggccccggaccctccatgaaccttcccaaccagccacccagtgccatggtgatgcatcctttcactggggtaatgcctcagacccctggccagccagcagtcatcttgggcattggcaagactgggcctgctccagctacagcaggattctatgagtatggcaaagccagctctggccagacatatggccctgaaacagatggtcagcctggcttcctgccatcctcggcctcaacctcgggcagtgtgacctatgaagggcactacagccacacagggcaggatggtcaagctgccttttccaaagatttttacggacccaactcccaaggttcacatgtggccagcggatttccagctgagcaggctgggggcctgaaaagtgaggtcgggccactgctgcagggcacaaacagccaatgggagagcccccatggattctcgggccaaagcaagcctgatctcacagcaggtcccatgtggcctccaccccacaaccagccctatgagctgtacgaccccgaggaaccaacctcagacaggacacctccttccttcgggggtcggcttaacaacagcaaacagggttttatcggtgctgggcggagggccaaggaggaccaggcgttgctatctgtgcggcccctgcaggctcatgagctgaacgactttcacggtgtggcccccctccacttgccgcatatctgtagcatctgtgacaagaaggtgtttgatttgaaggactgggagctgcatgtgaaagggaagctgcacgctcagaaatgcctggtcttctctgaaaatgctggcatccggtgtatacttggttcggcagagggaacattgtgtgcttctcccaacagcacagctgtttataaccctgctgggaatgaaggtgagcaaggccctacaggtcagcagcttgaagcagaagtgggctacccacaggcacattatgtcctgtctttaataaccaggacttccctgatgtccccttctcacggatgtagaaagcaaacagatcccaagacactaaaatgcattgggcctgctgtctgggcccatcagtattctctgagatacttgagactggagagttggctggcttttgaggtctagacccatttatacctggtacccttcaattttccactctgggaattacacttctctagtttccaagatgacatgaccagaagtgaggtgagcatgtgact

SEQ ID NO: 459731 - DNA, 1765 bp, Homo sapiens
gttctgcagagccagcctgaggttctgatgtctacgagtatgcagacagcgaaggtgcaggccgcgatatataggagcagaggcaccctgaacacgctgtcccccaatgccagctacaagtggatccagctaagagtgcggagggagaagccgtcctgcagctctgagatccacgaagtagaggtggtagtagcaccggaccccactgctttggagcctgcccaatcgaatttgggagccagcgaggttcctgactgcagcacattggccaccagaagacacacaaagctctgcaggtgtcggggcaaggaaggaccaagcgacctgagaagagcagaggtgccccatggggaccacgctgacttgtcgcatgtgcaccaaggccagccccactcagggccctcacagggcttctgcagagccgtcctgaggctctgacatctatgagtcggcggccagcagaggcgcaggccccagcacagaggagcagaggcacccggaacaagctgtcccttaatgccaccccaagcggggccagctcaggatgcggtgtttggagcagtcctgcagctctgcgatccacgaggtggtggtgggagtagcgccagagtccactgctttggagcctgccccgtctgattcaggagtcatgacgaccagaagacgccaaaagaccacaaatttttagaccaagtttataaaattagggatactcctatttcttagacaatcaaacaaatgatcagaaagactagataaatcaccatagtcacaaagcagttcacaatgcatttactgggtaatttctagttaacagtagcaatgatgatcacattgaaaatcttgtattttgtggtggttttctgttacgtaagcctcttgctttgttgaaaccatagattctaagctgctttgtcaaagtgatcattagaaaaatgtgatgtagtgtgtaaatgttagaaaatttctcctgttagtcttgttaatttgattgaacatgtgtgtcattttcaaaaatgtaaatcaaatatatgtgaatgggatatatatgtatacatatgaaatataacttgaattagagagtaggcttagctcatggcaatgttttttctgaaagcacctgcagaaatctctcttatttctagtttgttgatgtttcagagattatggagaaatggcggttctatgaatctcagacactgcatgaggcagatttggtttcagtaattttagcatcattcattgtaaggtgatgatccctaggaacttcatcacagtgagaaacctgaaaggtcctagcagccagcatgaatgaaaggtggggcggggctgctggcagggcagggccttgtgagccatatgcctgtgctctcaagttccaggattgtggggatgcatgcaggggattctggacctgattgtttcctctgaaccaggatgtggtctggttggcagggcaactggccttcacttggtggccttcagtggatgcccacattggttgccttcggttagtgcactcagttggtaccctcagttgtttctcttcagttggtggtcttcaattgttgggcagtggcagaaggaggatgaatccgtttgtgctctctcctcccccagtcacagctctcaggcttgttgcccccaggccctcctaaaataaaccagagatgttggcaggtttttcttagcagactaatcagctcaggatatgggggtgaggcagggtgtagggtgcaggttgctagcacagtgccgccccatg

SEQ ID NO: 459732 - DNA, 1069 bp, Homo sapiens
agaagagcaagagtgccccatggggaccacattgaactgtcgcatgtgcaccaaagccagccccagtcagggccggcacaagggttgtgcagagccagcctgtggctctgacgtctatgagtgtgcagacagcgcagacgcagcccgcaatatacaggagcagagttgccctgaacacgctgtcccacaatgccaaccacaaatggggccagctaagggtgtggtgggagaagccatcctgcagctctgagatccacaaagtggagatagcagtagcaccaactccactgctttggaggctgcccagtcgaatttgggagccagcgagggacctgacagcagcacattggacaccagaagacacccaaagggagaggagtggaagaccttctggtgtgggctgggcagcaattcacttgaaggagaaacagcccgggtgtggagaggtggccatccttggcgggatcctttctaaggagccgagaaatcaacgtagagcttcctctatctgattctctaacaactgcagaccttccatgagtcaagctttgtgtcaaaaggacaaattaaaaggacctataaatggcaccacccagcccaatggacagatgccccaggctgcagattctgtcagtgctgttctcgaagaggcccaggcacatgctgaaacatggaaggataagaagccagccctcgggaaccaccaggagccaggagcacccccggccccccaaggccccaagtccagcctgccccaccccctccggtgcagaggtcctgtgacaccagtggcagccccgccacaccccccaaggccaagggcacaggcagcgtggtcttccccgccccgcccgactacttcctgccgccacagccaccaatgccgcccctggagtacccagagctcccgctgccgtccccggacttcatggagacccccctggacttcgtgctccctcccctcgctgtcgccaagaggcctcctatgccccacccccccaacaggcacgaagcatcaatgttcacaagcagcaaatgaataaaagttaaacgttcttcctactgcaaa

SEQ ID NO: 459733 - DNA, 1303 bp, Homo sapiens
agaagagcaagagtgccccatggggaccacattgaactgtcgcatgtgcaccaaagccagccccagtcagggccggcacaagggttgtgcagagccagcctgtggctctgacgtctatgagtgtgcagacagcgcagacgcagcccgcaatatacaggagcagagttgccctgaacacgctgtcccacaatgccaaccacaaatggggccagctaagggtgtggtgggagaagccatcctgcagctctgagatccacaaagtggagatagcagtagcaccaactccactgctttggaggctgcccagtcgaatttgggagccagcgagggacctgacagcagcacattggacaccagaagacacccaaaggctggaatgctacgtcgcgatgtcagctcgctgcaacccttgcttcctgagttcatgtgatcctcctgcttcagcctcctgagtagctgggattagaggtggagaggagtggaagaccttctggtgtgggctgggcagcaattcacttgaaggagaaacagcccgggtgtggagaggtggccatccttggcgggatcctttctaaggagccgagaaatcaacgtagagcttcctctatctgattctctaacaactgcagaccttccatgagtcaagctttgtgtcaaaaggacaaattaaaaggacctataaatggcaccacccagcccaatggacagatgccccaggctgcagattctgtcagtgctgttctcgaagaggcccaggcacatgctgaaacatggaaggtaaaaccagcaagcagctggcatacattccacccagccgtcccccaggagaattgcttgagctccggagttccagaccagcctgggcaacagaacaagggctcatctctactagaaatcaaaaaattagccaggataagaagccagccctcgggaaccaccaggagccaggagcacccccggccccccaaggccccaagtccagcctgccccaccccctccggtgcagaggtcctgtgacaccagtggcagccccgccacaccccccaaggccaagggcacaggcagcgtggtcttccccgccccgcccgactacttcctgccgccacagccaccaatgccgcccctggagtacccagagctcccgctgccgtccccggacttcatggagacccccctggacttcgtgctccctcccctcgctgtcgccaagaggcctcctatgccccacccccccaacaggcacgaagcatcaatgttcacaagcagcaaatgaataaaagttaaacgttcttcctactgcaaa

SEQ ID NO: 459734 - DNA, 616 bp, Homo sapiens
gtttgctcatctatagaagatgtgattgttgtaaggcttccataaggtaagtgtgtaaaaaccatggcaaaatgcttgtaatttaaaagagagggttattatgaggcttctataaggtaagtgtgtaaaagtctggacaaaatgtctactattttgtaagtgttcaatatgtggataaagtggattatctttctctcctttttagaccacaaatttttagaccaagtttataaaattagggatactcctatttcttagacaatcaaacaaatgatcagaaagactagataaatcaccatagtcacaaagcagttcacaatgcatttactgggtaatttctagttaacagtagcaatgatgatcacattgaaaatcttgtattttgtggtggttttctgttacgtaagcctcttgctttgttgaaaccatagattctaagctgctttgtcaaagtgatcattagaaaaatgtgatgtagtgtgtaaatgttagaaaatttctcctgttagtcttgttaatttgattgaacatgtgtgtcattttcaaaaatgtaaatcaaatatatgtgaatgggatatatatgtatacatatgaaatataacttgaattagagagt

SEQ ID NO: 459735 - DNA, 758 bp, Homo sapiens
tgtgaatattaaacaggacagtggtgctgagcacggctaaagcatctctgcattcacagggagaggagtggaagaccttctggtgtgggctgggcagcaattcacttgaaggagaaacagcccgggtgtggagaggtggccatccttggcgggatcctttctaaggagccgagaaatcaacgtagagcttcctctatctgattctctaacaactgcagaccttccatgagtcaagctttgtgtcaaaaggacaaattaaaaggacctataaatggcaccacccagcccaatggacagatgccccaggctgcagattctgtcagtgctgttctcgaagaggcccaggcacatgctgaaacatggaaggataagaagccagccctcgggaaccaccaggagccaggagcacccccggccccccaaggccccaagtccagcctgccccaccccctccggtgcagaggtcctgtgacaccagtggcagccccgccacaccccccaaggccaagggcacaggcagcgtggtcttccccgccccgcccgactacttcctgccgccacagccaccaatgccgcccctggagtacccagagctcccgctgccgtccccggacttcatggagacccccctggacttcgtgctccctcccctcgctgtcgccaagaggcctcctatgccccacccccccaacaggcacgaagcatcaatgttcacaagcagcaaatgaataaaagttaaacgttcttcctactgcaaa

SEQ ID NO: 459736 - DNA, 505 bp, Homo sapiens
agaagagcaagagtgccccatggggaccacattgaactgtcgcatgtgcaccaaagccagccccagtcagggccggcacaagggttgtgcagagccagcctgtggctctgacgtctatgagtgtgcagacagcgcagacgcagcccgcaatatacaggagcagagttgccctgaacacgctgtcccacaatgccaaccacaaatggggccagctaagggtgtggtgggagaagccatcctgcagctctgagatccacaaagtggagatagcagtagcaccaactccactgctttggaggctgcccagtcgaatttgggagccagcgagggacctgacagcagcacattggacaccagaagacacccaaagacccccctggacttcgtgctccctcccctcgctgtcgccaagaggcctcctatgccccacccccccaacaggcacgaagcatcaatgttcacaagcagcaaatgaataaaagttaaacgttcttcctactgcaaa

SEQ ID NO: 459737 - DNA, 1624 bp, Homo sapiens
gttctgcagagccagcctgaggttctgatgtctacgagtatgcagacagcgaaggtgcaggccgcgatatataggagcagaggcaccctgaacacgctgtcccccaatgccagctacaagtggatccagctaagagtgcggagggagaagccgtcctgcagctctgagatccacgaagtagaggtggtagtagcaccggaccccactgctttggagcctgcccaatcgaatttgggagccagcgaggttcctgactgcagcacattggccaccagaagacacacaaagctctgcaggtgtcggggcaaggaaggaccaagcgacctgagaagagcagaggtgccccatggggaccacgctgacttgtcgcatgtgcaccaaggccagccccactcagggccctcacagggcttctgcagagccgtcctgaggctctgacatctatgagtcggcggccagcagaggcgcaggccccagcacagaggagcagaggcacccggaacaagctgtcccttaatgccaccccaagcggggccagctcaggatgcggtgtttggagcagtcctgcagctctgcgatccacgaggtggtggtgggagtagcgccagagtccactgctttggagcctgccccgtctgattcaggagtcatgacgaccagaagacgccaaaagaccacaaatttttagaccaagtttataaaattagggatactcctatttcttagacaatcaaacaaatgatcagaaagactagataaatcaccatagtcacaaagcagttcacaatgcatttactgggtaatttctagttaacagtagcaatgatgatcacattgaaaatcttgtattttgtggtggttttctgttacgtaagcctcttgctttgttgaaaccatagattctaagctgctttgtcaaagtgatcattagaaaaatgtgatgtagtgtgtaaatgttagaaaatttctcctgttagtcttgttaatttgattgaacatgtgtgtcattttcaaaaatgtaaatcaaatatatgtgaatgggatatatatgtatacatatgaaatataacttgaattagagagtaggcttagctcatggcaatgttttttctgaaagcacctgcagaaatctctcttatttctagtttgttgatgtttcagagattatggagaaatggcggttctatgaatctcagacactgcatgaggcagatttggtttcagtaattttagcatcattcattgtaaggtgatgatccctaggaacttcatcacagtgagaaacctgaaaggtcctagcagccagcatgaatgaaaggtggggcggggctgctggcagggcagggccttgtgagccatatgcctgtgctctcaagttccaggattgtggggatgcatgcaggggattctggacctgattgtttcctctgaaccaatgccgcccctggagtacccagagctcccgctgccgtccccggacttcatggagacccccctggacttcgtgctccctcccctcgctgtcgccaagaggcctcctatgccccacccccccaacaggcacgaagcatcaatgttcacaagcagcaaatgaataaaagttaaacgttcttcctactgcaaa

SEQ ID NO: 459738 - DNA, 1948 bp, Homo sapiens
  misc_feature (1778)..(1778): n is a, c, g, or t
tgtgtagattcgctggaagcagctggaggctccagttctcatctgctcaggtgtccccggcgccttggcgaactcggccactccagttcctcacgtggtgagcactcagggcagcgggtcgattttccgaggtcccatacctgggtttgaggggcgcggctcgcagcggcgggtgcaggggcgactgccagccctcaccccgcctcggggtgcgttcggaggccgacacctggaggacgcctccagtccccgcgggacgccacgcctgcgcgccagggatccgggataagaagtgcgcgccgggctccggctgcgcgccgcggggccaccagtttgcgcgcagggctcaggcgaccgtgcggccatggacacgccacggggcatcggcaccttcgtggtgtgggactacgtggtgttcgcgggcatgctggtcatctcggccgccatcggcatctactacgccttcgctgggggcggccagcagacctccaaggacttcctgatgggcggccgcagaatgaccgcagtgcccgtggcgctgtccctcaccgctagcttcatgtcagccgtcactgtcctgggcaccccctccgaggtctaccgttttggggccatttttagcatctttgccttcacctacttctttgtggtggtcatcagcgcggaggtcttcctcccggtgttctacaaactgggaattaccagcacctacgagtatttagaacttcgatttaacaaatgtgttcgtctctgtggaacagtcctcttcattgttcaaacaattctgtatactggaattgttatttatgcccctgccctggctttgaatcaagtcacaggatttgatctgtggggcgcggtagtggcaacgggggtggtctgcacattctactgcacactgggtggtcttaaagcagttatctggacagatgtttttcaaattgggatcatggtggctggatttgcatccgtgattatacaggctgtggtgatgcaaggtggaatcagcactattttaaatgatgcctatgatggtggaagattaaatttctggaagtaccatgactgtgatccttggacagccaagaaagtgtctgcaccagaccagctcatgccttatttggtactggacattctgcaagattatccaggacttcctggactttttgtggcctgtgcttacagtgggacattaagcacagtgtcctccagtattaatgccttagcagcagtaactgtggaagatctaatcaaaccttacttcagatcgctctcagaaaggtctctgtcttggatttcccaaggaatgagtgtggtgtatggagccctgtgtattggaatggctgcgctggcgtcacttatgggagctttgttgcaggcagcactcagcgtatttggtatggttggtggaccacttatgggcctgttcgctttgggcattttggttccctttgccaactcaattggagcacttgttggtctgatggctggatttgccatttctctatgggttggaattggagctcaaatatatcctccacttcctgagagaacattgccattgcaccttgatatccaaggctgtaacagcacctacaatgagacaaatttgattacaaccacagaaatgccatttactactagtgtttttcaaatatacaatgttcaaaggactccactgatggataactggtattctttatcatatctgtacttcagcactgttggaactttggtaacattattagtggggatacttgtcagtttatcaacaggtnactatttgagtaccagatgaagcagttggcttgcgtttaagctctatctcacacacatatatatgatacatatatatatatatatatatatatatatatatatagagagagagagagagagagagagagagagagagagagagagagagagagagagagagagagactca

SEQ ID NO: 459739 - DNA, 2215 bp, Homo sapiens
tggatgcaccagcaccaagctccagattagtgctcacttaataatggctatcattaccatgactgtgggaacttcctgcctctcagggcctttttataccaagttattcttccaggaaacagaccaaatgggaaacaacagcatggaatttaaaaggcttggtgacctgcacatctggagacaccaaggagggctggcagtgaattacttggctggcaagcagtgtgaagatgaagaagattccaagagcttggatccaggtgccctaagagagacagcaggagatggggaagaagatgaaggtgatgaagacaggttggacaatgcagtcaggggccctgggcccaaggggccagttgggacggtgtcggaagctcagcttgctcggaggctcaccaaagtaaagaacagccggcggatgctgtcaaataagccacaggacttccagtggacctattccaatggacaatggctcaaccggccggctttgaatgatttcatccctacagctgctcttggtctctataacccaaccccagttcccatcttgggaatgaccctaggtggctccacccaattggtagcacctggtatagcacaaagctgccctggcctggtgttagcaatcctaataggtgaaggaaatgaagcaacacctgaggatcctaaggatcccacgtgctgggaaaggttgggtaaccatcccccttctgtgctgcagatccgcgtccgagtgattgagggccgacagttaagtggtaacaacataaggcctgtggtcaaagttcacgtctgtggccagacacaccgaacaagaatcaagagaggaaacaaccctttttttgatgagttgtttttctacaatgtcaacatgaccccttctgaattgatggatgagatcatcagcatccgggtttataattctcactctctgcgggcagattgtctgatgggggaatttaagattgatgttggatttgtttatgatgaacctggccatgctgtcatgagaaagtggcttcttctcaatgacccggaagataccagttcaggttctaaaggttatatgaaagtcagcatgtttgtcctgggaaccggagatgagcctcctcctgagagacgagatcgtgataatgacagtgatgatgtggagagtaatttgttactccctgctggcattgccctccggtgggtgaccttcttgctgaaaatctaccgagctgaggacatcccccagatggatgatgccttctcacagacagtaaaggaaatatttggaggcaatgcagataagaaaaatctcgtggatccttttgtagaagtttcctttgctggaaaaaaggtttgtacatgatctaaatgcagatgctgctagtaataaatatctaaaactactgtgctttccttggagtgaattcctgcttactctttgttaaaatagccccctgatgagccaggcactctgcgggaacacagattatctgagtctgaacacgccagacttctccacaggtttattttggagtggaaagtatgcagaacacaaattagaaaattcaatcttttgagagattaaaatagggaaggctaccactgaatttctggaattgcttttcaggtccaaacgttatcttaaccttaggcaagctctctggccagccacacccatccctggtaaatgttgtaggacggagatcccccccagtgccctgttgccccttcctgtcatgtttctcaccctccatgccccagtaaactgttgaaaccagagaatgggtcagggaagccccatcccactcccctgaaaatatctgggagactcttggtgtagggacagctataaccaccacttttacctacagagatggtcaaagattagagagttgagagttgggtgagattctacagtagaataatagcacatcatggacagttatagacaaaaagaactagcatcttttatgtgttcgaaccatataattatgaaagcaagatccggcaaaccacatacacatacacatatgactggtgcttttttctaaaagattccagtgggtgtggtagaaaagccttcagctctggggcaaaatgaggcctgaattaaattcaggctttaccccacttcataggcaggcaaatcgtttaacctctgagtttccatttcctgaactataaagggagataataataatcacaggattgttgaggggtatgg

SEQ ID NO: 459740 - DNA, 1639 bp, Homo sapiens
  misc_feature (1364)..(1364): n is a, c, g, or t
  misc_feature (1366)..(1366): n is a, c, g, or t
  misc_feature (1370)..(1370): n is a, c, g, or t
  misc_feature (1372)..(1372): n is a, c, g, or t
tggcctttgacttttacccttggccccttatgaggtaaacacaggctccgagggaccctctaagaacataaggcagagtccatcccccatctgcttgcaactcttccgtgagcccttctcactcagggtcaaagccaaggtgccccccatctctctgacctcatctcccactcactcacgtgccgtgcactgctccagctggccggcttctcctcacggtgctgtgtggtgggcacacgcttgcctcaggccaccaccctggacttggcccagagggccttcccttcccatgcacttgactcactccctcaaagcctgccagtttttcaccaaacgccagtgcattcatctgctatggctgccaagacaaagcacccaggaccaggcggcttggacaacagacactgattgtcccacagtcctcgaggctggagccggagatcaagacccggcctcagatgaaagcccacagctctgcctgctgcccgtgagagcccctgcaggtcccctcctcgctaggtatccatcagccccggcgccagcccgacgtggagccacagcagggcgggtacagagcctgatgggccagcccaacccgaggggaggccaagggcactgcaggccgccaaggctggggagcaggggccccccgggaggacggccagagccaggctggccccaactatgcaggcgaaagcacatggagggcgggtgtcaccgatgccgtcctgcatcggctgcatcgtgtcccccagattcatgcgtcaaagtcctgacccccaggacgtccatgtggttgcatttggagatggacagccccgtgaggaggcggggagaggtggtgtctgcaggcctacgacagaggccccgggagagccctgtggtgctgtggtctccactttcccaactgtccgagcagcaccttcccgccgctgcccagccctgggtgtgctgctgtctagtgatggcaagaacgcccagtgccaccctcagaggcttacaagcctccagggcaggctgcatccagctgtcaagcaaggccagggcgcagggccggggatgtgggggccgggcagtgggacccatgcctgggactcctgtgcctcgggggagccaggaggccccaaggccccaggccgagctcccgactgcctgcacggccctgctgccccatgggctgccctgggaccctgggtgtgggtctggggacagattcaagtccatctctgctgtgagtgtctgtgctgcccaaacgaacgggaggatggactgagggcacagaggggaccctgcggggtgtctgtgggcctgaaggtgctgcagcacccgtcgtccagcgtggagggcagcgggcggggggaggntnggcngngccgcagccatggagggtacagcgcccagaccctggtacgcagctggggcctgagccgcaaaacctcgtgctacagcggctctgagacgcctcctgcctccttctggtcctccatgaaatgaccagagcagcagggacctggcacctcctctgccattcgcaaagttaataatgatgatttgtatctgaaccaaactctgagtttcctaaaaccattcacaaagttaattatgatgatttgtgtctgaaccaagctctgagtttcct

SEQ ID NO: 459741 - DNA, 753 bp, Homo sapiens
aaggaagggagggatggaggaaggaagggagggaggaaggaaagggaagggaagaagggagaagggggagagagaaaaaaatgaaagaaaaggaaaagaaaagaaaagagaaaaggaaagaaaagtaaagagaaagaaaagaaaggagagcccacagaggtgcacagtcacgttgcctgtggaggggtcaagattgcctgtggcggtgacaggctcctcatgggacagtcctcaagtttatggagagcgtgcacagtcttgtgatggccccattttggatgaagcagggtccctgatggtgatggaaagccctgggcaggtggctcttggattctggggaatgagtgtgtcagaagaactgaattctgtcaatgaccacgtaagcttcgaagcagacctttcgcttgttgagccttcagatagacagcagccctagctgacatcttaactgcagtcttgtgacaggtcctcagacaggataagccaaattatacccagactgctgatccacagaaaatgagagagccagacaattatgcatttctttagtcaacaactagctgctaattatttactatgtgtcaagtcttataatgctgaagtgaagaaaagagatttaaagtcatggatgtggtttcctttggaccttaaattctagcacaaaatatgataaacattgtaatcaatgctatcatgtacaggtatgtggtgttatgtgaatatatgggaatacctaattcgtaaactgggttt

SEQ ID NO: 459742 - DNA, 3708 bp, Homo sapiens
agatttggggctagggttgtgggagtggggtgtgaattgaagctaagacattgttagtgggatggcatggaaagagaagatggcaaaaacagaacttttgggtcattaatgggaccagggtgtggggagggaaaagtcaagtttgtgtctgagaattatacaactaactatactaagccatcttctggctatgattgccacgtgtctgaaaatactaacaaggtttctaacaagacgagtcattttcgtgcctttgaactgagtcagtattacttttacgaactttcaggcaacaccgttattgaacgacccagacagatctgtccttatgtaattgtagcttttcgatacagggaatctaaaactatggcaccaccagctcataaaagcatacttgaacgcagtgaaaatgagggagaagagagggattgcagaatattccttcagttgaatttttcctttttatttaaggcaatcatcaaatgcttagaagatcgagggtttttcattttacttacatcatcagccttactatcagaaccagattttggaggcaagcagatgggtctgcatgggttacatttatttcgttcacccctgtcaacaggggtgaaagatttgaaagttgaagatgacatctcaatgaaggtgatacctattttatctacccttaattgtgccctgctagaaacaaagaaatcacttcctgaagaaagaatccatccaaacacattagtaaagcgtcatttccaagaattgtacaaggcggacagaagcccttcattgagtgttgctcctcaggatagaatgaaagaccctacattcttggggaaactgcccagtggttttgacttgattcctccagctgaaaagtgcccttcagagtctttaactcagttgaactcttatttttcagaccctagtgcttacattttggaagtgtctactgctttggacttgctagcagagcatcctcagtctccttgtgtttcagacggaatttgtgatgctggattttccttagttatgactccagatcctgaatttcttgtctcagaggcagaagtgagaaaagaaactgaaacaaaaaaggattctgaagaaatgttgaaagcaaagaagagagtttttccattgagtccagcgtcaaatctgagagtgcagcctaagaggaaggccagcatgccccacatggtgcagagtaaaaaggtgaacttgtgccgcccctttcccaaaagaactgcttccagagcagacaacagctcggactctccaacaactcttaagttagttaaaggacagtttcctcagaaaagaaaaagaggtgcggaagtgctgactgcacagtttgtacagaaaaccaaattggataggaaaaaccaagaagctcctatttctaaagatgttccagtgccaacaaatgctaaaagggcaaggaaacaagagaaatctccagtcaaaactgttccaagggctaagccacctgtgaagaaatctccacaaaaacagagagtaaatatagtaaaaggcaatgagaaccccagaaacagaaagcagctacaacctgtcaaaggagaaactgcttcaaagcttcaatcagaaatttcaagaggttgtcaagaagatgggattagcataaatagtgttcaaccagaaaataccacagcggctcacaatgatcttcctgaaaactccatcgtcaactatgactcccaggccctaaatatgttagccgatctagcattaagctctgctacttcttccacaccagtatctgaggctagaaatcttcactgttcctctgaattgccacaaaatgatgttttgctctctaaagaaaattctttgcgaggtacatctgaccatgaatatcatagaggagttaaaactcaaaaaggtgaattactacctaacccatcttctgataggaagagtaattctggatcagacttaacagttagccaagatgaagaaagcttggttccttgtagtcaggcccctgctaaagcccagtcagcacttactgaggaaatgctagaatcttcagatgcaagccaaagctcttctgtttctgtggaacattcatatgccctgctccttacagaacattcaaagaaacatctacaggagagagagatactaagccctctgtttcccaggaatgggacaaaaagccctgaagcagcaaccccagtggggaaagtcatgccatttcggcatcagcccggccttttgcttcagcaaaagcctcctgacgaccccgtggtgaagcccaaggatcgaccaccgtctgcccgtgtgaaaaaatcttcttgctctcgtatagtgcttagctgtgatgactccgttaagatcactttcaaatgtgaaacagaatatgcattcagtttagacagcaaatataccaacaacccactggagaaaactgtagtaagagcattacatgggccctggaatactgatttgcctgataatgtggaagaagtgaagcttttacttcatatgtgggtagctctgttttacagcaatcagaacaaaatcatacgatcttcccgaaaggttgtagaacacagcaacccagcaaaatatgtgtctataaatagcacgttagaatcttgtgagctccgtgaaattgaggagtcccttggtttggaaaaatgttctgcagactctctgttggagactaacgaaatttccagggctcatgctgctgaagtatccttccgtgatcctaactgcttgcttcctttcattaaaacaccacttacccaaggcttggaactctgtgtacaaaatgaacagaaaaaaacttttgcaagagagtgtgatccagacacccaagaagaccagaatttcatctgttcttacaataatgaggtatgtaaagctgaataccgttaaatgttggcattatttttgaagaaaaaaatgtttatatgtaaaatcacattcaaaacaaggcatttttaaattttaggacagtgaattctcaaggtatgtaaagaactattacaccaaaaacctagttttcatgaagtgtccttgaattgtctgcaggtagagcttacctgccatcccgattgaaaaaaaccagagtagaaaaatgtcacagggtccacatgatctgggagcccagcataatttggggcaaattgcttctttgcctaatttttaaaagaggtgacttaatacctatcaagtcttatgtagaatattgtttaaggatcaaatatagcaataataaatcttagatatactttgataaaccttaaagtaaactaaaattaattgtattaaaattatttttgaagacagatgctggaatagtaaaatgccagacctgtgaaagaagacccattgcaaataactatttgtaaatatggaaaatatactttgttttgttccttgttctcaactgacattcaaccaggccagataatccaaattttacctggagcaaatctaaaagttgttaacaaaattctaagcaaatgaattgacaaaattacctaccttttaaagttttccgcccaaatttattctagaataatattgcttgggtttgggcagcatctctgattcctgtcttaagaaagagtagacagtgttcctatacccggggtcaccggggacttggaggtccttgggtgagcctcatagaacccgtgaatatcttcaagtgattgtcatcatcatgagaattaaaga

SEQ ID NO: 459743 - DNA, 2972 bp, Homo sapiens
agatttggggctagggttgtgggagtggggtgtgaattgaagctaagacattgttagtgggatggcatggaaagagaagatggcaaaaacagaacttttgggtcattaatgggaccagggtgtggggagggaaaagtcaagtttgtgtctgagaattatacaactaactatactaagccatcttctggctatgattgccacgtgtctgaaaatactaacaaggtttctaacaagacgagtcattttcgtgcctttgaactgagtcagtattacttttacgaactttcaggcaacaccgttattgaacgacccagacagatctgtccttatgtaattgtagcttttcgatacagggaatctaaaactatggcaccaccagctcataaaagcatacttgaacgcagtgaaaatgagggagaagagagggattgcagaatattccttcagttgaatttttcctttttatttaaggcaatcatcaaatgcttagaagatcgagggtttttcattttacttacatcatcagccttactatcagaaccagattttggaggcaagcagatgggtctgcatgggttacatttatttcgttcacccctgtcaacaggggtgaaagatttgaaagttgaagatgacatctcaatgaaggtgatacctattttatctacccttaattgtgccctgctagaaacaaagaaatcacttcctgaagaaagaatccatccaaacacattagtaaagcgtcatttccaagaattgtacaaggcggacagaagcccttcattgagtgttgctcctcaggatagaatgaaagaccctacattcttggggaaactgcccagtggttttgacttgattcctccagctgaaaagtgcccttcagagtctttaactcagttgaactcttatttttcagaccctagtgcttacattttggaagtgtctactgctttggacttgctagcagagcatcctcagtctccttgtgtttcagacggaatttgtgatgctggattttccttagttatgactccagatcctgaatttcttgtctcagaggcagaagtgagaaaagaaactgaaacaaaaaaggattctgaagaaatgttgaaagcaaagaagagagtttttccattgagtccagcgtcaaatctgagagtgcagcctaagaggaaggccagcatgccccacatggtgcagagtaaaaaggtgaacttgtgccgcccctttcccaaaagaactgcttccagagcagacaacagctcggactctccaacaactcttaagttagttaaaggacagtttcctcagaaaagaaaaagaggtgcggaagtgctgactgcacagtttgtacagaaaaccaaattggataggaaaaaccaagaagctcctatttctaaagatgttccagtgccaacaaatgctaaaagggcaaggaaacaagagaaatctccagtcaaaactgttccaagggctaagccacctgtgaagaaatctccacaaaaacagagagtaaatatagtaaaaggcaatgagaaccccagaaacagaaagcagctacaacctgtcaaaggagaaactgcttcaaagcttcaatcagaaatttcaagaggttgtcaagaagatgggattagcataaatagtgttcaaccagaaaataccacagcggctcacaatgatcttcctgaaaactccatcgtcaactatgactcccaggccctaaatatgttagccgatctagcattaagctctgctacttcttccacaccagtatctgaggctagaaatcttcactgttcctctgaattgccacaaaatgatgttttgctctctaaagaaaattctttgcgaggtacatctgaccatgaatatcatagaggagttaaaactcaaaaaggtgaattactacctaacccatcttctgataggaagagtaattctggatcagacttaacagttagccaagatgaagaaagcttggttccttgtagtcaggcccctgctaaagcccagtcagcacttactgaggaaatgctagaatcttcagatgcaagccaaagctcttctgtttctgtggaacattcatatgccctgctccttacagaacattcaaagaaacatctacaggagagagagatactaagccctctgtttcccaggaatgggacaaaaagccctgaagcagcaaccccagtggggaaagtcatgccatttcggcatcagcccggccttttgcttcagcaaaagcctcctgacgaccccgtggtgaagcccaaggatcgaccaccgtctgcccgtgtgaaaaaatcttcttgctctcgtatagtgcttagctgtgatgactccgttaagatcactttcaaatgtgaaacagaatatgcattcagtttagacagcaaatataccaacaacccactggagaaaactgtagtaagagcattacatgggccctggaatactgatttgcctgataatgtggaagaagtgaagcttttacttcatatgtgggtagctctgttttacagcaatcagaacaaaatcatacgatcttcccgaaaggttgtagaacacagcaacccagcaaaatatgtgtctataaatagcacgttagaatcttgtgagctccgtgaaattgaggagtcccttggtttggaaaaatgttctgcagactctctgttggagactaacgaaatttccagggctcatgctgctgaagtatccttccgtgatcctaactgcttgcttcctttcattaaaacaccacttacccaaggcttggaactctgtgtacaaaatgaacagaaaaaaacttttgcaagagagtgtgatccagacacccaagaagaccagaatttcatctgttcttacaataatgagaaccttctgaggaaaggaggccatacagaaattgaacctcagcacttctgtcaagctttccacagagagaatgatacactaatcatcatcatcag

SEQ ID NO: 459744 - DNA, 989 bp, Homo sapiens
tatgagcggacatgggtatggtttctagaacaatcagaagacaaatctggtttcagggagaggtaggaggcttctcagcagagattattcggttgaaatctctcagggtccagcttatcatgggcatgctgtctgaaaaaccaaggtctgggactcctgctgaagtggcagcctgtgagcgagtccagcagaaagctgcagtgaccctggctcgtctcagccgagacccagatgtggcacgggaggccgtgcggctcagctgcatgtcccgtctcatcgagctctgcagatccccatcagagaggaacagcagtgacgccgtgcttgtggcctgcctggctgctctgcgtagattggctggggtctgccctgaaggcctccaggactctgactttcagcagttggtccagcctcggctggtggactccttcttactctgcagcaacatggaggagagttttgtgtagtgagtgtgggcgaagaaatacatttggctgttctcacaccccctctgactatgcaccagtgaacacatctgagtacataccagctctcctcatcttcttatttatacttaacttatttttgtgtgaaataaatggaggacgaaatcttagagcaacatcatcaaacagtctttggtccttgagaatcttctttgtgttttattttttgatttctgtagcttttcagttgcagatgttgaaattcgtaatgacaaatatgacaaattgtcatgggtgattccacttcatcttattttttctactctcactatacaatcttgcctcattttttaaaactttggaaccagaggatttcaactgcctagcaagttttttttttaagttggatttgctcttcccaaaaatctaaaatgaatttaataattgggtagaatatattggaaagaagtttctttttctttaataaatggaatcatataaaatgtatcccggattttcttattaaattgtattttaaactag

SEQ ID NO: 459745 - DNA, 1068 bp, Homo sapiens
tatgagcggacatgggtatggtttctagaacaatcagaagacaaatctggtttcagggagaggtaggaggcttctcagcagagattattcggttgaaatctctcagggtccagcttatcatgggcatgctgtctgaaaaaccaaggtctgggactcctgctgaagtggcagcctgtgagcgagtccagcagaaagctgcagtgaccctggctcgtctcagccgagacccagatgtggcacgggaggccgtgcggctcagctgcatgtcccgtctcatcgagctctgcagatccccatcagagaggaacagcagtgacgccgtgcttgtggcctgcctggctatggggatacagctgcaggtaaaaaagacaaacatctctgccctcctgctgtggtttttattttggcacattcaaggctgctctgcgtagattggctggggtctgccctgaaggcctccaggactctgactttcagcagttggtccagcctcggctggtggactccttcttactctgcagcaacatggaggagagttttgtgtagtgagtgtgggcgaagaaatacatttggctgttctcacaccccctctgactatgcaccagtgaacacatctgagtacataccagctctcctcatcttcttatttatacttaacttatttttgtgtgaaataaatggaggacgaaatcttagagcaacatcatcaaacagtctttggtccttgagaatcttctttgtgttttattttttgatttctgtagcttttcagttgcagatgttgaaattcgtaatgacaaatatgacaaattgtcatgggtgattccacttcatcttattttttctactctcactatacaatcttgcctcattttttaaaactttggaaccagaggatttcaactgcctagcaagttttttttttaagttggatttgctcttcccaaaaatctaaaatgaatttaataattgggtagaatatattggaaagaagtttctttttctttaataaatggaatcatataaaatgtatcccggattttcttattaaattgtattttaaactag

SEQ ID NO: 459746 - DNA, 881 bp, Homo sapiens
cagatgatttatggggtgggtggccgcagggaggttactctttgtattacaggctgttttttttaatcaatggccagcaacccactggctggggccagaagcaacaggctctttgtttaatcctgttaacctaggcttcggctgcagccagccccaggccagcagagggatgctggccaatgagaagctgatgctgaaaggtggttacttgtctcatgcctatattaagaataccaaaatatcccacaagacaacaattgagggatcagcgggggctgtcatctcatctgaagtctcaactagggaaggagctgcttccaagctcattcaagtgatcgatggcagaatttggttcctcatgggctgttggactgaagactttagtttatcacagtatgctggctgcagtccccactcagttccttgccataagggcctctccatagagcagcttggcaacagagcagctggcttcatcagagtgaaggaataaactgagccttggtcctagaagatagtgacttgtccgggagcaacctaaagagcagagatatcaatagaacgttcacggtgtgccaggcaatgtgctggatgttcgaggtgtttcattctagtcggctgtgtcccccacttcagtaattgtcaactccatcttcccagttgttaaactaagaagttgagagttatccatgactctgctctttctgcaatatgttacggcctatgcaccagaaaattctttcagcactgccttcaaaatatatcaagaatatgaaaaataacccaaatgtccatcaaaaggtaaatggataaacaaatgtattacctccatacaatggaacactactcgggaataaaaaggaacaaatgattggtacatg

SEQ ID NO: 459747 - DNA, 7387 bp, Homo sapiens
cggggtgccagaaggaaagcatagagttacctaaagcatctgtgatggtccaggaggcttctgtggtgatcgggcagcatcagtctttagccacgaagctgagaagatctgggaaggagtcagtcagagagccttgggccggagttccaggggctctgggagtggctgctgggcgagttggatttccagtggggtcccgcacagatgggacaaggcttaggaggaatcccgggcttcaggcattccttcgcccagtggccagatttccggcacctgaagcaagttcctgggggaggagggtggcagctgctgtgcaggcagcgcctgttccccggcatcaagcacagggaccatgttgcggggaagcgctgcactgagcgcacaccaatgcattcttgttggaaaatgaagcttcagacacggcaaccatccgatttcccaatcttttccccacctttcccccctttctattccacaaaaccgccattgtcgtcccggcccgttctcaatgagctgttgggtacacctcccagacggggtggtggccgggcagaggggctcctcacatcccagtagggacggccgggcagaggcgcccctcacctcccggacggggcggctggccgggcggggggctgacccccccacctccctcccggactgggcggctggccgggcagaggggctcctcacttcccagtaggagcggccgggcagaggcgcccctcacctcccggactgggcggctggccgggcagaggggctcctcacttcccagtaggggcggccgggcagaggtgcccctcacctcccggacggggtggctggccgggcggggggctgaccccccgacctccctcctggacggggcggctggcctggcgggggctgacccccacctccctcccggacggggtggctgccgggcggagacgctcctcacttcccagacggggtggctgccgggcgtaggggctcctcacttctcagacggggcggctgccgggcggaggggctcgtcacttctcagacggggcggttgccaggcggagggtctcctcacttctcagatggggcggccaggcagagacgctcctcacctcccagacgggatgggatgacggccgggaagaggcgctcctcacttcctagatgggatggcggccgggcagagacgctcctcacttcctagacgggatggcggccaggaagaggcgctcctcactttccagactgggcagccaggcagaggggctcctcacaaaggaggaggggccatcatgctgggttggaatgtgggagtgttcctgggaggaggaggaggggtgggaaaggccaccagtctgtggggctgtggagcctggggaatccgaggctggcgtgggagtctggggccctctagcggtggtggtgcatcctcagctcagtgccactcactcatcagctccggctccggtgtcctccttctctcgcacttctatcacgccatccagccaggacatctgcaggacacattacaggcgtcaaagagaaattcctttggttcagaatgggcccaggccttgaagcctgctaagaataccaaagccagaagaacactaaagttctcaaggtccctcaatgatgtgggtgagaaggcgcaggatacttcagaaagttttgcctatgtggaaagaacttgttctgaagggaaattaatactccctcaagatacgtgtctcagaactaacaggtttcatcataaagaaaaaagaaccctgaaccacaaacctcttggcaattccaaacattcttgtgtttcatgcctttctgccggtcgctcaactgcctcagaggtggaagctggcaaggggggcaggcccggcctgctgctggaagagaaggcggatggtgaggccacgtcccgaagccggcaactgctccagtacctgttctcactctcgcacggcttgagcgccagcagcctgcacaggttccatgagctggagagctgcgctgctcgcctgcacactgccaagtcctccagcgggctggcagggagtatgggcttctgctctgacgagatgggagacgacgatgtctttgaggacagcacatctgcaaaactgaagagtagggttctgcgggcgcccctctgctccacggaaaaggacagcgacctggattgtccttctcccttctctgaaaaattaccccccatatctcccgtgtccacgtcaggggatgtctgcagtctccgctccttagtgccagctgtcatcatttctaacatttggatcagagatcccctcactaaaacagcctgagagcctggctccttccaggacgagtgccccaacctgttctctagctgctggaaaagacccctctgtttcttaaaagcctgttaagttccttcaggctagtagctacaccttgttgcatacttccttggaaatagagagtgctttcaaattaatttctcacttattgctattagtggtcccaagaaaaagagatgaaattgcagcatcttgtaatggtgagttttttaggtctaggagagaggtactgtcatctttgtttacttgctgagagacgacagaaatgtgtagttgtggggtatgaaggtaaagtcagtgattatagctaaaaagcaaacgtcatttaaggtcactggtatttttggatgttggaatgcaggttttgttttacatagaaattttccctctaattattttaccatcttatgttctggaaaatgattccatgttgctttaaattcatctttcagtgaagttcttatttcttaccaaaaaatgacagctttgtcatttcttacatcgttttttcctttctgttgccaaatgccctccagactttccatgttggtgcggtaagctagacatttttagtttgtagtgattgttttcgtttgtgtttgtatgtttttgtgcccatagtcacttctgtaatgttcgtttctgagtttcctttggggggattaacctgccactgaagtgtcagcttccctgtcatgggactgtccttggaatgacaggttttccttccaccataggatctgccactgtgaaggagatgatgagagccccctgatcaccccctgccactgcacaggaagcctccacttcgtgcaccaggcctgcctgcagcagtggatcaagagctccgacacgcgctgctgcgagctctgcaagtatgagttcatcatggagaccaagctgaagccactgagaaaatgggagaagttgcagatgacgtccagcgagcgcaggaagatcatgtgctcagtgacattccacgtcattgccatcacatgtgtggtctggtccttgtatgtgctcattgaccgtactgctgaggagatcaagcaggggcaggcaacaggaatcctagaatggcccttttggactaaattggtggttgtggccatcggcttcaccggaggacttctttttatgtatgttcagtgtaaagtgtatgtgcaattgtggaagagactcaaggcctataatagagtgatctatgttcaaaactgtccagaaacaagcaaaaagaatatttttgaaaaatctccactaacagagcccaactttgaaaataaacatggatatggaatctgtcattccgacacaaactcttcttgttgcacagagcctgaagacactggagcagaaatcattcacgtctgattgtgtgcgggttgtcattttcctggacatccatgaagagctgaaggaaattgtttactgccaattgtatacctttcttatgtcctttaatagcatagactggacaggtgactatttatagtggcttctctttttctaaaccctccttagtctcctagaaaaccttcctgtgggccaggcatgcctgggtcctgcctctgcctggcagctctgtgggaaagtggaagaccccatgatgacatcatggggagccagcagagttcctgcccatggtcttgagctgaatgagagaataaaatgccaatcccaagggaagaggaggagcaggggtgcccaggccctgatacccagccgcctccagcttgcagtggtccccagcctggagcagagcattggggagtgtctagccatgacgagaagattccctctgcatcacggcgaaccccaggagatggtattgaaacagacccccaaacacagactcctgcctgccctctgccgatgctgcctcctccatgctcttgagcaggtggagccatggtgctctgtggtggcgcatgattcactgagcaaacagcactttacagaagaaaatctttattttgtaatatgtgtgtccagcgggattgacactcaaaaaaagtctcacttagaaatcttcccttccttacctttgtatctcctttacatcatgagagatcaaaaatccattttgccttacatatgctaagaagcgtggcattctttctgttcataaaacagactcatgacttttaagacaggacaagcaggccagaggctttttttttaatcacagatctcatgggaattagtggatgctaaatggcaattaaagcatgattcctatgcttttgagcctgttttatgacaaggtgttactttgtagacctggcccatacatttcttttttgtcaacactgaaaaagaacagtttctgagatcgaaatggaaggaaaggaagtgagtaatgacaacaaaactgaatatttaaaaaatattcctttatagttaaatctctccagttggtgttggcttcacattgaaagagcagccatgtgccaccctggccggggtgtgtgcactgcatgcaggttctcccttgcatgcaagatgggtgctggcccactgtgaggcttctgctcggggaagttctgtggagtcactaccagggccaagaggcaggtgggctggctctgggacgagggccaggtgtgagcaaactgccagggtccgctgtgccactgctccccggccacatgcccgcccagctgtcgccttaaccagactgaacagacaggatccttcagggcccttggccccactctcagtgcattctgtcatcagggattaccacctgtaccattttcataaaacaaaaccaaaatcactaccatcaaatggccttgtccctctaaaaagtctgcttaaaattctgtttttaaaacccagtttcctagttttccaggcaaatagttacctccgggaaagttgctgggggggcctgaagcacaatgtagcgcagatgcttcctttccaggccattctctcacccagcctgcacggaggagatgggagatgctgggggtcctgccctcagtctttttgggccttaggcgtttcgttcatcctgctaaggggatgaagcaaacacgaggtgattcctttgcctttcagagtggaagccctggagtttgttttgaaggccaggaggctgaaggatctctaagctacggtgtgggcttaatagcagcaggctttgtcctcctgtctcctccaagccagtgtctgattccttggcaacacaggtcttagtctgtggagtggctctgctgtggccttcctctggccgggcaggcactgtccagccatagccagctcctgagaataggtcagcctctcctttctgtctcccagggcacatccagcccgtgcctgtgttcactgtgccccgaagtgcaattacccataccccttctcagcctggggaccccaggcaaccacagactgtccactcaggggagctgaatcccaggtcagccctgccaatgtcccttaggaactgcccaggcaaggcccctggttttgtatacttgttcctgccacccagcagtagatgagtgtttcaggtgaagaccaggatagattttctaagtgtgaatccccacttcacatatggaaccccttatgctgaacttgaaaagcaccaagacttcctgtagacaagaaagtgcttaggtagggacagcccctgggcatcccacccaatgtagctggcaccccactatggcaaaggtgccttgataactgagccctgtatccctcccatgcccagccagattctcatgggaagccctctcccttcttttctgcctaacaccatctcatcgtttctggcctcactgtggacaatccacacacattcttctttcctctcctggcggggcacagagccacccccttgccttttcttttcttgaaggttctagttcagctcctgattcatcagacccttctagccccctgcatctagcagtgaagcatgaagcctggtggggatgtggtactcccatctggtgtggccaccagctctgccaatgttcctgtagccttggaaaacttgctctctcggttcttttgggtgctgtgtactccccagcttccccccttccccccccattttgcacctgggtttagtgaaaggatggcatttggttgacccatatagaaacccagaatgaggtctcagggccaggaggcctggtatttgtaggccagggaaggggaagaggcaagtggtctggggtatcaccagccagccctctctgatttggcctctactccccataagtcacagtaccataagcaggcttctggcctcagcaatttggtctttgtgcccaagtttattgtgagaatttcctgaaaactctataaaaggtctcttcctactgtaggcctctaatgtttctcccctttttgcttcagtccactcttcagtcttgtaggcctagttttcaaacctgcacatgtgtcctacctggccacaggcatgcaggcctcaggcagctgggccagtttgggagcctcgggtgatgtctgcacgatctggggctgcctctgcacccctgctgtgggcttcagggttggagaagggctgggaccaaccgggtgagatccacaagtctctggatgtggctgaaggcaaatacacaattgaagtactttctgttttgaagtgctttcccttttgaatctggtttgaaacatgcagcttctgtctctagcccaaggaaagaccaaaacatagggaaataaaagcatttatctttgtcttggaagtaattgttgaagttgtgcagttgatcagtgcacagttagatgcaatgtttatagaaattgattgttaaaccaaatttacactggcatgtgtggtgtagtttctaaaaggcacttcacatttgaaatttttcttaccttagaaagtttctagtgatctaaatgtctagttttgtattcttttgtgtgtgttcactgtttctcagtattaccacttgaataattctctgtacaggggggtttgtgctatacactgggatgtctaattgcagcaataaagcctttctttaaaaaggagttttgccatgagagtgttttgctgcagggaggctggggac

SEQ ID NO: 459748 - DNA, 988 bp, Homo sapiens
  misc_feature (1)..(2): n is a, c, g, or t
  misc_feature (4)..(4): n is a, c, g, or t
  misc_feature (6)..(8): n is a, c, g, or t
nncntnnnagagtgaactgcatctctaactggatgaacgtcacactgttaatggtgaaattttccaagtatattaaatatttggttgctaaggaacgtactgcttggggaaatcaatactggagatatgacagtgacaaggatcaggccctcacagaagatgaacaaggaaaaagctatcccaaattgatttcagaaggatttcctggcatcccaagtcccctagacacggcgttttatgaccgaagacagaagttaatttacttcttcaaggagtcccttgtatttgcatttgatgtcaacagaaatcgagtacttaattcttatccaaagaggattactgaagtttttccagcagtaataccacaaaatcatcctttcagaaatatagattccgcttattactcctatgcatacaactccattttctttttcaaaggcaatgcatactggaaggtagttaatgacaaggacaaacaacagaattcctggcttcctgctaatggcttatttccaaaaaagtttatttcagagaagtggtttgatgtttgtgacgtccatatctccacactgaacatgtaataagaaaaagtaggaaatggagggtcataggacttcgctaaaattctgatactgtttacaaagaaaaccggattttcagtagctgaagaaaatatggcactgtaagttaaaacccaatgggaaaagccttagttgaacttttaaaatacttgatttaaaaacaattgctcaggcaaaacataattcataaactaaaaggtttaaaaaaacaaaaaaacaaaaactaagcatccaatgatctttgcctgctttctactctgtggggctctgcccatcccaactgcttggccacctgatgggagttggaagggcggccagagccctgggtcaagctgtcaaggaaggagatgccacagagatgattttactgagggatttaatgggaaagtcacaggattcaaataaat

SEQ ID NO: 459749 - DNA, 3304 bp, Homo sapiens
ttctcttatgagggaagtatttttattatccctatttaacataaaaggcaaagctcatacaggaaaggagctgtcccaggaaatcaaggcttttctgactggcgtagaccccattctgggccaccaactctcagcccgggaacatgctcgctgtggtcttctcctgctccgttctttgccacctgctcgggctgctgtgcttgaccacttgagaggtgtctttgatgagagtgtccgggcccacctggctgccctggatgaaacccctgtggctggtccacctcacctccgtccacctccaccctctcatgtccctgctggtggacctggtctagaggatgtggttcaggaagtgcagcaggtgctgtctgagtttatccgggccaacccaaaggcctgggcacctgtgattagtgcatggtccattgacctcatggggcaactgagcagcacgtactcaggccagcaccagcgtgttccccacgctactggcgctcttaatgaactgctacagctgtggatgggttgtagggccacgcgtacattaatggacatctatgtgcagtgcctctcggctctcattggtagctgcccagatgcgtgtgtggatgccttgctggatacctctgttcagcattctccacactttgactgggttgtggcacatattggctcctcttttcctggcaccatcatttcccgggttctctcctgtggccttaaggacttttgtgtccatggtggggctggaggtggagctggcagtagtggtggaagctcttctcagaccccctctacagaccccttccctggatctcctgccattcctgcggagaaacgggtgcccaagattgcctcagttgtaggcatcctaggtcacctggcctcccgccacggagatagcatccgacgggagctcctgcgaatgttccatgatagcctggcagggggatctggaggccgcagtggggacccctcccttcaggccacggttccgttcctactgcagctggcagtcatgtcaccagctttgctgggcactgtctctggagagcttgtggattgcctcaagcccccagctgtgctgagccagctgcagcaacaccttcaaggattcccccgagaggagctggacaacatgttgaacctggctgtgcacctggtgagccaggcctctggggcaggtgcctaccgcttgctgcagttcctggtggacacagctatgcctgcttcggtcattaccacccagggcctggctgtgccagacaccgtgcgtgaggcttgtgaccggctaatccagctgctgctgctgcacctgcaaaaactggttcatcaccggggagggtctcctggggaaggggtgctaggcccgcccccacctccccgcttggtgccctttttagatgcgctcaaaaaccatgttggagagctgtgtggagagacgttacgattggaacggaagcgcttcctctggcagcaccagctcttgggcctgctgtctgtctatacccggcctagctgtggacctgaggccttgggccatctgctgagccgagcccgaagccctgaagagttgagtttggccacccagttatatgcagggctagtggtcagcctctctggcctcctgcccctggctttccgaagctgtctggctcgggtgcatgcagggacattacagcctcccttcacggcccggttcctgcgcaacttggcactgctagtagggtgggaacagcagggtggcgagggccctgcagccctaggggcgcactttggggaatctgcctcagcccatctgtctgacctggctcctctcctgctacatcctgaggaggaagtagctgaagctgctgcctctctcctggccatttgtccctttccttctgaagccttatccccctcccagctcctgggactggtaagggctggggtgcaccgcttctttgcctctctgaggctgcatggacccccaggtgtggcctcagcctgtcagcttctcacccgcctgtctcagacatccccagctgggctcaaggctgtcctgcagctgctggttgaaggagccttacatcgaggcaacacagaactgtttggtgggcaagtagatggggacaatgagactctctcagttgtttcagcttctttggcttctgcctccctgttggacactaaccggaggcacactgcagctgtgccaggtcctggagggatttggtcagttttccatgctggagtcatcggccgtggcttaaagccacccaagtttgtccagtcacgaaatcagcaggaagtgatctataacacccagagcctcctcagcctcctggttcactgctgcagtgccccagggggcactgaatgtggggaatgctggggggcacccatcttgagtccagaggcagccaaagcagtggcagtgaccttggtggagagtgtgtgtcccgatgcagctggtgcagagctggcctggccccccgaggaacacgcccgggccaccgtggagcgggatctccgcattggccggcgcttccgcgaacagcccctgctctttgagctgttaaagctggtagcagctgcacccccagccctgtgctactgttccgtgctgcttcgggggctgctggccgccctcttgggccattgggaagcctctcgccaccctgacacgacccactccccctggcacctggaggcatcctgcaccttagtggctgtcatggctgagggaagcctcctgcctccggccctgggtaatatgcatgaagtatttagccaactggcacctttcgaggtgcgtctgctgctgctcagtgtctggggttttctccgggagcatgggcccttgcctcagaagttcatcttccaatcagagcggggtcgcttcattcgggacttctccagggagggtggaggtgagggtggaccccatctggctgtgctgcacagtgtcctccaccgcaacatcgaccgcctaggtcttttctctggccgtttccaggcaccttcaccgtccactctccttcgacaggggacgtagccttttcttgctctggaagcccagggaggttgagcagtgagagagggaagggactaacgtgctccggaagggtggaggtttctcttctaagtccttggtctaaagagcgctgtcacttttttctctcccacttttttttttctaaataaaatttgccaacttgagaaaaccagtccagtgcttctgtcatgctgagagcgtgcaaagtctgacagcgcctggctctggacgttcccgcccctggcctgaagccccgccccctgc

SEQ ID NO: 459750 - DNA, 1686 bp, Homo sapiens
agcggacagtcctgccaggacggcgacagtgaagcacctgggttgagagggagcagcaggtaactgcgcaacccctgcctcccccggccccagcccgtgcctcagcagagccgggtgtggtggggacccgggagtgggtctcactgcgtgtcgcctgccaacaccttcctccaccaccatccttacccagccccagtcccacccagcacacctgggcgagacaacccaggtgcgaaggacaagcgattactaccgaagagcgtgcaaaccaggaagagagcagcctcctggagaggaaaacgtgatcccaggggtagacacgtggcgctgcgtggagagacaggttgacgagacgaggctcttctgaccgtcctacctggcaaaacttgacgacagcttcaggtcgctaccatctggacctctcggagctccctgaaccatgactcagaccctcgacacaagggaagaccctctgaacctgggcggcggtggcggcggcggctgtggctgtggctgggcacactcggcctccttgagctcctggtcgtcctgccatcgaaggcgcccgggtgctccagcgtacaatagaccgcaccgatatagccccaagaccgagtatgggcccccaaggaagcagccgaagcaacagcacggccgggcttttggttccaaccacccgtgtgctctaactgggggtgctggggagggccctggcgcccaccccctccaggattctggaaattcccctgcccggtgcaagtgttccgggtgtatggctgcaccctctctgcttttgctgctgctcctgctggagcgggtcctggaaccctggctgggtgaagcccccaggcaggaagaagcgctggggccgcagaggccgcggcctgcgccaccaccctcgccactcctacccgcggagcccgccagcggatgtgagcacgctgccgcggccgcgccgcccaacaccacccaattcatcatgaaccagatctacgaggacatgaggcagcaggagaaggtggagcgtcagcaggaggcgctgcgggcgcagaaggccacggtgagcggcgaggcctccccagccagatcctccggaaacgacgcgccccctggcggcagcaaggaaacctggggactgcaggaaactctgtatggctttgtgcagaatccctctctagcattcagtcccaacccagaggggaagaatttcacttgcctctggaaatgcctttatcaatcttcgtagaggctgaagaaaagagagagaactttataagctgcacttttttaaacccagagcagataattcccaaagtgccacaggaatccctgttcatggcacaggactttaactgttagacatcagaaaagggattgagaaaagggatggaactgatttgaggctaaactggattagcaatttattaaaaactgattaaaaagtgagttccattaataaacagatctatgtaaacaccttctttggccattataaaatgtttaaaatttgatgcgtatgtgtatgactatgggtgggtggtggggaagctttcaaatataattttactggaactgattaaaggccaagtattttattactaccatttgaatattttcatttggtgttttcccctctagaaaacagagttgctgttgtttttttaaatctggcaatgctgaaaaagc

SEQ ID NO: 459751 - DNA, 1948 bp, Homo sapiens
agcggacagtcctgccaggacggcgacagtgaagcacctgggttgagagggagcagcaggtaactgcgcaacccctgcctcccccggccccagcccgtgcctcagcagagccgggtgtggtggggacccgggagtgggtctcactgcgtgtcgcctgccaacaccttcctccaccaccatccttacccagccccagtcccacccagcacacctgggcgagacaacccaggtgcgaaggacaagcgattactaccgaagagcgtgcaaaccaggaagagagcagcctcctggagaggaaaacgtgatcccaggggtagacacgtggcgctgcgtggagagacaggttgacgagacgaggctcttctgaccgtcctacctggcaaaacttgacgacagcttcaggtcgctaccatctggacctctcggagctccctgaaccatgactcagaccctcgacacaagggaagaccctctgaacctgggcggcggtggcggcggcggctgtggctgtggctgggcacactcggcctccttgagctcctggtcgtcctgccatcgaaggcgcccgggtgctccagcgtacaatagaccgcaccgatatagccccaagaccgagtatgggcccccaaggaagcagccgaagcaacagcacggccgggcttttggttccaaccacccgtgtgctctaactgggggtgctggggagggccctggcgcccaccccctccaggattctggaaattcccctgcccggtgcaagtgttccgggtgtatggctgcaccctctctgcttttgctgctgctcctgctggagcgggtcctggaaccctggctgggtgaagcccccaggcaggaagaagcgctggggccgcagaggccgcggcctgcgccaccaccctcgccactcctacccgcggagcccgccagcggatgtgagcacgctgccgcggccgcgccgcccaacaccacccaattcatcatgaaccagatctacgaggacatgaggcagcaggagaaggtggagcgtcagcaggaggcgctgcgggcgcagaaggccacggtgagcggcgaggcctccccagccagatcctccggaaacgacgcgccccctggcggcagcaaggaaacctggggactgcaggaaactctgtatggctttgtgcagaatccctctctagcattcagtcccaacccagaggaaaaccagtctcttgccccgctgctggtggaagaagaggaggagaagaaaaatgatgatgaggaggagtatgaccaggaggtgtgtgatgcaaaggaggcgagcgaggaggaagaagaggtcgaagatgaggaggaagaggtcgaagatgaggaggaagaagaggtcgaagaggctgaatatgtggaggagggagaggaggagctggaagaggaggagctggaagaggaagaggaggtcctggaggagaacgagcagagaggggaagaatttcacttgcctctggaaatgcctttatcaatcttcgtagaggctgaagaaaagagagagaactttataagctgcacttttttaaacccagagcagataattcccaaagtgccacaggaatccctgttcatggcacaggactttaactgttagacatcagaaaagggattgagaaaagggatggaactgatttgaggctaaactggattagcaatttattaaaaactgattaaaaagtgagttccattaataaacagatctatgtaaacaccttctttggccattataaaatgtttaaaatttgatgcgtatgtgtatgactatgggtgggtggtggggaagctttcaaatataattttactggaactgattaaaggccaagtattttattactaccatttgaatattttcatttggtgttttcccctctagaaaacagagttgctgttgtttttttaaatctggcaatgctgaaaaagc

SEQ ID NO: 459752 - DNA, 998 bp, Homo sapiens
atttcaatatttaatatatggacttcgtaatttgtatcattgcagttttactaatgggaaaaatatcaaaataccttaaggactattatatacattatcacaacactcaaagaatgaaaatcacttattcctttgaaaattgggatactttttattttgagagctgcagaaaaccctatgacgcactacatagctctcacagtaaatttccaggatcaaagttcaaaaacagcggccaatgccttactgtctattccatgggcttcactaggctgtcccttcttaggcctagaacgaaatgggcttcacaaatagaaattattctaatccaaataatatttccccaagtctcacagtgcaaaacaccacagcagagagcacatggtgatcaagaaagacagcattatcataaacatttgtatttcttatgctaacagatcccattcttccagtctgtggcattgtcccaaactgccccatcaaaggttctaaaatatgcttagggcatctctattaagaggatgaggagaaaggaggagggggaagatgctaacaactaaatggttcaatatgatgcagtatttccaatggcgggagacagaaacaatgtcacaaagtgggagaggcactaagaatgagatctggcaccacttactcttgtttctatacaatcgaagtacaacacttctcaattttctaggcgtctttggggagagatcttatctctcttaatggtaccaactcagtaacccaaactgttcaccaatacttcttttaagtagttgtgaggtagggagtccaacacttcccaagagatcctgttagtacattatagcaactacagggaatgttttacaaatgactgtcattataatgttaaatctaacatatatgccaacccccttagtttatacaataactttcctccaaaaatcttaattaaaaataaaatatagctgacttcgttataaagagactcattaaccaggacattgcag

SEQ ID NO: 459753 - DNA, 1312 bp, Homo sapiens
ctttttcctggctcctgggcccaaatgccagtccctctcgaaggtgcctgctgcctcgggaacgctcactcccggctccgcggggcacctcccacctcctcccgggctcagcaccctttggatagaagaagggaaggagggcgaaagaagagcaactcaccagtgttgccaacctggtctgcagacccccgccccacctgtccctcctccagtcgtttaacccttcttggcccacgctggacacgtttatatagatattggctccccccctacggaccgatcccggttcacacaacggagtggcaggcgccggggcggctcgagctgggctgggggctcgccccgcgagcgtcctcgggcggggcctgcgggttcgcgccagagcttccccgctcttcgcaggcgctcagaaagtgggcgaacccaacgcgcagaactgacccgggcttgcgccccgcagtgctcctggcccacccccggccgctggctccctctgccgtccccgccctcgagcttctaggtgcctttctctcgccactccaaggtgaaagaactgggcttttctctcctttgctccgactatttcagggaaactgcagtcgtcgacgcctgcgttggcatcgcaaaagcccaggagggatagcgcagccgagattctccgacagctccccacctctcccggctctctgatctaccacgtcagtggtctcctccaggcagtgcaaaggcagtatctctctgaatcccgggacgtctcagccaaagcagggaagacaccccaagtacgctggaaggctgggtaaggcgcgaagggcagccccattccagtcttcaaagagagctagctgttcaccgctcctctcctccagatttcaccgtgcctgaagaactaccatgcttttcatgtaatatttttaaaaacattaaatactttggattaagagatgatcgagagaacaagtgcgcatatgtatatatatgtgtgtgtgtgtgtgtgtgtatgtatatatactgttttggtgccactcccattccagtaactaggaaataatatgccttttctccaggaagcacttgttttaaatcagtaagctctgaatagacaaaatagtaatgcattttcaacaacttgctcaatatttttaatatttcatcacaaaatccagagatgtacatataattctttacacttattttacagaatcaggcatagtttcttacaggcctaaatcctgaaaaggcaaagggaagattcagcataaatacaacaaagggagaataaagactggatttatattgccatttggaccac

SEQ ID NO: 459754 - DNA, 1935 bp, Homo sapiens
ctcgagctgtaaaagccaaaggtccggtgatgatcccatacccttttttccagtctcatgttgaagatttttatgtagaaggccttcccaaaggaatttttttttttttttttttgagatggagttttcactcttatcgcccaggctggggtgcaatggcgcaaccttgctggtcactgcaacctctgcctcctgggttcaagaaattctcctgccttagcctcccaagtcactgggattacaggtgcccaccaccataccaggctaatttttgtatttttagtggagatgcggtttcaccatgttggccgggccagtctcgaactcctgacgtcaagtgatcttcccgcctcgactcctgatatcaagtgatcttcccgcctcggcctcccagagtgctgagattacagacgtgaacccatgcctggccaggaattttgttttttaggaaggctttctactaatggaattcctggccttgagaggatgttactttagaaggaaaggatttttttgttattaaaagctggacctaccatgaaagacttctgaatccaagaagagaaactgactgggcaacatgttattcagaaacagggccttgccctgtcactcaggatggagttcagtggtcctatcatggctcattatagcctcaaactcccaggctcaagcaatcctaccatgtcagccttcccagtagctgggactacagagacgaggtttcgccatgtttcccagactgttctcaaactcctgagctcaaagcagtccacccaccttggcccccagagttctgggattacaggtgtgagccatcttgctcattctagtttaaacttttgagtggtttgtgtctcctgattggactcctacaaatacagaattgatgctaggaagggtaccaggagatagacgcacacagatgggatttgggaataggtttggttatccaaggagcagtgctgagctccttgcaatgggatatgggatgctggtgatttccaggaagtgagctcacaatgactcaagctgccacatactgttgattgtgaaatgccagttgaagcatatgtcctgcaagcttaggggtgctacaagttgaccactgcagcagtaaagatgactctgaagaatggcgtgggatggttcctttcaaatgcacttgagcagcggtctccaaccacagggccacagagctggagctggatctaccatgaaagacttgtgaatccaggaagagagactgactgggcaacatgttattcaggtacaaaaagatttggactgtaacttaaaaatgatcaaattatgtttcccatgcatcaggtgcaatgggaagctcttctggagagtgagagaagcttccagttaagactggtgtgggaagggtcgttttggatgcacttgagcaggggtccccaacccctgagccatggagccgcaaggagccacacagcaggaggtgggaacatccagttgcaggaaaacaagcttaacacgcccactgattctacattatgtcagcctctacagaccaagctcatgactcacaatggcctatttaggcccataccctacgtcacggcagcctccgcagatgaggctactgcctcacaacagcctccacaggcacagctccatcgttacaatggcctctttagacccagctcctgcctcccagccttctctccaggccctgaacattctcagtgcttgccactatgcccaactaatatttggaattttcgtatacgtggattccagaggggtgacagcgaaacgtgagtaagcatggattttggtatatgcagagatggggggctggaactaattctgtatactgagggacgacgactgtatatgtttttacaattacgctgtaggatacatactgttgcatagccttgaaaataataatttttaattgagtgg

SEQ ID NO: 459755 - DNA, 620 bp, Homo sapiens
cccatttaggcccaactcatgactgtgaggccatttccaggcctagtgcctgcctcgtggctgactcttgaagcccaaaacttcctcaaatcaggcttttgcccaacttctgtctactgtcggactctacaggtcagcctctgcctcacagtggaccctccagacccagatggtgtctcactgtggcatcctcaggcgaagctcctgccttttggcagcctctccaggcccagctcctcctgcctcccagtggcctctttcggcccagcccagctcatgcctcccggcggccttcccaagccccgcttttgactttcggtggcctctgcaggcctcgacaaggcccagcctcctgcctcccgaaggcctgcacaggcccagcctctgcctcacagcggactctccacgcccagctagctgttgcttcactgcggcctcccgagtccaaagctcctgcctctcggccgcttcggcaggcccaggctcccgcctgccagtggcctcttcaggcccatggggctcattcctgacaacggcctttccaggcccagtttttcccttccggcggcctctccgggcccagaacctcctcaagtcggcctctccagacccacttgcac

SEQ ID NO: 459756 - DNA, 2225 bp, Homo sapiens
ctcgagctgtaaaagccaaaggtccggtgatgatcccatacccttttttccagtctcatgttgaagatttttatgtagaaggccttcccaaaggaatttttttttttttttttttgagatggagttttcactcttatcgcccaggctggggtgcaatggcgcaaccttgctggtcactgcaacctctgcctcctgggttcaagaaattctcctgccttagcctcccaagtcactgggattacaggtgcccaccaccataccaggctaatttttgtatttttagtggagatgcggtttcaccatgttggccgggccagtctcgaactcctgacgtcaagtgatcttcccgcctcgactcctgatatcaagtgatcttcccgcctcggcctcccagagtgctgagattacagacgtgaacccatgcctggccaggaattttgttttttaggaaggctttctactaatggaattcctggccttgagaggatgttactttagaaggaaaggatttttttgttattaaaagctggacctaccatgaaagacttctgaatccaagaagagaaactgactgggcaacatgttattcagaaacagggccttgccctgtcactcaggatggagttcagtggtcctatcatggctcattatagcctcaaactcccaggctcaagcaatcctaccatgtcagccttcccagtagctgggactacaggaagtgagctcacaatgactcaagctgccacatactgttgattgtgaaatgccagttgaagcatatgtcctgcaagcttaggggtgctacaagttgaccactgcagcagtaaagatgactctgaagaatggcgtgggatggttcctttcaaatgcacttgagcagcggtctccaaccacagggccacagagctggagctggatctaccatgaaagacttgtgaatccaggaagagagactgactgggcaacatgttattcagtaggtgacctcacagtgactcaagctaccacttactgttgattgtgacgaaatgccagctgaggcacatgccttgggagctaagtggttgctgcccttgaccactgtgaagactggtgtgggaagggtcgttttggatgcacttgagcaggggtccccaacccctgagccatggagccgcaaggagccacacagcaggaggtgggaacatccagttgcaggaaaacaagcttaacacgcccactgattctacattatgtcagcctctacagaccaagctcatgactcacaatggcctatttaggcccataccctacgtcacggcagcctccgcagatgaggctactgcctcacaacagcctccacaggcacagctccatcgttacaatggcctctttagacccagctcctgcctcccagccttctctccaggccctgaacattctcaggtctccctctgttgtccaaggctggagtgtagtagtgctatcgcagctgactgcagcctcaaccttccaggctgaagcgatcctcccacctcaacctcccacgtggctgagactacaggtgcttgccactatgcccaactaatatttggaattttcgtatacgtggattccagaggggtgacagcgaaacgtgggaccatccagttgcaggaaaacaagcttaacacgcccactgattctacattatgctcctacctcccggcagcctctccaggcccagaactttctccagtcagcctctacagaccaagctcatgactctcaatggcctatttaggcccataccctacgtcacggcagcctccgcagatgaggctactgcctcacaacagcctccacaggcacagctccatcgttacaatggcctctttagacccagctcctgcctcccagccttctctccaggccctgaactttctcaagtcgacctcaccaggcccagctcatgcatcttggtggcccctccaggcccagcctctgcctcccgtcagcctctacagtcccaacgtctgcctcacagcagattcttcacgcccagcatctacctcactgtggaccccccaagccaagctcccaacctttcagcagcttctacacacccagctcccgcctgccagtggcctcttcaggcccatggggctcattcctgacaacggcctttccaggcccagtttttcccttccggcggcctctccgggcccagaacctcctcaagtcggcctctccagacccacttgcac

SEQ ID NO: 459757 - DNA, 1658 bp, Homo sapiens
aagattcccttgagaacaagtactgtccctagtttcccagtgctggaatatagaaaatggatggacaactggacctaccatgaaagacttctgaatccaagaagagaaactgactgggcaacatgttattcagaaacagggccttgccctgtcactcaggatggagttcagtggtcctatcatggctcattatagcctcaaactcccaggctcaagcaatcctaccatgtcagccttcccagtagctgggactacagagacgaggtttcgccatgtttcccagactgttctcaaactcctgagctcaaagcagtccacccaccttggcccccagagttctgggattacagctggatctaccatgaaagacttgtgaatccaggaagagagactgactgggcaacatgttattcaggtacaaaaagatttggactgtaacttaaaaatgatcaaattatgtttcccatgcatcaggtgcaatgggaagctcttctggagagtgagagaagcttccagttaagactggtgtgggaagggtcgttttggatgcacttgagcaggggtccccaacccctgagccatggagccgcaaggagccacacagcaggaggtgggaacatccagttgcaggaaaacaagcttaacacgcccactgattctacattatgtcagcctctacagaccaagctcatgactcacaatggcctatttaggcccataccctacgtcacggcagcctccgcagatgaggctactgcctcacaacagcctccacaggcacagctccatcgttacaatggcctctttagacccagctcctgcctcccagccttctctccaggccctgaacattctcaggtctccctctgttgtccaaggctggagtgtagtagtgctatcgcagctgactgcagcctcaaccttccaggctgaagcgatcctcccacctcaacctcccacgtggctgagactacaggtgcttgccactatgcccaactaatatttggaattttcgtatacgtggattccagaggggtgacagcgaaacgtgggaccatccagttgcaggaaaacaagcttaacacgcccactgattctacattatgctcctacctcccggcagcctctccaggcccagaactttctccagtcagcctctacagaccaagctcatgactctcaatggcctatttaggcccataccctacgtcacggcagcctccgcagatgaggctactgcctcacaacagcctccacaggcacagctccatcgttacaatggcctctttagacccagctcctgcctcccagccttctctccaggccctgaactttctcaagtcgacctcaccaggcccagctcatgcatcttggtggcccctccaggcccagcctctgcctcccgtcagcctctacagtcccaacgtctgcctcacagcagattcttcacgcccagcatctacctcactgtggaccccccaagccaagctcccaacctttcagcagcttctacacacccagctcccgcctgccagtggcctcttcaggcccatggggctcattcctgacaacggcctttccaggcccagtttttcccttccggcggcctctccgggcccagaacctcctcaagtcggcctctccagacccacttgcac

SEQ ID NO: 459758 - DNA, 2513 bp, Homo sapiens
ctcgagctgtaaaagccaaaggtccggtgatgatcccatacccttttttccagtctcatgttgaagatttttatgtagaaggccttcccaaaggaatttttttttttttttttttgagatggagttttcactcttatcgcccaggctggggtgcaatggcgcaaccttgctggtcactgcaacctctgcctcctgggttcaagaaattctcctgccttagcctcccaagtcactgggattacaggtgcccaccaccataccaggctaatttttgtatttttagtggagatgcggtttcaccatgttggccgggccagtctcgaactcctgacgtcaagtgatcttcccgcctcgactcctgatatcaagtgatcttcccgcctcggcctcccagagtgctgagattacagacgtgaacccatgcctggccaggaattttgttttttaggaaggctttctactaatggaattcctggccttgagaggatgttactttagaaggaaaggatttttttgttattaaaagctggacctaccatgaaagacttctgaatccaagaagagaaactgactgggcaacatgttattcagaaacagggccttgccctgtcactcaggatggagttcagtggtcctatcatggctcattatagcctcaaactcccaggctcaagcaatcctaccatgtcagccttcccagtagctgggactacagagacgaggtttcgccatgtttcccagactgttctcaaactcctgagctcaaagcagtccacccaccttggcccccagagttctgggattacaggtgtgagccatcttgctcattctagtttaaacttttgagtggtttgtgtctcctgattggactcctacaaatacagaattgatgctaggaagggtaccaggagatagacgcacacagatgggatttgggaataggtttggttatccaaggagcagtgctgagctccttgcaatgggatatgggatgctggtgatttccaggaagtgagctcacaatgactcaagctgccacatactgttgattgtgaaatgccagttgaagcatatgtcctgcaagcttaggggtgctacaagttgaccactgcagcagtaaagatgactctgaagaatggcgtgggatggttcctttcaaatgcacttgagcagcggtctccaaccacagggccacagagctggagctggatctaccatgaaagacttgtgaatccaggaagagagactgactgggcaacatgttattcaggtacaaaaagatttggactgtaacttaaaaatgatcaaattatgtttcccatgcatcaggtgcaatgggaagctcttctggagagtgagagaagcttccagttaagactggtgtgggaagggtcgttttggatgcacttgagcaggggtccccaacccctgagccatggagccgcaaggagccacacagcaggaggtgggaacatccagttgcaggaaaacaagcttaacacgcccactgattctacattatgtcagcctctacagaccaagctcatgactcacaatggcctatttaggcccataccctacgtcacggcagcctccgcagatgaggctactgcctcacaacagcctccacaggcacagctccatcgttacaatggcctctttagacccagctcctgcctcccagccttctctccaggccctgaacattctcaggtctccctctgttgtccaaggctggagtgtagtagtgctatcgcagctgactgcagcctcaaccttccaggctgaagcgatcctcccacctcaacctcccacgtggctgagactacaggtgcttgccactatgcccaactaatatttggaattttcgtatacgtggattccagaggggtgacagcgaaacgtgggaccatccagttgcaggaaaacaagcttaacacgcccactgattctacattatgctcctacctcccggcagcctctccaggcccagaactttctccagtcagcctctacagaccaagctcatgactctcaatggcctatttaggcccataccctacgtcacggcagcctccgcagatgaggctactgcctcacaacagcctccacaggcacagctccatcgttacaatggcctctttagacccagctcctgcctcccagccttctctccaggccctgaactttctcaagtcgacctcaccaggcccagctcatgcatcttggtggcccctccaggcccagcctctgcctcccgtcagcctctacagtcccaacgtctgcctcacagcagattcttcacgcccagcatctacctcactgtggaccccccaagccaagctcccaacctttcagcagcttctacacacccagctcccgcctgccagtggcctcttcaggcccatggggctcattcctgacaacggcctttccaggcccagtttttcccttccggcggcctctccgggcccagaacctcctcaagtcggcctctccagacccacttgcac

SEQ ID NO: 459759 - DNA, 2129 bp, Homo sapiens
ctcgagctgtaaaagccaaaggtccggtgatgatcccatacccttttttccagtctcatgttgaagatttttatgtagaaggccttcccaaaggaatttttttttttttttttttgagatggagttttcactcttatcgcccaggctggggtgcaatggcgcaaccttgctggtcactgcaacctctgcctcctgggttcaagaaattctcctgccttagcctcccaagtcactgggattacaggtgcccaccaccataccaggctaatttttgtatttttagtggagatgcggtttcaccatgttggccgggccagtctcgaactcctgacgtcaagtgatcttcccgcctcgactcctgatatcaagtgatcttcccgcctcggcctcccagagtgctgagattacagacgtgaacccatgcctggccaggaattttgttttttaggaaggctttctactaatggaattcctggccttgagaggatgttactttagaaggaaaggatttttttgttattaaaagctggacctaccatgaaagacttctgaatccaagaagagaaactgactgggcaacatgttattcagaaacagggccttgccctgtcactcaggatggagttcagtggtcctatcatggctcattatagcctcaaactcccaggctcaagcaatcctaccatgtcagccttcccagtagctgggactacagagacgaggtttcgccatgtttcccagactgttctcaaactcctgagctcaaagcagtccacccaccttggcccccagagttctgggattacaggtgtgagccatcttgctcattctagtttaaacttttgagtggtttgtgtctcctgattggactcctacaaatacagaattgatgctaggaagggtaccaggagatagacgcacacagatgggatttgggaataggtttggttatccaaggagcagtgctgagctccttgcaatgggatatgggatgctggtgatttccaggaagtgagctcacaatgactcaagctgccacatactgttgattgtgaaatgccagttgaagcatatgtcctgcaagcttaggggtgctacaagttgaccactgcagcagtaaagatgactctgaagaatggcgtgggatggttcctttcaaatgcacttgagcagcggtctccaaccacagggccacagagctggagctggatctaccatgaaagacttgtgaatccaggaagagagactgactgggcaacatgttattcaggtgggaacatccagttgcaggaaaacaagcttaacacgcccactgattctacattatgggtctccctctgttgtccaaggctggagtgtagtagtgctatcgcagctgactgcagcctcaaccttccaggctgaagcgatcctcccacctcaacctcccacgtggctgagactacaggtgcttgccactatgcccaactaatatttggaattttcgtatacgtggattccagaggggtgacagcgaaacgtgggaccatccagttgcaggaaaacaagcttaacacgcccactgattctacattatgctcctacctcccggcagcctctccaggcccagaactttctccagtcagcctctacagaccaagctcatgactctcaatggcctatttaggcccataccctacgtcacggcagcctccgcagatgaggctactgcctcacaacagcctccacaggcacagctccatcgttacaatggcctctttagacccagctcctgcctcccagccttctctccaggccctgaactttctcaagtcgacctcaccaggcccagctcatgcatcttggtggcccctccaggcccagcctctgcctcccgtcagcctctacagtcccaacgtctgcctcacagcagattcttcacgcccagcatctacctcactgtggaccccccaagccaagctcccaacctttcagcagcttctacacacccagctcccgcctgccagtggcctcttcaggcccatggggctcattcctgacaacggcctttccaggcccagtttttcccttccggcggcctctccgggcccagaacctcctcaagtcggcctctccagacccacttgcac

SEQ ID NO: 459760 - DNA, 581 bp, Homo sapiens
acgcttccacgccatgattctacattatgctcctacctcccggcagcctctccaggcccagaactttctccagtcagcctctacagaccaagctcatgactctcaatggcctatttaggcccataccctacgtcacggcagcctccgcagatgaggctactgcctcacaacagcctccacaggcacagctccatcgttacaatggcctctttagacccagctcctgcctcccagccttctctccaggccctgaactttctcaagtcgacctcaccaggcccagctcatgcatcttggtggcccctccaggcccagcctctgcctcccgtcagcctctacagtcccaacgtctgcctcacagcagattcttcacgcccagcatctacctcactgtggaccccccaagccaagctcccaacctttcagcagcttctacacacccagctcccgcctgccagtggcctcttcaggcccatggggctcattcctgacaacggcctttccaggcccagtttttcccttccggcggcctctccgggcccagaacctcctcaagtcggcctctccagacccacttgcac

SEQ ID NO: 459761 - DNA, 696 bp, Homo sapiens
aagaaaggaatagataagggaagaggaggcaaaggtgaatatatctgatgaatcggaaaaaaagctccgtagatacaagtcaaacacaactctctctggctctggagtctacattcttatccactgtgcagtgcactgtactgacagaaggggaaaaccctacagtgtgtgatgcacttcctatgtcacagagtatgaagaatgtcacaaggtcacggaatttcagagctgaaagggatcatctagtccaacccattcatttcatgggtagagaactgaaacccagagaaaatagaaatgccaccacctcggtgccagatctcctagatgcccacctacaggaaccctacgaagataaaaattatcacaatttatacccaacatacctaaagaaccctgtccattgtgccctcattggttgtcctcttaacttggacaaatgtaaggcatcttaccagttcttatgcactgcaatggccactagatagatttgatgctaaccatcttaaatcagagttcctccattcttgagctactgatgttgactcatcatgtatgtgcatgcacatgagtttaaagaagagctccagggttctatattgtctaagttttgtttcagaatgtctttctcttgatactatatttgactgaaaataaaacttgagtcatacttcccctccttcagaattgtgtagt

SEQ ID NO: 459762 - DNA, 596 bp, Homo sapiens
aagaaaggaatagataagggaagaggaggcaaaggtgaatatatctgatgaatcggaaaaaaagctccgtagatacaagtcaaacacaactctctctggctctggagtctacattcttatccactgtgcagtgcactgtactgacagaaggggaaaaccctacagtgtgtgatgcacttcctatgtcacagagtatgaagaatgtcacaaggtcacggaatttcagagctgaaagggatcatctagtccaacccattcatttcatgggtagagaactgaaacccagagaaaatagaaatgccaccacctcggtgccagatctcctagatgcccacctacaggtaaggcatcttaccagttcttatgcactgcaatggccactagatagatttgatgctaaccatcttaaatcagagttcctccattcttgagctactgatgttgactcatcatgtatgtgcatgcacatgagtttaaagaagagctccagggttctatattgtctaagttttgtttcagaatgtctttctcttgatactatatttgactgaaaataaaacttgagtcatacttcccctccttcagaattgtgtagt

SEQ ID NO: 459763 - DNA, 3295 bp, Homo sapiens
ccagaaggttgtggggcaagtgtgcagtgtattgtgtactttacaaaagcattgtcaactttatccagaacggagtctagctctgtcaccaggctggagcacagtggcatgatctcgactcactgcaacctccactgaagaaggaattcatgaattttacaagtataatcaaagaccaccaagaaatttttactttttccttcaaaagctaagtgtagtgtagcaccccctgcccatagtctaagttacagaagaatactaactgcctgtttttctttctgtgttgtgagccttatctgttctcaccagtttcacattccttgaggctcagtgagttcctgcgcacctccctagcacagctgcaaagttacaaggttgatatgcatatgttacagaaacatagtttcccaaggatgtggaacatgtagtatagataaatgtaaaagactgatcaactgcctttgttctcgcttgtgtaagtagacttcatgaatcacatagctcccggccactgactgcttaaaaggtggctgcattctttctccagggctcagactttcctggacgctagtcctactgagccaggtgatccccttaataaaggctttcctgaactctcttcagtctctcccgtctctgattgtcccataacatttctgggggcctgtctgggattggagatggcaggtttctgtctcctttgcctaaggagaacggctcccatgtattggagcctcgccctgacagcgcaaacggaaccgactcaggagttgcaggacagtcacaggagcaggctgctgaacttgctgagataccaaggggctctgatacaaggaataaaagctggagggaaaaaggcaacaaacactggaaaggtttcagaggtccatcagaaaccagatgaaagtaccagtgagttctatgagaagctttgtgaggcttaccggctctacacaccttttgacccagaagtggcagggaatcagtgcatggttaatgcggcatttcttatccaagtggcaactaaagtgtttgtaaatcaagatgaagaagcaaagtgggaggccaagcatagagtgaaggaaaaggcagagttcttggctgcagccctgattgaaagagaggctggatttgcaagaggacatggacatggtcgtggatgcagtcatggtaaaggacaagctagggctaggccaggtcaggagaccaggacaggccctgaggagcccatggtctcaatggtagtagggggccgaaaaatagaccttatggtagacacaggtgctgaacactcagctgtgactcaaacaattagggtgttatcaaaactctatgctaatattattggggccacaggacggtgtgagcttggacaggagcgaaaagagattgtctgtagcattcctcagccagacagaaggcagcaagtgcaggaattcctaggggcagctggtttttgccaattatggattcctgactactggctcctagcaaagcctttatatgaggcaaccaaaggaggggaaaaggagcccctccagccagacagaaggcagcaagtgcaggaattcctaggggcagctggtttttgccaattatggattcctgactactggctcctagcaaagcctttatatgaggcaaccaaaggaggggaaaaggagcccctcctttggggaaaagaacaggacatggctttcaaggaaatcaagaaagcttcaatccaggccccagcactaggactgccagacatgacaaagcccttttacctgatgctaagataccaaggactcctatgtgagaatccatacatcaccttagaggctgtgaataccctaaatctggccacactgttaccaatagaatgtgcagaacatggaaagtccctgttatgtgccccagggtaccactgctgtgtagaaacagtggatgaagtattttcaagctgggaagacttaaaggatcaacccttaagaaacccagatgttgaatattttactgatggaagcagcttcatatctgagggtatcaaaaaggccagatatgccgtagtcacattaagctcggtggctgaagcctgccccctaccagtaggaacctcagcgcagaaggtagaactaatagctctcacaagagcactatttctagtgaagggaaagtcagtgaatatctatgctgactcaaaatatgcttttgccaccttgcatgctcatggagccatttacgatgaaagaggactgttaactactgaaggaaaagaaataaagaacaaaaaggaaatagagcagctcctagaggctgtgtgggctccaaaggaagtagcagtcatccattgtaaaggacagcaaacaggaagaagtgataaggctacaggaaacagcaaagcagacaaggaagcaagaaagactgcaatgacagaaaaaacaaagaaagaagagacttatgccatgcccttattagagcctccccttgcagacactcctaattactcgtccaatgagaaggcatcgtttgtgcaggaaaacgggagttatcagaaagaaggctggtggaagttttcagatgggagacttaccattccagaagccattgccccccaatttataaagcagtttcaccaaggaacacacatggggaagacagatttaaagattctcatagggcggtatttcattgtgccatgcctaactgccatgactcgagccatctacgagcagtgtgttacttgtgcccagaataacccaaggcaagggcctacttggcctcaaggaattcaggaaacaggagcagtgccatgtgaaaacctacttgtagactttaccgaactgcctcaggctggaggctatcggtacatgttagtgtttgtctgcaccttttcaagatttggactgcctctaaccttaggctcagaaaatggaccagattttgtggcagaagtaaaaggttgtaaggatgaactggacactgaaacaactgttgaagaagttttgccaagagactcatttaaggtgggaccaggtattgcccatggtccttctctgagtcaggtgtacccctacaaaattaactgggtgttcacctatgagatagtgcatggcccaccacccccactcatatctcaagtaaaaggagatttaaaggaaattggagaactgaccctaggaagacaaatgcaggtattaggtgaggtaatgcaagaagtacaagggtgagtaagagaaagaatacctgttagccttacagatgcaatacattcctttcaacctggggacttcgtatgggttaaatgctggaa

SEQ ID NO: 459764 - DNA, 1735 bp, Homo sapiens
gacccgctaactagatagtgtggaacctctgctctgtgaaaaaactcatagaattcctcatcttatgaacgagagttggttagagaaaagagtcccagacctcaatggctgccgggatagacagaagtacagagattggctgtccttagccaatgcagcagctccatctgcatccctggatccttttatgttctgttacatctttcatactgacttacctccaccagctttctttgcttctagaactataactagactcaagtcccagcaggcccatttaggggcttttagccttctccaaaggagactacaactttttaccaagataactgtgcactggggaaaaggaaataaccagaccttttggagactactggatgcagcttttaattccaggagaacccacacattactgtggcccttcagtcagagtagttgcttatggaggccaattaatcaatggagttttagctcagatccatcttacagtgggcccagtggtccccaagcccatcccatggttattttcccatgaagtaacttcccatttagtcagcactgtactgcaacgctgtgaccacttggggcccacccaatgaaagagagtttgaaacaagtccaaagaagagcaatgaaaataattaaatggttggaaaattgtctgtctaaataaaggtcacagacactgggcctatttaatgcagaaatatgaaggggcaaacctatccacattcctcaaggatgtgaaaagaaataggcagagagatcattttcttcagtttttcaatggaagaaaaaatacattcaaaagacgtcttcaccatacaaggaattctttgttcagactggctactgacattccaaacaaacctacactcaagataaagttatcctctcggaacactcagacattttttttttcttccctatcatcaacttgccaacattaaaggcagttctcacttttagacacaacgtgtttgatgcaaatgcaacttaaagaagattactgtaaggtctcgcctggctggtcttgtattacatcctgattatgcatgtgctgtcacatgagagtggaagccaccaaataagtagctatggtcggtgaaaagtgaaatacgagtctttattattaagtgtccagtaagaggtgtggtgaaaagcaggactcccaaattgaactggtgaaaaatatgaactatctgcaccttacaagaaaataagcaaaaacctttcttctggacatcttaagtagtcttttttttttttttttttttttttagagttgataattaaactgtgaaagagagagcatcgatacactgtcttcaattcttaagcaggcccacttctccactttctaagtttctcactctcattagcaatatatattgcatttagcttcattcctagatggaccatttgtgaagctattgaattattaaaagcaggtaccttttcattgagcctcaatttaaggcttgaacttagagctgttttgctgaattggcaagaggggagaaaaggaaagtaacaagactttcaagtaaattactacctagaacattttttaaagtatttttggtcaaatcaaatatagggagcaccaaattcccagaaagaaagattcccttgaatgtatatttttcacaaattttgtgggtcagctgtctatatttttcatgaaagcctaaaatacttcaaaatgctttctgcatatttatatcacttgtgt

SEQ ID NO: 459765 - DNA, 1127 bp, Homo sapiens
ggagcgctgggagttaggttgtttgccggcgtagcggccagcgcctgagcccgcccttgatcttcgctgtggcatggcggacgaggggaagtcgtacagcgaacacgatgatgaacgcgttaatttccctcaaagaaagaagaaaggccggggtcccttccggtggaaatatggtgaaggaaaccgtaggtctggaagaggcggttctggtattcggtcttcccgccttgaggaagatgatggagatgtggcaatgagtgatgcccaggatggtccccgagtacgatacaacccctataccacccgacctaaccgtcggggtgatacttggcatgatcgagatcgcattcatgttactgtgcggagagacagagctcctccagagagaggaggggctggcaccagccaggatgggacctcaaagaactggttcaagattacaattccttatggcagaaagtatgacaaggcatggctcctgagcatgattcagagcaagtgcagtgtgcccttcacccctattgagtttcactatgagaatacacgggcccagttcttcgttgaagacgccagtactgcctctgcattgaaggctgtcaactataagattttggatcgggagaaccgaaggatatctatcatcatcaactcttctgctccaccccacactatactgaatgaactgaagccagaacaagtagaacagctaaagctgatcatgagcaaacgatacgatggctcccaacaagcccttgacctcaaaggcctccgttcagacccagatttggtggcccagaacattgacgttgtcctgaatcgcagaagctgtatggcagctaccctgaggatcattgaagagaacatccctgagctattgtccttgaacttgagcaacaacaggctgtacaggctggatgacatgtctagcattgttcagaaggcacccaacctgaagatcctaaacctttctggaaatgaattgaagtctgagcgggaattggacaagataaaggggctgaagctagaagagctctggctcgatggaaactccctgtgtgacaccttccgagaccagtccacctacatcagcgccattcgcgaacgatttcccaagttactacgcctgg

SEQ ID NO: 459766 - DNA, 1213 bp, Homo sapiens
ggagtttgcatggagatggcctctgtcgttaaacacgatgatgaacgcgttaatttccctcaaagaaagaagaaaggccggggtcccttccggtggaaatatggtgaaggaaaccgtaggtctggaagaggcggttctggtattcggtcttcccgccttgaggaagatgatggagatgtggcaatgagtgatgcccaggatggtccccgagtacgatacaacccctataccacccgacctaaccgtcggggtgatacttggcatgatcgagatcgcattcatgttactgtgcggagagacagagctcctccagagagaggaggggctggcaccagccaggatgggacctcaaagaactggttcaagattacaattccttatggcagaaagtatgacaaggcatggctcctgagcatgattcagagcaagtgcagtgtgcccttcacccctattgagtttcactatgagaatacacgggcccagttcttcgttgaagacgccagtactgcctctgcattgaaggctgtcaactataagattttggatcgggagaaccgaaggatatctatcatcatcaactcttctgctccaccccacactatactgaatgaactgaagccagaacaagtagaacagctaaagctgatcatgagcaaacgatacgatggctcccaacaagcccttgacctcaaaggcctccgttcagacccagatttggtggcccagaacattgacgttgtcctgaatcgcagaagctgtatggcagctaccctgaggatcattgaagagaacatccctgagctattgtccttgaacttgagcaacaacaggctgtacaggctggatgacatgtctagcattgttcagaaggcacccaacctgaagatcctaaacctttctggaaatgaattgaagtctgagcgggaattggacaagataaaggggctgaagctagaagagctctggctcgatggaaactccctgtgtgacaccttccgagaccagtccacctacatcagccccacctgctcatctccctgccccaacatcctgtgccatccctgtggtgtgtttgggtcttggccaaagccagacctggcagaactgatggatacctggtgaggcagcggagcccctgggctcccaccccattccctcctcccggggctgcacagcgccattcgcgaacgatttcccaagttactacgcctgg

SEQ ID NO: 459767 - DNA, 2237 bp, Homo sapiens
cgtgtgcaccctagcgtcagcctcgagtttgaccagcaacaggggtcggtgtgtccctctgaatctgagatctatgaggcagtagctggggacaggatggcaggagcgcccatggctgctgctgtgcagcctgctgaggtgactgttgaagttggtgaggacctccacatgcaccacgttcgtgaccgggagatgcctgaagctttggagtttaacctttctgccaatccagaggcaagcacaatattccagaggaactctcaaacagatgctttggagtttaacccttctgccaatccagaggcaagcacaatattccagaggaactctcaaacagatgttgtagaaataagaagaagcaactgtacaaaccattgtgaccttggagatacctcatcatatcacacaaagagatgcagatagatctttgagcatacctgatgaacagttacactcatttgcggtttccaccgtgcacattacgaagaacagaaatggaggtgggagtttaaataactattcctcctccattccatcgactcccagcaccagccaggaggaccctcagttcagtgttcctcccactgccaacacacccacccccgtttgcaagcggtccatgcgctggtccaacctgtttacatctgagaaagggagtgacccagacaaagagaggaaagccccggagaatcatgctgacaccatcgggagcggcagagccatccccattaaacagggcatgctcttaaagcgaagtgggaaatggctgaagacatggaaaaagaaatacgtcaccctgtgttccaatggcgtgctcacctattattcaagcttaggtgattatatgaagaatattcataaaaaagagattgaccttcagacatctaccatcaaagtcccaggaaagtggccatccctagccacatcggcctgcacacccatctccagctctaaaagcaatgacctatccaaggacatggacaccgggctgggtgactccatatgcttcagccccagtatctccagcaccaccggccccaagctcaacccgcccccctctcctcatgccaataaaaagaaacacctaaagaagaaaagcaccaacaactttatgattgtgtctgccactggccaaacgtggcactttgaagccacgacatatgaggagcgggatgcctgggtccaagccatccagagccagatcctggccagcctgcagtcatgcgagagcagtaaaagcaagtcccagctgaccagccagagcgaggccatggccctgcagtcgatccaaaacatgcgtgggaacgcccactgtgtggactgtgagacccagaatcctaagtgggccagtttgaacttgggagtcctcatgtgtattgaatgctcaggtatccaccgcagtcttggcacccgcctttcccgtgtgcgatctctggagctggatgactggccagttgagctcaggaaggttatgtcatctattggcaatgacctagccaacagcatctgggaagggagcagccagggacagacaaaaccctcagaaaagtccacgagggaagaaaaggaacggtggatcctttccaaatatgaggagaagctctttctggccccactaccctgcactgatctgtccctgggccagcagctgctgcgggccaccgctgatgaggacctgcagacagccatcctgctgctggcacatggctcccgtgaggaggtgaacgagacctgtggggagggagacggctgcacggcgctccatctggcctgccgcaaggggaatgtggtcctggcgcagctcctgatctggtacggggtggacgtcatggcccgagatgcccacgggaacacagcgctgacctacgcccggcaggcctccagccaggagtgcatcaacgtgcttctgcagtacggctgccccgacgaacagcatccaattgacacaggatttcctgtttctcttgagtttttctttctgaaggctcctgtgtctgccggcctaactcatttgaaggagcatacactattgtgtgggagtcatacttattcctaaccattttgaagagattcatctttaaattaatatattacattaaatgtcttccttcagaaaagacaatcttgtgaacatcgcctttggtgactgaacatcacgagatataaaacaggtagaaaaagaaaatatttggggtggctctaactcttaaatcccatgaaataatcccctcttcttt

SEQ ID NO: 459768 - DNA, 1900 bp, Homo sapiens
cacagccatcagcattatcttacaatgacaataatatctgtgaccttggagatacctcatcatatcacacaaagagatgcagatagatctttgagcatacctgatgaacagttacactcatttgcggtttccaccgtgcacattacgaagaacagaaatggaggtgggagtttaaataactattcctcctccattccatcgactcccagcaccagccaggaggaccctcagttcagtgttcctcccactgccaacacacccacccccgtttgcaagcggtccatgcgctggtccaacctgtttacatctgagaaagggagtgacccagacaaagagaggaaagccccggagaatcatgctgacaccatcgggagcggcagagccatccccattaaacagggcatgctcttaaagcgaagtgggaaatggctgaagacatggaaaaagaaatacgtcaccctgtgttccaatggcgtgctcacctattattcaagcttaggtgattatatgaagaatattcataaaaaagagattgaccttcagacatctaccatcaaagtcccaggaaagtggccatccctagccacatcggcctgcacacccatctccagctctaaaagcaatgacctatccaaggacatggacaccgggctgggtgactccatatgcttcagccccagtatctccagcaccaccggccccaagctcaacccgcccccctctcctcatgccaataaaaagaaacacctaaagaagaaaagcaccaacaactttatgattgtgtctgccactggccaaacgtggcactttgaagccacgacatatgaggagcgggatgcctgggtccaagccatccagagccagatcctggccagcctgcagtcatgcgagagcagtaaaagcaagtcccagctgaccagccagagcgaggccatggccctgcagtcgatccaaaacatgcgtgggaacgcccactgtgtggactgtgagacccagaatcctaagtgggccagtttgaacttgggagtcctcatgtgtattgaatgctcaggtatccaccgcagtcttggcacccgcctttcccgtgtgcgatctctggagctggatgactggccagttgagctcaggaaggttatgtcatctattggcaatgacctagccaacagcatctgggaagggagcagccagggacagacaaaaccctcagaaaagtccacgagggaagaaaaggaacggtggatcctttccaaatatgaggagaagctctttctggccccactaccctgcactgatctgtccctgggccagcagctgctgcgggccaccgctgatgaggacctgcagacagccatcctgctgctggcacatggctcccgtgaggaggtgaacgagacctgtggggagggagacggctgcacggcgctccatctggcctgccgcaaggggaatgtggtcctggcgcagctcctgatctggtacggggtggacgtcatggcccgagatgcccacgggaacacagcgctgacctacgcccggcaggcctccagccaggagtgcatcaacgtgcttctgcagtacggctgccccgacgaacagcatccaattgacacaggatttcctgtttctcttgagtttttctttctgaaggctcctgtgtctgccggcctaactcatttgaaggagcatacactattgtgtgggagtcatacttattcctaaccattttgaagagattcatctttaaattaatatattacattaaatgtcttccttcagaaaagacaatcttgtgaacatcgcctttggtgactgaacatcacgagatataaaacaggtagaaaaagaaaatatttggggtggctctaactcttaaatcccatgaaataatcccctcttcttt

SEQ ID NO: 459769 - DNA, 400 bp, Homo sapiens
cgtgtgcaccctagcgtcagcctcgagtttgaccagcaacaggggtcggtgtgtccctctgaatctgagatctatgaggcagtagctggggacaggatggcaggagcgcccatggctgctgctgtgcagcctgctgaggtgactgttgaagttggtgaggacctccacatgcaccacgttcgtgaccgggagatgcctgaagctttggagtttaacctttctgccaatccagaggcaagcacaatattccagaggaactctcaaacagatgctttggagtttaacccttctgccaatccagaggcaagcacaatattccagaggaactctcaaacagatggtgagacgacattgttttttccgccaagagaaagaataaaagctcttgtttgatcaggtt

SEQ ID NO: 459770 - DNA, 1524 bp, Homo sapiens
aaaatgtgggaagacctgcctttgccaataacaagactccttggaagataagatggccccttactctctctaacaacagacttccaagaggaatttctctatgatcttgttccaggaatgtgtttcccaagaagcaagtctggattcatcttatgtacactcctggcctgtctctgaaattcggggatctgctcagcagaccggaacaacccaggaggcatctgggctctggaaggaaatacaagccagccagttccagcagctttttcccaaagcctggagcaggctctgctctgtagctactagcatttttacgacagtaacctgaggccactcatcttaggtctgattgatgagtaggtcagaaatcatcccagcgtggaaccctccttgactcacgctgtctgggtgaacacacagacccattccactgtttcctggccagcttgacttcactcttcttatttttcttgggctaagaaaagacattctttgctggatataaatatcatgcatttcagaaagttcatatgtacaaataacatggattcgggatcattacagttgttaattttagtaaaataatttttttctttggcttgcttcttgaattctttagtgatcttggacatacaaacacagacttcttgttctaattatctcaggtgcctcctgaccccctcccttgtgtcttcacctccctgaaaagtggatgtttttgtacaggttgtgcatatcggcggctctgtggccaatccagtactatcctatcacgtgctggggacacgatgtggtcagacgtatcgtcgttctcatggtctcaagttcacattgtctctcacacaggtacttggatctgctatagacggccacgggcctcctggatttggtatacaggggtccagacaccttggatttgatatagagggttttgggcctcctggatttggtaaagaaggattcagagtgcctggatttggtatagaaggattcagggctcctgagtttggtatagaggaggcatggctcctggatttggtatagagggattcagggctcctggatttggtatagaggattcagggctcctgggtttggtatagagggattcagggttcctggatttggtatagagggattcagggttcctggatttggtatagagggattcagggctcctgggtttggtatagagggattcagggctcctgggtttgatagaggattcagggctcctggatttggtatgcagggattcagggctcctggatttggtatagaggattcagggctcctggattttgtgtagagggattcagggctcctggatttcgtatagagggattcagggctcctggatttggtgtagagggattcagggctcctgggtttggtatagaggatgcagcgctcctggatttggtatcaaatttcctggatttggtatcaaatttcctgtctcttagactctctttttctttttccattcttccagcttgcctggctgcctcttccctgtatctt

SEQ ID NO: 459771 - DNA, 2593 bp, Homo sapiens
aggtgaaccacagcaaccccttccagagagcagatgcttaatttttaggctgtggtgataactagaataacaggacctaataataatggggcagaaaagaagtcaaggcaagggatccctgcagctctcaagctgttctctctgcataggcttcatagtgggagagcaaaggggcttagtaaatgggcggcaggatggcctgaaaaacactatcaacaacagcaaaactatcaccataatcatcaccaacaccatcagaaacaccaccaacaccatcatcactgtgaccaataccaccatgaacacccacaccatcatgatcaacaccatcaccaacaccatcaaaaatgttgtcagaaataccattactaacagcaaaatgatcattaccatcgtcaacacaatcagaaacaccattatcatcaccaccaacacctgtttttctgatggtgttggtgatgatgatggtgatgatttcactgttggtgatgctgtttctaatggggtttatgatattgttggtattggtgatgttattggtgttgatgagggatatgatttgtacaataataacggtgttggtggtgatgataatggtgtttctgattgtgttgacgatggtaatgatcattttgctgttagtaatggtatttctgacaacatttttgatggtgttggtgatggtgttgatcatgatggtgtgggtgttcatggtggtattggtcacagtgatgatggtgttggtggtgtttctgatggtgttggtgatgattatggtgatagttttgctgttgttgatagtgtttctggtggcatttttgatggtgttgtgtttctgattgtgttggtgatgcttatgatgctggtgatggtggtgatggtgtttctgattgtgatggtgatggttataatgatgaagaaggctgaagactgggtacattgatttcctaaagaagacagagtcactgcttagctctacgtgctactgttcacaagcattcctctccataaaaatagttatggtaacttaaaattgcttttcattttttacattgtatcattaactttgtcgatcttgtgccctgttcttccactgcaaagcagactccttggaagataagatggccccttactctctctaacaacagacttccaagaggaatttctctatgatcttgttccaggaatgtgtttcccaagaagcaagtctggattcatcttatgtacactcctggcctgtctctgaaattcggggatctgctcagcagaccggaacaacccaggaggcatctgggctctggaaggaaatacaagccagccagttccagcagctttttcccaaagcctggagcaggctctgctctgtagctactagcatttttacgacagtaacctgaggccactcatcttaggtctgattgatgagtaggtcagaaatcatcccagcgtggaaccctccttgactcacgctgtctgggtgaacacacagacccattccactgtttcctggccagcttgacttcactcttcttatttttcttgggctaagaaaagacattctttgctggatataaatatcatgcatttcagaaagttcatatgtacaaataacatggattcgggatcattacagttgttaattttagtaaaataatttttttctttggcttgcttcttgaattctttagtgatcttggacatacaaacacagacttcttgttctaattatctcaggtgcctcctgaccccctcccttgtgtcttcacctccctgaaaagtggatgtttttgtacaggttgtgcatatcggcggctctgtggccaatccagtactatcctatcacgtgctggggacacgatgtggtcagacgtatcgtcgttctcatggtctcaagttcacattgtctctcacacaggtacttggatctgctatagacggccacgggcctcctggatttggtatacaggggtccagacaccttggatttgatatagagggttttgggcctcctggatttggtaaagaaggattcagagtgcctggatttggtatagaaggattcagggctcctgagtttggtatagaggaggcatggctcctggatttggtatagagggattcagggctcctggatttggtatagaggattcagggctcctgggtttggtatagagggattcagggttcctggatttggtatagagggattcagggttcctggatttggtatagagggattcagggctcctgggtttggtatagagggattcagggctcctgggtttgatagaggattcagggctcctggatttggtatgcagggattcagggctcctggatttggtatagaggattcagggctcctggattttgtgtagagggattcagggctcctggatttcgtatagagggattcagggctcctggatttggtgtagagggattcagggctcctgggtttggtatagaggatgcagcgctcctggatttggtatcaaatttcctggatttggtatcaaatttcctgtctcttagactctctttttctttttccattcttccagcttgcctggctgcctcttccctgtatctt

SEQ ID NO: 459772 - DNA, 2538 bp, Homo sapiens
ctgactgcagaggcctggaaaaccatggaaaaaatcctattcctcaaagtcgagccctacctcctacgcctcttaaatcaattgccacagtgaccaatttgtcagtcacctaaaggcagctatcctgaccacttaagggagaatacttataatctttatacctaagtaaagattgtgagaggaaagaaatggtttaaagaatatgaatgtgtcacacttctgaggttaatgataaatgaattggtcctgcttacctcaggaaaaactttcaagtctttctgaaaaactaatttaattcagtagtattttctaagatttaggttatgtttttaatcaatttggaaaccaagatttacttatagaaaaaaaggaaaaggacctagataggtttattcacatagaatcccaatttcacttctctggatgataccattttctacaaaagcaattatgttctaaaatttaagtgtgctttcttaggctttatcagttcacagtgtttccttaagaaatatgatccagtattttttcctaagactaaagttgagttactacgtttatgactgagaaatgaatgtttgttagtttgtttgtttacaataagaattttttctttaccattttatttttattttccccaggtgtatttgatatagtgtttgcaacaaattcgacccaggtgatcaaaatgattctcaactcttctactgaagatggtattaaaagaatccaagatgattgtcccaaagctggaaggcataattacatatttgtcatgattcctactttatacagtatcatctttgtggtgggaatatttggaaacagcttggtggtgatagtcatttacttttatatgaagctgaagactgtggccagtgtttttcttttgaatttagcactggctgacttatgctttttactgactttgccactatgggctgtctacacagctatggaataccgctggccctttggcaattacctatgtaagattgcttcagccagcgtcagtttcaacctgtacgctagtgtgtttctactcacgtgtctcagcattgatcgatacctggctattgttcacccaatgaagtcccgccttcgacgcacaatgcttgtagccaaagtcacctgcatcatcatttggctgctggcaggcttggccagtttgccagctataatccatcgaaatgtatttttcattgagaacaccaatattacagtttgtgctttccattatgagtcccaaaattcaacccttccgatagggctgggcctgaccaaaaatatactgggtttcctgtttccttttctgatcattcttacaagttatactcttatttggaaggccctaaagaaggcttatgaaattcagaagaacaaaccaagaaatgatgatatttttaagataattatggcaattgtgcttttctttttcttttcctggattccccaccaaatattcacttttctggatgtattgattcaactaggcatcatacgtgactgtagaattgcagatattgtggacacggccatgcctatcaccatttgtatagcttattttacaattgcctgaatcctcttttttatggctttctggggaaaaatttaaaaatattttctccagcttctaaaatatatccccccaaaagccaaatcccactcaaacctttcaacaaaaatgagcacgctttcctaccgcccctcagataatgtaagctcatccaccaagaagcctgcaccatgttttgaggttgagtgacatgttcgaaacctgtccataaagtaattttgtgaaagaaggagcaagagaacattcctctgcagcacttcactaccaaatgagcattagctacttttcagaattgaaggagaaaatgcattatgtggactgaaccgacttttctaaagctctgaacaaaagcttttctttccttttgcaacaagacaaagcaaagccacattttgcattagacagatgacggctgctcgaagaacaatgtcagaaactcgatgaatgtgttgatttgagaaattttactgacagaaatgcaatctccctagcctgcttttgtcctgttattttttatttccacataaaggtatttagaatatattaaatcgttagaggagcaacaggagatgagagttccagattgttctgtccagtttccaaagggcagtaaagttttcgtgccggttttcagctattagcaactgtgctacacttgcacctggtactgcacattttgtacaaagatatgctaagcagtagtcgtcaagttgcagatctttttgtgaaattcaacctgtgtcttataggtttacactgccaaaacaatgcccgtaagatggcttatttgtataatggtgttactaaagtcacatataaaagttaaactactttttcataactctgtatactggtgcatttttttccaacaatatgtgccaatctaggaagcccaagaagagaaaatagattgaagcaggtcacaaaagtgtgaatgaagaaaacaagtttcaaggaatttc

SEQ ID NO: 459773 - DNA, 2485 bp, Homo sapiens
actagagctaaaccaggaggcatagaagcaagtaggaaattcagaatgctcagatgtttagaggttgacaagctaagagccaacagaggaaatgagagagaaagtggctggcaaagaataagaaagccagaagggcaagtggtgtcacagaaagccagacaagaaactgacaacagatggatacatcaccatactctacccacagctgataaattcatcagtgagcccttgacctggtgccaaccaattcttacaaccagtgacacctatgaggtggcctggaacagaaggtccagatatggagagcagcaaatgccaaaaatccaaagcagttttatgcttggccatattcaaaaaccagcgaggtggacaatatgggaggagcagagcaggttaagtatcagacttccacactggggatgcttcagcctcctacctcccattaaagagtagatcccagagactggtgccaacttcagtgcttgcacataaaaagagagtgttcaattctgtgagttggggtggagcagggttgcaaagacagaataagctttatataggcaaaaataaacttgagttaagtctcaggtaaataccagtagtatgccagggaaataggaaacacactcgcttcagcctgcaccaaccaaaatgactgctcaaaggccattcagcccctttatcactgtggctcaactttgattttcttcccagttcatccatgattcagacttcttctgtttcaggagctttgcccatgcgttctgccaccttctgccaggaattacacctgtcccatcccgtcgtctcctgaatgtccagagacaggggtctccccgtgttgtccagaacggtcttgaactcctggtcttcaagcaatcttcctgccttggtctctcaaagtgctgggattacaagtgtgagccaccatacccggtcatagcgctcttataaaatgcatcatcacatttattttataaattcagaaacaaaagtctgtatagagaagttttgaagttactagggacctgaaaatcatactgaagatgtctgcaactaaaaactcgaagagttccgaggctagaggggtcaggagatgaataaaaacgttagccccagctgatcacaatgaggttaatcacaatactaattaaaaatactacagatcctaggacaatggtcagaagagtgactatactttcctgtttgcccttggaaaatcgagggctgacttttctacgtgctcagataacctaaattgatagagagaaagctagcagaggataagataaactagttaactgtaaataagattttgctgttggagaatcttcttgttgctctggttttagatagcggaggaagccaaaaaatatctgctttaagttaccaggagttgaagttcatccctgctgaagttaacaggttgcttccctttttctggtgtattcttactttactggcaaagagaaaataaattaataccttattgttaaaaggactgaaggggtctcccttgctgccaataaaaattgctttgtgttgtaaaatttgggttcagcttgtctcctccttatataagcccagttgaatagactgctgagggaaaatcaaagtttaagagcctggcttttcccgtttggcaactttcatttcctgataatatcggataattaacaaattgtgtgttttaatgccctgtctcttgaagcgcatttgggaaaaatacttcttgtgccctctgagtaatggcttaaatggaagaacatgctcaaaagaatgctttttctcaatgcatgaaacacactcagcatttattattttaattgctacacatcatgtgtatactcgttcgtgtaattatatacatatttaaagggcaagaggaaaagattattttaggactctataattcattatgagcaaggcattgaaaatttctaactcaagatgaaaattcataaaaattctttggcaaaaacaccttagtattctcaatacggtaactgacttttttttttttgcgttatgaaataactagatactaccgtgcgttgcttttggataaaaggggaatgctgtttcttagcctttctgtctctttactaaatggataattcaggactgggaaatgcagctctaagtttgttgtttacgaaaaacacatgctaatgtaacagcgtatgaggaattaaagagaaaatgtcaaacgcgccttgacatccaaaatgcatttagctgttggcttttactacagggcctttcactctccagccgaccccctccaagaccaagtgtttttgcgtgttgggctaaaaatagccagccaagcctaacaactagcttctgattggctcagagcaaaggccactcagccaataagagcttctgggaacaaaagcaattcttttgtgtgagatactcaacccacgtcaaaacagcttcaggctgtagaaatgattttggttgagctttaacaaggtaa

SEQ ID NO: 459774 - DNA, 1935 bp, Homo sapiens
ttgagtgtgttgttgaggtctagtatccattctgtatttgaacggcagcgtcgctcgtctgtcctgacgaaacacactcgcttcagcctgcaccaaccaaaatgactgctcaaaggccattcagcccctttatcactgtggctcaactttgattttcttcccagttcatccatgattcagacttcttctgtttcaggagctttgcccatgcgttctgccaccttctgccaggaattacacctgtcccatcccgtcgtctcctgaatgtccagagacaggggtctccccgtgttgtccagaacggtcttgaactcctggtcttcaagcaatcttcctgccttggtctctcaaagtgctgggattacaagtgtgagccaccatacccggtcatagcgctcttataaaatgcatcatcacatttattttataaattcagaaacaaaagtctgtatagagaagttttgaagttactagggacctgaaaatcatactgaagatgtctgcaactaaaaactcgaagagttccgaggctagaggggtcaggagatgaataaaaacgttagccccagctgatcacaatgaggttaatcacaatactaattaaaaatactacagatcctaggacaatggtcagaagagtgactatactttcctgtttgcccttggaaaatcgagggctgacttttctacgtgctcagataacctaaattgatagagagaaagctagcagaggataagataaactagttaactgtaaataagattttgctgttggagaatcttcttgttgctctggttttagatagcggaggaagccaaaaaatatctgctttaagttaccaggagttgaagttcatccctgctgaagttaacaggttgcttccctttttctggtgtattcttactttactggcaaagagaaaataaattaataccttattgttaaaaggactgaaggggtctcccttgctgccaataaaaattgctttgtgttgtaaaatttgggttcagcttgtctcctccttatataagcccagttgaatagactgctgagggaaaatcaaagtttaagagcctggcttttcccgtttggcaactttcatttcctgataatatcggataattaacaaattgtgtgttttaatgccctgtctcttgaagcgcatttgggaaaaatacttcttgtgccctctgagtaatggcttaaatggaagaacatgctcaaaagaatgctttttctcaatgcatgaaacacactcagcatttattattttaattgctacacatcatgtgtatactcgttcgtgtaattatatacatatttaaagggcaagaggaaaagattattttaggactctataattcattatgagcaaggcattgaaaatttctaactcaagatgaaaattcataaaaattctttggcaaaaacaccttagtattctcaatacggtaactgacttttttttttttgcgttatgaaataactagatactaccgtgcgttgcttttggataaaaggggaatgctgtttcttagcctttctgtctctttactaaatggataattcaggactgggaaatgcagctctaagtttgttgtttacgaaaaacacatgctaatgtaacagcgtatgaggaattaaagagaaaatgtcaaacgcgccttgacatccaaaatgcatttagctgttggcttttactacagggcctttcactctccagccgaccccctccaagaccaagtgtttttgcgtgttgggctaaaaatagccagccaagcctaacaactagcttctgattggctcagagcaaaggccactcagccaataagagcttctgggaacaaaagcaattcttttgtgtgagatactcaacccacgtcaaaacagcttcaggctgtagaaatgattttggttgagctttaacaaggtaa

SEQ ID NO: 459775 - DNA, 1504 bp, Homo sapiens
catatataaaccgctttgcaaaaagagagtgtatggaataaaagagaaaatgaagaagaggagaaaggctggagtgcaatggtgtgatctcagctcactgcagcctcaacctccctggctcaggtgattctcccacctcagcttcctgattaactgggattacagtaatggtgaaattgccggtaatcgctaagtaaaaaccactgaagaacaggacagaagccaatgaccacctcacctccaccgagtgccctgcagaaaaaggaaatggaaatccttcctgttattctccgcgtcccttcgtagaaggctgcctgagaggtcagcacaggagtcctctaagtgccctgcagagaacacgggtctcggagccggacaaacctaaattttgaaacccactttgagtttgaacttggctgtgggaaagttacacaatcgctctaagcctctgttttctcatcagtaaaacagagaggggttgcttgtgtgagaagtggccgctgccaatcatctgcgtgtccttcactctcccaggggccatgggtctgtattctacacatgtgggatcttcctctggacccttcggacatggtccacacgctgccctcaggatctgctggggtctgcatgggggaggtctttgaaacttcaaaatcccgtagggtgtgtgaccccagtgagccccacgctacatccagcgagaaccgagaagtgatggtgcagacattcttgggtcccccagacagaacacaccgggaggccgcccagctccagctcagacacacacctgctccaactgctgtgctggtcacaggcccagagcaccacgtgtcctctggggtctgtgtggtcggcgccgtgcgtgggaccactccggggctcctgccgggtctgcggagcccagagccatgctctctgccgactccatctccagatgcctgccccggcacccacgctgttgccaggacaccagtgaacccagacaggagcctgctgctgccaccattgagagatggagaagcaggagagtgtctggggagtcaggcgaaccccaaagacaacccacagactctattcacacaggagctcgagtgtggggaggccagcaagccgcctccctggccacaaaatctcagtcatgaaggtccccagctggcatgcgtgacaccactgcaacatgctcagtggcccctgaacctcctccaggagacgcccacactgggttgtaactccctatgcaacatcggcttccaccactcgacggtcggcacagaacctgccagcaaagccaacgggtccaggggtgacctgccggtgaagagcgacagagcagaggcacctcctagggactggggctcagacgacctggctctggacagacacaatgacggagccaaggactctgtgaacgaggacaggacatgttagcaaagtcctcagctgcctgacactgtggtgagcccatgggaggaaaaccattgggccccaaccctaagggccagtc

SEQ ID NO: 459776 - DNA, 2217 bp, Homo sapiens
agcgtgtgcgcggtacggggctctcctgccttctgggctccaacgcagctctgtggctgaactgggtgctcatcacgggaactgctggggtatggaatacagatgtggcagctcaggtagccccaaattgcctggaagaatacatcatgtttttcgataagaagaaattgtaggatccagttttttttttaaccgccccctccccaccccccaaaaaactgtaaagatgcaaaaacgtaatatccatgaagatcctattacctaggaagattttgatgttttgctgcgaatgcggtgttgggatttatttgttcttggagtgttctgcgtggctggcaaagaataatgttccaaaatcggtccatctcccaaggggtccaatttttcttcctgggtgtcagcgagccctgactcactacagtgcagctgacaggggctgtcatgcaactggcccctaagccaaagcaaaagacctaaggacgacctttgaacaatacaaaggatgggtttcaatgtaattaggctactgagcggatcagctgtagcactggttatagcccccactgtcttactgacaatgctttcttctgccgaacgaggatgccctaagggctgtaggtgtgaaggcaaaatggtatattgtgaatctcagaaattacaggagataccctcaagtatatctgctggttgcttaggtttgtcccttcgctataacagccttcaaaaacttaagtataatcaatttaaagggctcaaccagctcacctggctataccttgaccataaccatatcagcaatattgacgaaaatgcttttaatggaatacgcagactcaaagagctgattcttagttccaatagaatctcctattttcttaacaataccttcagacctgtgacaaatttacggaacttggatctgtcctataatcagctgcattctctgggatctgaacagtttcggggcttgcggaagctgctgagtttacatttacggtctaactccctgagaaccatccctgtgcgaatattccaagactgccgcaacctggaacttttggacctgggatataaccggatccgaagtttagccaggaatgtctttgctggcatgatcagactcaaagaacttcacctggagcacaatcaattttccaagctcaacctggccctttttccaaggttggtcagccttcagaacctttacttgcagtggaataaaatcagtgtcataggacagaccatgtcctggacctggagctccttacaaaggcttgatttatcaggcaatgagatcgaagctttcagtggacccagtgttttccagtgtgtcccgaatctgcagcgcctcaacctggattccaacaagctcacatttattggtcaagagattttggattcttggatatccctcaatgacatcagtcttgctgggaatatatgggaatgcagcagaaatatttgctcccttgtaaactggctgaaaagttttaaaggtctaagggagaatacaattatctgtgccagtcccaaagagctgcaaggagtaaatgtgatcgatgcagtgaagaactacagcatctgtggcaaaagtactacagagaggtttgatctggccagggctctcccaaagccgacgtttaagcccaagctccccaggccgaagcatgagagcaaaccccctttgcccccgacggtgggagccacagagcccggcccagagaccgatgctgacgccgagcacatctctttccataaaatcatcgcgggcagcgtggcgcttttcctgtccgtgctcgtcatcctgctggttatctacgtgtcatggaagcggtaccctgcgagcatgaagcagctgcagcagcgctccctcatgcgaaggcacaggaaaaagaaaagacagtccctaaagcaaatgactcccagcacccaggaattttatgtagattataaacccaccaacacggagaccagcgagatgctgctgaatgggacgggaccctgcacctataacaaatcgggctccagggagtgtgaggaaataatttccgatgatttaccattagaacatccctctgctagttaaagtctaatctgccagtatagtgttccttccagcctgtggcacccactccagcctatctcatgtcattcattaaaaagcaagactgcatcacagtctaccttatgttagagttattaaggggtttgtatcac

SEQ ID NO: 459777 - DNA, 3412 bp, Homo sapiens
gctggtacggccggagattagggatagtccctgcagtggctgtaacaaaaccagacccccaggtcccggccaatggaggcgatttagactggagtgggaccgcgtctgtcaaaagcccgactcggcagcagcggcggagtccaggaggagagctggagccgccgcgctgcctccccgcccccgccgggatttattatttggactggacaattaagtggccctgatgatgttaccaagcccggtcacctccacccctttctcagtcaaagacattttgaatctggagcagcagcaccagcacttccatggtgcgcacttgcaggcggacttggagcaccacttccactctgcgccctgcatgctggccgccgctgaggggacgcaattttctgacggaggggaggaggacgaggaagacgagggcgagaaattgtcctatttgaactcactagccgcagcagacggccacggggattcagggctgtgtccccagggctatgtccacacggtcctgcgagactcgtgcagcgagcccaaggaacatgaagaggagcccgaggtcgtgagggaccggagccaaaaaagctgccagctgaagaagtctctagagacggccggagactgcaaggcggcggaggagagcgagaggccgaagccacgcagccgccggaagccccgggtcctcttctcgcaagcccaggtcttcgagctggaacgcaggttcaagcagcagcggtacctgtcggcacccgagcgcgagcacctcgccagcagcctgaagctcacatccactcaggtgaaaatctggttccagaatcgcaggtacaagtgcaagagacagcggcaggacaagtctctggagcttggcgcacacgcgcccccgccgccgccgcgccgcgtggctgtcccggtgctggtgcgggacggcaagccgtgcgtcacgcccagcgcgcaggcctacggcgcgccctacagcgtgggcgccagcgcctactcctacaacagcttccccgcctacggctatgggaactcggccgcggccgccgccgccgccgccgccgccgccgcagcagcggcggcctacagcagcagctatggctgtgcgtacccggcgggcggcggcggcggcggcggcgggacctccgcggcgaccactgccatgcagcccgcctgcagcgcggccggaggcggcccctttgtgaacgtgagcaacctaggaggcttcggcagcggcggcagcgcacagccgttgcaccagggtactgcagccggggccgctcgatttcgtttcgcagctgtctcccctccgcagcagatacctcggtccagatctccggattgtcgggggacgcaggactcttcgaggaaaaccagccgaatgagatcaaaagttgggggtggggggaggctgaacaaactcaggacctggtggcccaccggaggtgtcgaaggctcagggccatttgaagtccctggctttgcagttccccctaagttttacccagatgcttggactagctgtatagacctgcgttcggtcaagtcttgcactctgccccacctcgagggtcgccagggaaaaggaagcctcgctcgcagtcccagctgttggccgcgcgaaggcggctccttccctggctgcagccagggctaccaacgcgcccgggggcgctgcgctgcgccccactgcggccgagctctcccccttggccgccctcccttctcccccggcggccgcggctttatgcggctccttgtcacttgcggagaatgcctgtgcgaggcctgtgctgccacacggccgattgtgagcgtgccaaggcgggtgaatggggaggcctcagagcgccgcgccattgtggggccgggcctcgctgaaaggcggctccgggccgggaaggtgcggaaagaatggctttttattggagtcccgaacaaaaggcggcagaaagaccccagagccgagcgtgagccagtgcaccagactgctggtcccgcagcaactcgcggccgggtccctcctctttcacgtcgcccccgaactgggacacagcctcccaccacctggcttgtgatcctcacagaggaaacagaactggttctgtggattggcttccgcaagtttgcgtgtcttgagatacttgaagccagcctagaccagcccgctccctaccctgctccggagcctgcagtctccaggggggtgggaacaggggcgcggggggggtcgtgggaaacagggcggcacaaggaccgaaaaccccagctccgcgggcgcgtgtcaccacagagatccggcagagccattgcgggtaaacctgggacaggtggcgcccggcggggtctgcagggctttgatttcggctgcatctgggacattcgacagaaggggaaggtggaaggacgtttcctgggggaggttcgagtcctctctagcccaccactgcagggaggaaagggtaaggagtggaaacccggcccctctccgcggggcttctcccgggcccgcgcgcgccgccggagtgacttggggccgcgcctctgccagggtggggccgggtgggcaggggcttccctggagactcgcgcgggagaccgggaggtccaaggccccagtcgcagccgcccagttcctcgctttctggttcaggacgccagtggggacttcccgggcgcctcctcccaactccaggggcccgagccctggaaggactgtgatttgcgggcccggggcggtcagagccagctgggccgggagtgccccggcgagccccgggagagcctagccgactctgcagtgaagaagaagaagatgatggtggtggttgggggtttcttggaggctgagagaggccatcatgttacctgacgtgaaaaaaaaggaatgaacttaactcattttaaataactctattttaaacaaataatattgcgatgctgaagggaggataaaaaccaaataaacaagcccaacaaatatttaattctagttagaaggagttttttctgtagtgatatggcagaaatgataacatcagaatatcatctttgtgcaaccatgatttagacaggaattatcaatggatgctaaaactagtggatagaagtttgataaagaagaggatatgtacatagattcagagcacccccatgaaaataacttattgattacaaagggaaaattagtaactccatggtacaagaatgtttatagcagtaaaaactggaaatagtggaacactggaagcaacctgtgatggttaattttatgtatacttggctaggcaatggtgcctagttgtttggtcaaatattagtctggatgttattgtgaaatattttatagaggtgattaacatttacaatcaactaactttaggtaaaaggaattatccataatggccgcatccaa

SEQ ID NO: 459778 - DNA, 2832 bp, Homo sapiens
tcgttggcatggctggagtggaagatgtgagctggggagtgctgggggggctagttttgaactcctgacctcaagtgatctgcctcagcctcccaaagtgctgagattacaggcatgagccactgtgcctggcctatgattgttgataaatacattctcaagattctctcagactttctgaatcaaaatctccagccatgtctctgtgactggcccccagtaaaaaccctggacaccaaggcatggaaacagtaattcgtttgatctggactgtgtggcccgaaccctgtatgtaatatactgtcccactgacttccctcatggttacaacgtggctgccagcaacattaggggcaacatactcccttgcgtaccatattatctttctgaaaccaaaaacatggtaagttcttttttttttttttgaaacggagtctcactctgtcacccaggctggagtgagtgtgatcttggctcacggcaacctttgcctcctgggttcaagcaattctcctgccctagcctcccgagtagcagagactacaggcacccaccgggtgtgggtcccagaacgcccgggcgtggggctgggggtgtggcgcagcgaggccgcgcagcaagcagtcctcccggcaccgtcggaagcgcagttgcagcagccgtcggacaagcggccggagcagccacggacaagcagtccgggccccgccactgggcattgcagagagacagagagagagaggaaggctcactggctttgagctctctgggtacagtgtctgagtggaggcaaagtgcggttccttcaagatgtctgtgttgaagaagaacaggagaaaagactccgacactccccaggaaccttcggagaaggccaaagagcagcaggcggaggcagagctccggaagctaaggcagcagttcaggaagatggtggaaagccggaagtcttttaagttccgaaaccagcagaagattgcgagtcagtacaaggagatcaagaccctgaagacagagcaggatgagatcaccctactgttgagtctcatgaaatcctcgaggaacatgaatcggagtgagaagaactacatggagctgcgactcctgctccaaactaaggaggactatgaggcattgattaaatccctgaaagtgctgttggctgaactggatgagaagattcttcagatggaaaaaaaaatcgcaaaccaaaaacagattttcgcaaaaatgcaggaggccaataacccccggaaactgcagaaacagattcacattttggaaacccgtttgaatctcgtcactgttcactttgacaagatgctgaccactaatgccaagctccggaaggagattgaagacctacgatttgagaaggctgcttatgacaatgtctaccagcagctccagcactgcctgttgatggagaagaaaaccatgaacttggccattgagcaatcttctcaggcctatgagcagagggtggaggccatggctcgaatggctgccatgaaagaccgccagaagaaggacacctctcagtacaacctggagatccgagagctggagcgtctctatgcccatgagagcaagctcaagtccttcctgctcgtcaagctgaatgatcgcaatgaattcgaggagcaggccaaaagggaggaagtgaaggtgcccaagtctccttctctcaaggcaaagaagcatgtcaagaagaacaggggagagagttttgagagctatgaggtggcccacctccggctgctgaagctggctgagagtgggaacctaaaccagctcattgaagattttctggccaaggaggagaagaattttgctcggttcacgtatgtcacggagctcaacaacgacatggagatgatgcacaagaggacccaacgaatccaggacgagatcatcctcttgcgatcccagcagaaattgtcccacgatgacaaccactctgtcctgagacagctggaggccactggatggcagcaaagcacatgctgcccattgaggtgctcagagcggcatctcccggatatctgggtatggggaataacagggttccaggcagggtccaggtccacggagaccctccccaagctgggcagatgcctggggcccacgtccttcactcggggccacccagaatccagactcttgttgaggttgagactggcgcccctctacatcttggcagcccagatcccgcacctcctgtacttcctgctcctccccgccctctgcagtggtggcaccacccacagtgcccccaggcccaggtctctcggcagccatcttggtcctgcttcttgttctccagccatcattgaaaagaagaccaacgacctgctgctgttggagacctacaggcgcatcctggaagtggaaggggcagaggctgagatcccgccacccttcatcaaccctttctggggtggctctgccctcctcaagcccccagaacccatcaaagtcatccccccagtgctgggggctgaccccttcagcgacaggttggatgatgtggaacagcccctggaccacagcagccttcggcagctggttctcgacaattatatcctgaaggagaatcggagtaaggaagtgcgcggagacagcctgcctgagaaggtggatgacttcagatccaggaagaaagtaaccatgtgaggtgcatgcatggggccacctttgcaacataaccgaaagaataaatgttttgttctgtaaaagcctcgtgcctgtcacacacattactaagggctttggagggatcccacaaggccctgttctgatgtttgtgtggagctggaagagagaggagta

SEQ ID NO: 459779 - DNA, 2557 bp, Homo sapiens
tcgttggcatggctggagtggaagatgtgagctggggagtgctgggggggctagttttgaactcctgacctcaagtgatctgcctcagcctcccaaagtgctgagattacaggcatgagccactgtgcctggcctatgattgttgataaatacattctcaagattctctcagactttctgaatcaaaatctccagccatgtctctgtgactggcccccagtaaaaaccctggacaccaaggcatggaaacagtaattcgtttgatctggactgtgtggcccgaaccctgtatgtaatatactgtcccactgacttccctcatggttacaacgtggctgccagcaacattaggggcaacatactcccttgcgtaccatattatctttctgaaaccaaaaacatggtaagttcttttttttttttttgaaacggagtctcactctgtcacccaggctggagtgagtgtgatcttggctcacggcaacctttgcctcctgggttcaagcaattctcctgccctagcctcccgagtagcagagactacaggcacccaccgggtgtgggtcccagaacgcccgggcgtggggctgggggtgtggcgcagcgaggccgcgcagcaagcagtcctcccggcaccgtcggaagcgcagttgcagcagccgtcggacaagcggccggagcagccacggacaagcagtccgggccccgccactgcaaggagatcaagaccctgaagacagagcaggatgagatcaccctactgttgagtctcatgaaatcctcgaggaacatgaatcggagtgagaagaactacatggagctgcgactcctgctccaaactaaggaggactatgaggcattgattaaatccctgaaagtgctgttggctgaactggatgagaagattcttcagatggaaaaaaaaatcgcaaaccaaaaacagattttcgcaaaaatgcaggaggccaataacccccggaaactgcagaaacagattcacattttggaaacccgtttgaatctcgtcactgttcactttgacaagatgctgaccactaatgccaagctccggaaggagattgaagacctacgatttgagaaggctgcttatgacaatgtctaccagcagctccagcactgcctgttgatggagaagaaaaccatgaacttggccattgagcaatcttctcaggcctatgagcagagggtggaggccatggctcgaatggctgccatgaaagaccgccagaagaaggacacctctcagtacaacctggagatccgagagctggagcgtctctatgcccatgagagcaagctcaagtccttcctgctcgtcaagctgaatgatcgcaatgaattcgaggagcaggccaaaagggaggaagtgaaggtgcccaagtctccttctctcaaggcaaagaagcatgtcaagaagaacaggggagagagttttgagagctatgaggtggcccacctccggctgctgaagctggctgagagtgggaacctaaaccagctcattgaagattttctggccaaggaggagaagaattttgctcggttcacgtatgtcacggagctcaacaacgacatggagatgatgcacaagaggacccaacgaatccaggacgagatcatcctcttgcgatcccagcagaaattgtcccacgatgacaaccactctgtcctgagacagctggaggccactggatggcagcaaagcacatgctgcccattgaggtgctcagagcggcatctcccggatatctgggtatggggaataacagggttccaggcagggtccaggtccacggagaccctccccaagctgggcagatgcctggggcccacgtccttcactcggggccacccagaatccagactcttgttgaggttgagactggcgcccctctacatcttggcagcccagatcccgcacctcctgtacttcctgctcctccccgccctctgcagtggtggcaccacccacagtgcccccaggcccaggtctctcggcagccatcttggtcctgcttcttgttctccagccatcattgaaaagaagaccaacgacctgctgctgttggagacctacaggcgcatcctggaagtggaaggggcagaggctgagatcccgccacccttcatcaaccctttctggggtggctctgccctcctcaagcccccagaacccatcaaagtcatccccccagtgctgggggctgaccccttcagcgacaggttggatgatgtggaacagcccctggaccacagcagccttcggcagctggttctcgacaattatatcctgaaggagaatcggagtaaggaagtgcgcggagacagcctgcctgagaaggtggatgacttcagatccaggaagaaagtaaccatgtgaggtgcatgcatggggccacctttgcaacataaccgaaagaataaatgttttgttctgtaaaagcctcgtgcctgtcacacacattactaagggctttggagggatcccacaaggccctgttctgatgtttgtgtggagctggaagagagaggagta

SEQ ID NO: 459780 - DNA, 600 bp, Homo sapiens
ctgttcaagaagataaactgtgacgccaccaagatcctggtgcagttaggggagacggggaaagtcactgacatcaaccttccgcagtattttgccatcattgaaaagaagaccaacgacctgctgctgttggagacctacaggcgcatcctggaagtggaaggggcagaggctgagatcccgccacccttcatcaaccctttctggggtggctctgccctcctcaagcccccagaacccatcaaagtcatccccccagtgctgggggctgaccccttcagcgacaggttggatgatgtggaacagcccctggaccacagcagccttcggcagctggttctcgacaattatatcctgaaggagaatcggagtaaggaagtgcgcggagacagcctgcctgagaaggtggatgacttcagatccaggaagaaagtaaccatgtgaggtgcatgcatggggccacctttgcaacataaccgaaagaataaatgttttgttctgtaaaagcctcgtgcctgtcacacacattactaagggctttggagggatcccacaaggccctgttctgatgtttgtgtggagctggaagagagaggagta

SEQ ID NO: 459781 - DNA, 2455 bp, Homo sapiens
tttgaccagcagcaggggtcggtgtgtccctctgaatctgagacctatgaggcaggagctagggacaggatggcaggagcgcccatggctgctgctgtacagcctgctgaggtgactgttgaagttggtgaggacctccacatgcaccacgttcgtgaccgggagatgcctgaagctttggagtttaacctttctgccaatccagagtcaagcacaatattccagaggaactctcaaacagaagctttggagtttaacccttctgccaatccagaggcaagcacaatattccagaggaactctcaaacagatgttgtagaaataagaagaagcaactgtacaaaccatgtatctgctgtgcgtttcagtcaacaatacagcttgtgttcgacaatattccttgatgacagcacagccatccagcattatcttacaatgacaataatatctgtgaccttggagatacctcatcatatcacacaaagagatgcagatagaactttgagcatacctgatgaacagttacactcatttgcggtttccaccgtgcacattatgaagaaaagaaatggaggtgggagtttaaataactattcctcctccattccatcgactcccagcaccagccaggaggaccctcagttcagtgttcctcccactgccaacacacccacgcccgtttgcaagcggtccatgcgctggtccaacctgtttacatctgagaaagggagtgacccagacaaagagaggaaagccccggagaatcatgctgacaccatcgggagcggtagagccatccccattaaacagggcatgctcttaaagcgaagtgggaaatggctgaagacatggaaaaagaaatacgtcaccctgtgttccaatggcatgctcacctattattcaagcttaggtgattatatgaagaatattcataaaaaagagattgaccttcagacatctaccatcaaagtcccaggaaagtggccatccctagccacatcggcctgcacacccatctccagctctaaaagcaatggcctatccaaggacatggacaccgggctgggtgactccatatgcttcagccccagtatctccagcaccaccagccccaagctcaacccgcccccctctcctcatgctaataaaaagaaacacctaaagaagaaaagcaccaacaactttatgattgtgtctgccactggccaaacgtggcactttgaagccacgacgtatgaggagcgggatgcctgggtccaagccatccagagccagatcctggccagcctgcagtcatgcgagagcagtaaaagcaagtcccagctgaccagccagagcgaggccatggccctgcagtcgatccaaaacatgcgtgggaacgcccactgtgtggactgtgagacccagaatcctaagtgggccagtttgaacttgggagtcctcatgtgtattgaatgctcaggtatccaccgcagtcttggcccccacctttcccgtgtgcgatctctggagctggatgactggccagttgagctcaggaaggttatgtcatctattgtcaatgacctagccaacagcatctgggaagggagcagccaggggcagacaaaaccctcagaaaagtccacgagggaagagaaggaacggtggatccgttccaaatatgaggagaagctctttctggccccactaccctgcactgagctgtccctgggccagcagctgctgcgggccaccgctgatgaggacctgcagacagccatcctgctgctggcacatggctcctgtgaggaggtgaacgagacctgtggggagggagacggctgcacggcgctccatctggcctgccgcaaggggaatgtggtcctggcgcagctcctgatctggtacggggtggacgtcatggcccgagatgcccacgggaacacagcgctgacctacgcccggcaggcctccagccaggagtgcatcaacgtgcttctgcagtacggctgccccgacgagtgtgtgtagtatctgttttatttgactgcagtctccttggtgcaaaaacaaaatgggaaaaataaggataactcagaatttcaaaaggaaatcacaaattcagctaatattagcattttcagtacttttcgtaaactaagtaaatacacaaaatgttgatttttctgaccataagacgtattttatgtccttctgccaaggtggatttgttagtctcaggccctcctggccacattgcccaagtcacacaggcttctgtattatgtatttagataaaatgtgtgaaaacatatttgaaataaacctctgagttttctatgattcctgttgggagaaaagctgagtgttgggagagcagtgggcctgctctgagccctctccctggactgggggagcagtgggcctgctctgagcccctcaccctgagctgcaggggcagtgggcctgctct

SEQ ID NO: 459782 - DNA, 490 bp, Homo sapiens
tttgaccagcagcaggggtcggtgtgtccctctgaatctgagacctatgaggcaggagctagggacaggatggcaggagcgcccatggctgctgctgtacagcctgctgaggtgactgttgaagttggtgaggacctccacatgcaccacgttcgtgaccgggagatgcctgaaggtgaggaggtgataggtgccatctaccctcggtttgcctctggctgctgctgtccccatggttccctttgaggcatcccacacttcgagctcctttctgcttgtagccagctttcccgggggctggccaggaacaaaagctggctctgccttgaattcccaccccttagtctttccccaccgagtccagtcagtttcttttcgcctcccctcccaatcgcccagttcttgctctctcatctcattctcccaggctggcatgggaccatttatttatggctcttgtcgaataagcagcagttgaataaataagttg

SEQ ID NO: 459783 - DNA, 1939 bp, Homo sapiens
ttgggcggtagtatatactaggataaatgttatacacattttcttcctttccacagggtgacctttagatacctacatcatattacacaatgagatgcagatagaactttgagcatacctgatgaacagttacactcatttgcggtttccaccgtgcacattatgaagaaaagaaatggaggtgggagtttaaataactattcctcctccattccatcgactcccagcaccagccaggaggaccctcagttcagtgttcctcccactgccaacacacccacgcccgtttgcaagcggtccatgcgctggtccaacctgtttacatctgagaaagggagtgacccagacaaagagaggaaagccccggagaatcatgctgacaccatcgggagcggtagagccatccccattaaacagggcatgctcttaaagcgaagtgggaaatggctgaagacatggaaaaagaaatacgtcaccctgtgttccaatggcatgctcacctattattcaagcttaggtgattatatgaagaatattcataaaaaagagattgaccttcagacatctaccatcaaagtcccaggaaagtggccatccctagccacatcggcctgcacacccatctccagctctaaaagcaatggcctatccaaggacatggacaccgggctgggtgactccatatgcttcagccccagtatctccagcaccaccagccccaagctcaacccgcccccctctcctcatgctaataaaaagaaacacctaaagaagaaaagcaccaacaactttatgattgtgtctgccactggccaaacgtggcactttgaagccacgacgtatgaggagcgggatgcctgggtccaagccatccagagccagatcctggccagcctgcagtcatgcgagagcagtaaaagcaagtcccagctgaccagccagagcgaggccatggccctgcagtcgatccaaaacatgcgtgggaacgcccactgtgtggactgtgagacccagaatcctaagtgggccagtttgaacttgggagtcctcatgtgtattgaatgctcaggtatccaccgcagtcttggcccccacctttcccgtgtgcgatctctggagctggatgactggccagttgagctcaggaaggttatgtcatctattgtcaatgacctagccaacagcatctgggaagggagcagccaggggcagacaaaaccctcagaaaagtccacgagggaagagaaggaacggtggatccgttccaaatatgaggagaagctctttctggccccactaccctgcactgagctgtccctgggccagcagctgctgcgggccaccgctgatgaggacctgcagacagccatcctgctgctggcacatggctcctgtgaggaggtgaacgagacctgtggggagggagacggctgcacggcgctccatctggcctgccgcaaggggaatgtggtcctggcgcagctcctgatctggtacggggtggacgtcatggcccgagatgcccacgggaacacagcgctgacctacgcccggcaggcctccagccaggagtgcatcaacgtgcttctgcagtacggctgccccgacgagtgtgtgtagtatctgttttatttgactgcagtctccttggtgcaaaaacaaaatgggaaaaataaggataactcagaatttcaaaaggaaatcacaaattcagctaatattagcattttcagtacttttcgtaaactaagtaaatacacaaaatgttgatttttctgaccataagacgtattttatgtccttctgccaaggtggatttgttagtctcaggccctcctggccacattgcccaagtcacacaggcttctgtattatgtatttagataaaatgtgtgaaaacatatttgaaataaagttcataaatatgcattgaaaaaag

SEQ ID NO: 459784 - DNA, 804 bp, Homo sapiens
tttgaccagcagcaggggtcggtgtgtccctctgaatctgagacctatgaggcaggagctagggacaggatggcaggagcgcccatggctgctgctgtacagcctgctgaggtgactgttgaagttggtgaggacctccacatgcaccacgttcgtgaccgggagatgcctgaagctttggagtttaacctttctgccaatccagagtcaagcacaatattccagaggaactctcaaacagaagctttggagtttaacccttctgccaatccagaggcaagcacaatattccagaggaactctcaaacagatgttgtagaaataagaagaagcaactgtacaaaccatgtatctgctgtgcgtttcagtcaacaatacagcttgtgttcgacaatattccttgatgacagcacagccatccagcattatcttacaatgacaataatatctgtgaccttggagatacctcatcatatcacacaaagagatgcagatagaactttgagcatacctgatgaacagttacactcatttgcggtttccaccgtgcacattatgaagaaaagaaatggaggtgggagtttaaataactattcctcctccattccatcgactcccagcaccagccaggaggaccctcagttcagtgttcctcccactgccaacacacccacgcccgtttgcaagcggtccatgcgctggtccaacctgtttacatctgagaaagggagtgacccagaccaccggggacacagagattattattacaggcaccatcatgactccaagcggaggagatcctga

SEQ ID NO: 459785 - DNA, 270 bp, Homo sapiens
aataaaggagggtgtcattgtgttactcttgctggcctcaacttcctgacctgggttcaagtgattttcccatctcagcctcctgagtagctgggactacaagcatgtgccatcttgcctggctctatcttatgtctatacattcatttcaatggataagaatcaaagtagagatagtgaaatagcctaaatgcagcagtcgaataaacgagttgataaatttttatcaatgattacatctttttttcttttcttcctctgtgcatatag

SEQ ID NO: 459786 - DNA, 2332 bp, Homo sapiens
tttgaccagcagcaggggtcggtgtgtccctctgaatctgagacctatgaggcaggagctagggacaggatggcaggagcgcccatggctgctgctgtacagcctgctgaggtgactgttgaagttggtgaggacctccacatgcaccacgttcgtgaccgggagatgcctgaagctttggagtttaacctttctgccaatccagagtcaagcacaatattccagaggaactctcaaacagaagctttggagtttaacccttctgccaatccagaggcaagcacaatattccagaggaactctcaaacagatgttgtagaaataagaagaagcaactgtacaaaccatgtatctgctgtgcgtttcagtcaacaatacagcttgtgttcgacaatattccttgatgacagcacagccatccagcattatcttacaatgacaataatatctgtgaccttggagatacctcatcatatcacacaaagagatgcagatagaactttgagcatacctgatgaacagttacactcatttgcggtttccaccgtgcacattatgaagaaaagaaatggaggtgggagtttaaataactattcctcctccattccatcgactcccagcaccagccaggaggaccctcagttcagtgttcctcccactgccaacacacccacgcccgtttgcaagcggtccatgcgctggtccaacctgtttacatctgagaaagggagtgacccagacaaagagaggaaagccccggagaatcatgctgacaccatcgggagcggtagagccatccccattaaacagggcatgctcttaaagcgaagtgggaaatggctgaagacatggaaaaagaaatacgtcaccctgtgttccaatggcatgctcacctattattcaagcttaggtgattatatgaagaatattcataaaaaagagattgaccttcagacatctaccatcaaagtcccaggaaagtggccatccctagccacatcggcctgcacacccatctccagctctaaaagcaatggcctatccaaggacatggacaccgggctgggtgactccatatgcttcagccccagtatctccagcaccaccagccccaagctcaacccgcccccctctcctcatgctaataaaaagaaacacctaaagaagaaaagcaccaacaactttatgattgtgtctgccactggccaaacgtggcactttgaagccacgacgtatgaggagcgggatgcctgggtccaagccatccagagccagatcctggccagcctgcagtcatgcgagagcagtaaaagcaagtcccagctgaccagccagagcgaggccatggccctgcagtcgatccaaaacatgcgtgggaacgcccactgtgtggactgtgagacccagaatcctaagtgggccagtttgaacttgggagtcctcatgtgtattgaatgctcaggtatccaccgcagtcttggcccccacctttcccgtgtgcgatctctggagctggatgactggccagttgagctcaggaaggttatgtcatctattgtcaatgacctagccaacagcatctgggaagggagcagccaggggcagacaaaaccctcagaaaagtccacgagggaagagaaggaacggtggatccgttccaaatatgaggagaagctctttctggccccactaccctgcactgagctgtccctgggccagcagctgctgcgggccaccgctgatgaggacctgcagacagccatcctgctgctggcacatggctcctgtgaggaggtgaacgagacctgtggggagggagacggctgcacggcgctccatctggcctgccgcaaggggaatgtggtcctggcgcagctcctgatctggtacggggtggacgtcatggcccgagatgcccacgggaacacagcgctgacctacgcccggcaggcctccagccaggagtgcatcaacgtgcttctgcagtacggctgccccgacgagtgtgtgtagtatctgttttatttgactgcagtctccttggtgcaaaaacaaaatgggaaaaataaggataactcagaatttcaaaaggaaatcacaaattcagctaatattagcattttcagtacttttcgtaaactaagtaaatacacaaaatgttgatttttctgaccataagacgtattttatgtccttctgccaaggtggatttgttagtctcaggccctcctggccacattgcccaagtcacacaggcttctgtattatgtatttagataaaatgtgtgaaaacatatttgaaataaagttcataaatatgcattgaaaaaag

SEQ ID NO: 459787 - DNA, 1336 bp, Homo sapiens
tgggtctcaccgtcctcgtgataactttcttgcaccaaagacatcagtctccaacatgtttctgtgtggttgtttgattcagcaaaagtccccagtatctccagcaccaccagccccaagctcaacccgcccccctctcctcatgctaataaaaagaaacacctaaagaagaaaagcaccaacaactttatgattgtgtctgccactggccaaacgtggcactttgaagccacgacgtatgaggagcgggatgcctgggtccaagccatccagagccagatcctggccagcctgcagtcatgcgagagcagtaaaagcaagtcccagctgaccagccagagcgaggccatggccctgcagtcgatccaaaacatgcgtgggaacgcccactgtgtggactgtgagacccagaatcctaagtgggccagtttgaacttgggagtcctcatgtgtattgaatgctcaggtatccaccgcagtcttggcccccacctttcccgtgtgcgatctctggagctggatgactggccagttgagctcaggaaggttatgtcatctattgtcaatgacctagccaacagcatctgggaagggagcagccaggggcagacaaaaccctcagaaaagtccacgagggaagagaaggaacggtggatccgttccaaatatgaggagaagctctttctggccccactaccctgcactgagctgtccctgggccagcagctgctgcgggccaccgctgatgaggacctgcagacagccatcctgctgctggcacatggctcctgtgaggaggtgaacgagacctgtggggagggagacggctgcacggcgctccatctggcctgccgcaaggggaatgtggtcctggcgcagctcctgatctggtacggggtggacgtcatggcccgagatgcccacgggaacacagcgctgacctacgcccggcaggcctccagccaggagtgcatcaacgtgcttctgcagtacggctgccccgacgagtgtgtgtagtatctgttttatttgactgcagtctccttggtgcaaaaacaaaatgggaaaaataaggataactcagaatttcaaaaggaaatcacaaattcagctaatattagcattttcagtacttttcgtaaactaagtaaatacacaaaatgttgatttttctgaccataagacgtattttatgtccttctgccaaggtggatttgttagtctcaggccctcctggccacattgcccaagtcacacaggcttctgtattatgtatttagataaaatgtgtgaaaacatatttgaaataaagttcataaatatgcattgaaaaaag

SEQ ID NO: 459788 - DNA, 683 bp, Homo sapiens
gtaattgtgagctgtctataggaccctgcaagccactacccaatttttgaagccattcctcctcctgttccacacaggtttccaccgtgcacattatgaagaaaagaaatggaggtgggagtttaaataactattcctcctccattccatcgactcccagcaccagccaggaggaccctcagttcagtgttcctcccactgccaacacacccacgcccgtttgcaagcggtccatgcgctggtccaacctgtttacatctgagaaagggagtgacccagacaaagagaggaaagccccggagaatcatgctgacaccatcgggagcggtagagccatccccattaaacagggcatgctcttaaagcgaagtgggaaatggctgaagacatggaaaaagaaatacgtcaccctgtgttccaatggcatgctcacctattattcaagcttaggtgattatatgaagaatattcataaaaaagagattgaccttcagacatctaccatcaaagtcccaggaaagtggccatccctagccacatcggcctgcacacccatctccagctctaaaagcaatggcctatccaaggacatggacaccgggctgggtgactccatatgcttcagccccagtatctccagcaccaccagccccaagctcaacccgcccccctctcctcatgct

SEQ ID NO: 459789 - DNA, 604 bp, Homo sapiens
ggcgctttcgaatttagattcatggccctgtggcgtacaaattagcagatcatgagtgacccagccatgcgccttatcctggaacagatgcagaaggacccccaggcactcagcgaacacttaaagaatcctgtaatagcacagaagatccagaagctgatggatgtgggtctgattgcaattcggtgatgacttgttcatccccccttcccttcgccctcatgtggaaagaggagctgggaccgcggcgagcagcacggagcggaagggagagcaggggagagaaggcctcatctctctatatttatacataaccccggggaagacacagagactcgtacctgcgctgtttgtgccgccgctgcctctgggccctcccagcacacgcatggtctcttcaccgctgccctcgagttccatgtctctttcccctgcccctagttgctgtctcggctgctctcccatagttggttttttttttatttggggcagtgggcatgttatggggaggggagggggttcttccagcctcaggtcccagctgtctcacgttgtttattctgcgtccccttctccaataaaacaagccagttgggcgtggtta

SEQ ID NO: 459790 - DNA, 596 bp, Homo sapiens
taagtttaaagaaaaaaaggcaacaaaggccttaagggggggtaacatcaataagcccttacagtgctactccgaagctattaagttggatccccacaaccacgtgctgtacagcaaccgttctgctgcctatgccaagaaaggagactaccagaaggcttatgaggatggctgcaagactgtcgacctaaagcctgactggggcaagggctattcacgaaaagcagcagctttagagttctacaaccggcacgacagccccgaagatgtgaagcgacgagccatggccgaccctgaggtgcagcagatcatgagtgacccagccatgcgccttatcctggaacagatgcagaaggacccccaggcactcagcgaacacttaaagaatcctgtaatagcacagaagatccagaagctgatggatgtgggtctgattgcaattcggtgatgacttgttcatccccccttcccttcgccctcatgtggaaagaggagctgggaccgcggcgagcagcacggagctcaggtcccagctgtctcacgttgtttattctgcgtccccttctccaataaaacaagccagttgggcgtggtta

SEQ ID NO: 459791 - DNA, 341 bp, Homo sapiens
aactcaggggcgagctgcctgctacaccaaactcctggagttccagctggcactcaaggactgtgaggaatgtatccagctggagccgaccctcatcaagggttatacacggaaagccgctgcgctggaagcgatgaaggactacaccaaagccatggatgtgtaccagaaggcgctagacctggactccagctgtaaggaggcggcagacggctaccagcgctgtatgatggcgcagtacaaccggcacgacagccccgaagatgtgaagcgacgagccatggccgaccctgaggtgcgcgcctgagctcagctcgccaagagggccgagctcgatctga

SEQ ID NO: 459792 - DNA, 135 bp, Homo sapiens
aattcaagcttctaacgatgtactgggcatgttatggggaggggagggggttcttccagcctcaggtcccagctgtctcacgttgtttattctgcgtccccttctccaataaaacaagccagttgggcgtggtta

SEQ ID NO: 459793 - DNA, 1153 bp, Homo sapiens
gaagcgaccatcccgaacaactccggatggaattgggccgcgtaggaaaagtacaaggatgccatccatttctataacaagtctctggcagagcaccgaaccccagatgtgctcaagaaatgccagcaggcagagaaaatcctgaaggagcaagagcggctggcctacataaaccccgacctggctttggaggagaagaacaaaggcaacgagtgttttcagaaaggggactatccccaggccatgaagcattatacagaagccatcaaaaggaacccgaaagatgccaaattatacagcaatcgagctgcctgctacaccaaactcctggagttccagctggcactcaaggactgtgaggaatgtatccagctggagccgaccttcatcaagggttatacacggaaagccgctgcgctggaagcgatgaaggactacaccaaagccatggatgtgtaccagaaggcgctagacctggactccagctgtaaggaggcggcagacggctaccagcgctgtatgatggcgcagtacaaccggcacgacagccccgaagatgtgaagcgacgagccatggccgaccctgaggtgcagcagatcatgagtgacccagccatgcgccttatcctggaacagatgcagaaggacccccaggcactcagcgaacacttaaagaatcctgtaatagcacagaagatccagaagctgatggatgtgggtctgattgcaattcggtgatgacttgttcatccccccttcccttcgccctcatgtggaaagaggagctgggaccgcggcgagcagcacggagcggaagggagagcaggggagagaaggcctcatctctctatatttatacataaccccggggaagacacagagactcgtacctgcgctgtttgtgccgccgctgcctctgggccctcccagcacacgcatggtctcttcaccgctgccctcgagttccatgtctctttcccctgcccctagttgctgtctcggctgctctcccatagttggttttttttttatttggggcagtgggcatgttatggggaggggagggggttcttccagcctcaggtcccagctgtctcacgttgtttattctgcgtccccttctccaataaaacaagccagttgggcgtggtta

SEQ ID NO: 459794 - DNA, 1589 bp, Homo sapiens
ggcgactacaataagtgccgggagcttgtgagaaggccattgaagtggggagagaaaaccgagaagactatcgacagatgccaaagcatatgctcgaattggcaactcctacttcaaagaagaaaagtacaaggatgccatccatttctataacaagtctctggcagagcaccgaaccccagatgtgctcaagaaatgccagcaggcagagaaaatcctgaaggagcaagagcggctggcctacataaaccccgacctggctttggaggagaagaacaaaggcaacgagtgttttcagaaaggggactatccccaggccatgaagcattatacagaagccatcaaaaggaacccgaaagatgccaaattatacagcaatcgagctgcctgctacaccaaactcctggagttccagctggcactcaaggactgtgaggaatgtatccagctggagccgaccttcatcaagggttatacacggaaagccgctgcgctggaagcgatgaaggactacaccaaagccatggatgtgtaccagaaggcgctagacctggactccagctgtaaggaggcggcagacggctaccagcgctgtatgatggcgcagtacaaccggcacgacagccccgaagatgtgaagcgacgagccatggccgaccctgaggtgcagcagatcatgagtgacccagccatgcgccttatcctggaacagatgcagaaggacccccaggcactcagcgaacacttaaagaatcctgtaatagcacagaagatccagaagctgatggatgtgggtctgattgcaattcggtgatgacttgttcatccccccttcccttcgccctcatgtggaaagaggagctgggaccgcggcgagcagcacggagcggaagggagagcaggggagagaaggcctcatctctctatatttatacataaccccggggaagacacagagactcgtacctgcgctgtttgtgccgccgctgcctctgggccctcccagcacacgcatggtctcttcaccgctgccctcgagttccatgtctctttcccctgcccctagttgctgtctcggctgctctcccatagttggttttttttttatttggggcagtgggcatgttatggggaggggagggggttcttccagcctcaggtcccagctgtctcacgttgtttattctgcgtccccttctccaataaaacaagccagttgggcgtggttatatgtggcttgggccctgagtgattttttttttttttttaaaccaggagtttgtccttgcaggggctgctcctggaacctgatcttgctcttctctttggggcgggcttaggaggagtcccaagctgtggcttggcacagctccatggctttgccaagaaggttgccagatggcgctgttgctcagcagctggaagggaatctgaaggcttccccaccccaagtagtaccaatgagaggttcagataagctttgggtgctgttaattctccacgttatagtggagatccagagaacaggatctaatgtgagatgctgagacctctgtggggagagggcagctatgctgttagctgctgtt

SEQ ID NO: 459795 - DNA, 871 bp, Homo sapiens
ggacgcgtgggtcgacccacgcgttcgccacgcgtccgcaaactcctggagttccagctggcactcaaggactgtgaggaatgtatccagctggagccgaccttcatcaagggttatacacggaaagccgctgcgctggaagcgatgaaggactacaccaaagccatggatgtgtaccagaaggcgctagacctggactccagctgtaaggaggcggcagacggctaccagcgctgtatgatggcgcagtacaaccggcacgacagccccgaagatgtgaagcgacgagccatggccgaccctgaggtgcagcagatcatgagtgacccagccatgcgccttatcctggaacagatgcagaaggacccccaggcactcagcgaacacttaaagaatcctgtaatagcacagaagatccagaagctgatggatgtgggtctgattgcaattcggtgatgacttgttcatccccccttcccttcgccctcatgtggaaagaggagctgggaccgcggcgagcagcacggagcggaagggagagcaggggagagaaggcctcatctctctatatttatacataaccccggggaagacacagagactcgtacctgcgctgtttgtgccgccgctgcctctgggccctcccagcacacgcatggtctcttcaccgctgccctcgagttccatgtctctttcccctgcccctagttgctgtctcggctgctctcccatagttggttttttttttatttggggcagtgggcatgttatggggaggggagggggttcttccagcctcaggtcccagctgtctcacgttgtttattctgcgtccccttctccaataaaacaagccagttgggcgtggtta

SEQ ID NO: 459796 - DNA, 585 bp, Homo sapiens
tccttgtaatccaagcagtcggagagcagatcatgagtgacccagccatgcgccttatcctggaacagatgcagaaggacccccaggcactcagcgaacacttaaagaatcctgtaatagcacagaagatccagaagctgatggatgtgggtctgattgcaattcggtgatgacttgttcatccccccttcccttcgccctcatgtggaaagaggagctgggaccgcggcgagcagcacggagcggaagggagagcaggggagagaaggcctcatctctctatatttatacataaccccggggaagacacagagactcgtacctgcgctgtttgtgccgccgctgcctctgggccctcccagcacacgcatggtctcttcaccgctgccctcgagttccatgtctctttcccctgcccctagttgctgtctcggctgctctcccatagttggttttttttttatttggggcagtgggcatgttatggggaggggagggggttcttccagcctcaggtcccagctgtctcacgttgtttattctgcgtccccttctccaataaaacaagccagttgggcgtggtta

SEQ ID NO: 459797 - DNA, 1196 bp, Homo sapiens
ggcgactacaataagtgccgggagcttgtgagaaggccattgaagtggggagagaaaaccgagaagactatcgacagatgccaaagcatatgctcgaattggcaactcctacttcaaagaagaaaagtacaaggatgccatccatttctataacaagtctctggcagagcaccgaaccccagatgtgctcaagaaatgccagcaggcagagaaaatcctgaaggagcaagagcggctggcctacataaaccccgacctggctttggaggagaagaacaaaggcaacgagtgttttcagaaaggggactatccccaggccatgaagcattatacagaagccatcaaaaggaacccgaaagatgccaaattatacagcaatcgagctgcctgctacaccaaactcctggagttccagctggcactcaaggactgtgaggaatgtatccagctggagccgaccttcatcaagggttatacacggaaagccgctgcgctggaagcgatgaaggactacaccaaagccatggatgtgtaccagaaggcgctagacctggactccagctgtaaggaggcggcagacggctaccagcgctgtatgatggcgcagtacaaccggcacgacagccccgaagatgtgaagcgacgagccatggccgaccctgaggtgcagcagatcatgagtgacccagccatgcgccttatcctggaacagatgcagaaggacccccaggcactcagcgaacacttaaagaatcctgtaatagcacagaagatccagaagctgatggatgtgggtctgattgcaattcggtgatgacttgttcatccccccttcccttcgccctcatgtggaaagaggagctgggaccgcggcgagcagcacggagcggaagggagagcaggggagagaaggcctcatctctctatatttatacataaccccggggaagacacagagactcgtacctgcgctgtttgtgccgccgctgcctctgggccctcccagcacacgcatggtctcttcaccgctgccctcgagttccatgtctctttccctagttggttttttttttatttggggcagtgggcatgttatggggaggggagggggttcttccagcctcaggtcccagctgtctcacgttgtttattctgcgtccccttctccaataaaacaagccagttgggcgtggtta

SEQ ID NO: 459798 - DNA, 1945 bp, Homo sapiens
gaagcgaccatcccgaacaactccggatggaattgggccgcgtaggaaaagtacaaggatgccatccatttctataacaagtctctggcagagcaccgaaccccagatgtgctcaagaaatgccagcaggcagagaaaatcctgaaggagcaagagcggctggcctacataaaccccgacctggctttggaggagaagaacaaaggcaacgagtgttttcagaaaggggactatccccaggccatgaagcattatacagaagccatcaaaaggaacccgaaagatgccaaattatacagcaatcgagctgcctgctacaccaaactcctggagttccagctggcactcaaggactgtgaggaatgtatccagctggagccgaccttcatcaagggttatacacggaaagccgctgcgctggaagcgatgaaggactacaccaaagccatggatgtgtaccagaaggcgctagacctggactccagctgtaaggaggcggcagacggctaccagcgctgtatgatggcgcagtacaaccggcacgacagccccgaagatgtgaagcgacgagccatggccgaccctgaggtgcagcagatcatgagtgacccagccatgcgccttatcctggaacagatgcagaaggacccccaggcactcagcgagtacgtagagtcagagaggcggccttgctggaaatggagaacaaaagcaggcagatgagtgcacgcggctggggggtggtatgctcagtctgcgaggaagaggaattctgtcattcttcctaaacttaaggagattggcagtgggtggcgagctggaagggctttgttagtcgtgatagcttaagcagtcatttggaaaggcccatttagctgggagaaaggtcttgactggaagctgtgtcgtgggctcaagagtaggactggcaagttctgcgaagtggagcaggcctctgcagctcggcgccccgggcctcgccaggacccctccctgccggggccttctgtagagggggttgaattggggcttgctctgagagcaagtaagactttaaaggttgtctcatttcaagtaactgcgtcttcctctgtagaacacttaaagaatcctgtaatagcacagaagatccagaagctgatggatgtgggtctgattgcaattcggtgatgacttgttcatccccccttcccttcgccctcatgtggaaagaggagctgggaccgcggcgagcagcacggagcggaagggagagcaggggagagaaggcctcatctctctatatttatacataaccccggggaagacacagagactcgtacctgcgctgtttgtgccgccgctgcctctgggccctcccagcacacgcatggtctcttcaccgctgccctcgagttccatgtctctttcccctgcccctagttgctgtctcggctgctctcccatagttggttttttttttatttggggcagtgggcatgttatggggaggggagggggttcttccagcctcaggtcccagctgtctcacgttgtttattctgcgtccccttctccaataaaacaagccagttgggcgtggttatatgtggcttgggccctgagtgattttttttttttttttaaaccaggagtttgtccttgcaggggctgctcctggaacctgatcttgctcttctctttggggcgggcttaggaggagtcccaagctgtggcttggcacagctccatggctttgccaagaaggttgccagatggcgctgttgctcagcagctggaagggaatctgaaggcttccccaccccaagtagtaccaatgagaggttcagataagctttgggtgctgttaattctccacgttatagtggagatccagagaacaggatctaatgtgagatgctgagacctctgtggggagagggcagctatgctgttagctgctgtt

SEQ ID NO: 459799 - DNA, 1553 bp, Homo sapiens
tctctctccccttgtcagttacctctgttatcttggacctgctgaagcagtgagctgggtggtcctaacacgcttcacctttgtctcttctggactgcaggaggcggcagacggctaccagcgctgtatgatggcgcagtacaaccggcacgacagccccgaagatgtgaagcgacgagccatggccgaccctgaggtgcagcagatcatgagtgacccagccatgcgccttatcctggaacagatgcagaaggacccccaggcactcagcgagtacgtagagtcagagaggcggccttgctggaaatggagaacaaaagcaggcagatgagtgcacgcggctggggggtggtatgctcagtctgcgaggaagaggaattctgtcattcttcctaaacttaaggagattggcagtgggtggcgagctggaagggctttgttagtcgtgatagcttaagcagtcatttggaaaggcccatttagctgggagaaaggtcttgactggaagctgtgtcgtgggctcaagagtaggactggcaagttctgcgaagtggagcaggcctctgcagctcggcgccccgggcctcgccaggacccctccctgccggggccttctgtagagggggttgaattggggcttgctctgagagcaagtaagactttaaaggttgtctcatttcaagtaactgcgtcttcctctgtagaacacttaaagaatcctgtaatagcacagaagatccagaagctgatggatgtgggtctgattgcaattcggtgatgacttgttcatccccccttcccttcgccctcatgtggaaagaggagctgggaccgcggcgagcagcacggagcggaagggagagcaggggagagaaggcctcatctctctatatttatacataaccccggggaagacacagagactcgtacctgcgctgtttgtgccgccgctgcctctgggccctcccagcacacgcatggtctcttcaccgctgccctcgagttccatgtctctttcccctgcccctagttgctgtctcggctgctctcccatagttggttttttttttatttggggcagtgggcatgttatggggaggggagggggttcttccagcctcaggtcccagctgtctcacgttgtttattctgcgtccccttctccaataaaacaagccagttgggcgtggttatatgtggcttgggccctgagtgattttttttttttttttaaaccaggagtttgtccttgcaggggctgctcctggaacctgatcttgctcttctctttggggcgggcttaggaggagtcccaagctgtggcttggcacagctccatggctttgccaagaaggttgccagatggcgctgttgctcagcagctggaagggaatctgaaggcttccccaccccaagtagtaccaatgagaggttcagataagctttgggtgctgttaattctccacgttatagtggagatccagagaacaggatctaatgtgagatgctgagacctctgtggggagagggcagctatgctgttagctgctgtt

SEQ ID NO: 459800 - DNA, 980 bp, Homo sapiens
ggcgactacaataagtgccgggagcttgtgagaaggccattgaagtggggagagaaaaccgagaagactatcgacagatgccaaagcatatgctcgaattggcaactcctacttcaaagaagaaaagtacaaggatgccatccatttctataacaagtctctggcagagcaccgaaccccagatgtgctcaagaaatgccagcaggcagagaaaatcctgaaggagcaagagcggctggcctacataaaccccgacctggctttggaggagaagaacaaaggcaacgagtgttttcagaaaggggactatccccaggccatgaagcattatacagaagccatcaaaaggaacccgaaagatgccaaattatacagcaatcgagctgcctgctacaccaaactcctggagttccagctggcactcaaggactgtgaggaatgtatccagctggagccgaccttcatcaagggttatacacggaaagccgctgcgctggaagcgatgaaggactacaccaaagccatggatgtgtaccagaaggcgctagacctggactccagctgtaaggaggcggcagacggctaccagcgctgtatgatggcgcagtacaaccggcacgacagccccgaagatgtgaagcgacgagccatggccgaccctgaggtgcagcagatcatgagtgacccagccatgcgccttatcctggaacagatgcagaaggacccccaggcactcagcgaacacttaaagaatcctgtaatagcacagaagatccagaagctgatggatgtgggtctgattgcaattcggtgatgacttgttcatccccccttcccttctagttggttttttttttatttggggcagtgggcatgttatggggaggggagggggttcttccagcctcaggtcccagctgtctcacgttgtttattctgcgtccccttctccaataaaacaagccagttgggcgtggtta

SEQ ID NO: 459801 - DNA, 915 bp, Homo sapiens
ggcgactacaataagtgccgggagcttgtgagaaggccattgaagtggggagagaaaaccgagaagactatcgacagatgccaaagcatatgctcgaattggcaactcctacttcaaagaagaaaagtacaaggatgccatccatttctataacaagtctctggcagagcaccgaaccccagatgtgctcaagaaatgccagcaggcagagaaaatcctgaaggagcaagagcggctggcctacataaaccccgacctggctttggaggagaagaacaaaggcaacgagtgttttcagaaaggggactatccccaggccatgaagcattatacagaagccatcaaaaggaacccgaaagatgccaaattatacagcaatcgagctgcctgctacaccaaactcctggagttccagctggcactcaaggactgtgaggaatgtatccagctggagccgaccttcatcaagggttatacacggaaagccgctgcgctggaagcgatgaaggactacaccaaagccatggatgtgtaccagaaggcgctagacctggactccagctgtaaggaggcggcagacggctaccagcgctgtatgatggcgcagtacaaccggcacgacagccccgaagatgtgaagcgacgagccatggccgaccctgaggtgcagcagatcatgagtgacccagccatgcgccttatcctggaacagatgcagaaggacccccaggcactcagcgaacacttaaagaatcctgtaatagcacagaagatccagaagctgatggatgtgggtctgattgcaattcggtgatgacttgttcatccccccttcccttcctcaggtcccagctgtctcacgttgtttattctgcgtccccttctccaataaaacaagccagttgggcgtggtta

SEQ ID NO: 459802 - DNA, 1301 bp, Homo sapiens
gaagcgaccatcccgaacaactccggatggaattgggccgcgtaggaaaagtacaaggatgccatccatttctataacaagtctctggcagagcaccgaaccccagatgtgctcaagaaatgccagcaggcagagaaaatcctgaaggagcaagagcggctggcctacataaaccccgacctggctttggaggagaagaacaaaggcaacgagtgttttcagaaaggggactatccccaggccatgaagcattatacagaagccatcaaaaggaacccgaaagatgccaaattatacagcaatcgagctgcctgctacaccaaactcctggagttccagctggcactcaaggactgtgaggaatgtatccagctggagccgaccttcatcaagggttatacacggaaagccgctgcgctggaagcgatgaaggactacaccaaagccatggatgtgtaccagaaggcgctagacctggactccagctgtaaggaggcggcagacggctaccagcgctgtatgatggcgcagtacaaccggcacgacagccccgaagatgtgaagcgacgagccatggccgaccctgaggtgcagcagatcatgagtgacccagccatgcgccttatcctggaacagatgcagaaggacccccaggcactcagcgagtacgtagagtcagagaggcggccttgctggaaatggagaacaaaagcaggcagatgagtgcacgcggctggggggtggtatgctcagtctgcgaggaagaggaattctgtcattcttcctaaacttaaggagattggcagtgggtggcgagctggaagggctttgttagtcgtgatagcttaagcagtcatttggaaaggcccatttagctgggagaaaggtcttgactggaagctgtgtcgtgggctcaagagtaggactggcaagttctgcgaagtggagcaggcctctgcagctcggcgccccgggcctcgccaggacccctccctgccggggccttctgtagagggggttgaattggggcttgctctgagagcaagtaagactttaaaggttgtctcatttcaagtaactgcgtcttcctctgtagaccgctgccctcgagttccatgtctctttcccctgcccctagttgctgtctcggctgctctcccatagttggttttttttttatttggggcagtgggcatgttatggggaggggagggggttcttccagcctcaggtcccagctgtctcacgttgtttattctgcgtccccttctccaataaaacaagccagttgggcgtggtta

SEQ ID NO: 459803 - DNA, 514 bp, Homo sapiens
gggaatgagcctaatttctttctgttgcttcattctaggactgtgaggaatgtatccagctggagccgaccttcagtaagtgcctttctgctgcctgtcccctgtctctagccaaaagattagagaaggaaagggcaagccctttgtctacctgtgtgtccttgggacctgtaggatttaggatccaacatcagcaggtgtgaacagtgttggtgtgcaggtgaagaggtgcaaggagcagccttgggcgctgcggttggataacgcgccacctttcctgtttgtagtcaagggttatacacggaaagccgctgcgctggaagcgatgaaggactacaccaaagccatggatgtgtaccagaaggcgctagacctggactccagctgtaaggtggggctgcttctggcctccaggggccccccctgcctctttctctgttggggcttttccatgttcagtccctgatttcttccctgtcacctccatttctctctgtttctctcttacttgttc

SEQ ID NO: 459804 - DNA, 1778 bp, Homo sapiens
gaccaaggcccacgcattttgtctagttgtcatgtactcttcagtttctcaaactggaattgtcccccgctatgtgtttttcataacatcagcctcttgcagagtccaggcagtttgtcttgtgtgggatgatccatcatctggagttgtctttcctgatgttgtcccctctgtttggtgctgggactgtgaggaatgtatccagctggagccgaccttcatcaagggttatacacggaaagccgctgcgctggaagcgatgaaggactacaccaaagccatggatgtgtaccagaaggcgctagacctggactccagctgtaaggaggcggcagacggctaccagcgctgtatgatggcgcagtacaaccggcacgacagccccgaagatgtgaagcgacgagccatggccgaccctgaggtgcagcagatcatgagtgacccagccatgcgccttatcctggaacagatgcagaaggacccccaggcactcagcgagtacgtagagtcagagaggcggccttgctggaaatggagaacaaaagcaggcagatgagtgcacgcggctggggggtggtatgctcagtctgcgaggaagaggaattctgtcattcttcctaaacttaaggagattggcagtgggtggcgagctggaagggctttgttagtcgtgatagcttaagcagtcatttggaaaggcccatttagctgggagaaaggtcttgactggaagctgtgtcgtgggctcaagagtaggactggcaagttctgcgaagtggagcaggcctctgcagctcggcgccccgggcctcgccaggacccctccctgccggggccttctgtagagggggttgaattggggcttgctctgagagcaagtaagactttaaaggttgtctcatttcaagtaactgcgtcttcctctgtagaacacttaaagaatcctgtaatagcacagaagatccagaagctgatggatgtgggtctgattgcaattcggtgatgacttgttcatccccccttcccttcgccctcatgtggaaagaggagctgggaccgcggcgagcagcacggagcggaagggagagcaggggagagaaggcctcatctctctatatttatacataaccccggggaagacacagagactcgtacctgcgctgtttgtgccgccgctgcctctgggccctcccagcacacgcatggtctcttcaccgctgccctcgagttccatgtctctttcccctgcccctagttgctgtctcggctgctctcccatagttggttttttttttatttggggcagtgggcatgttatggggaggggagggggttcttccagcctcaggtcccagctgtctcacgttgtttattctgcgtccccttctccaataaaacaagccagttgggcgtggttatatgtggcttgggccctgagtgattttttttttttttttaaaccaggagtttgtccttgcaggggctgctcctggaacctgatcttgctcttctctttggggcgggcttaggaggagtcccaagctgtggcttggcacagctccatggctttgccaagaaggttgccagatggcgctgttgctcagcagctggaagggaatctgaaggcttccccaccccaagtagtaccaatgagaggttcagataagctttgggtgctgttaattctccacgttatagtggagatccagagaacaggatctaatgtgagatgctgagacctctgtggggagagggcagctatgctgttagctgctgtt

SEQ ID NO: 459805 - DNA, 375 bp, Homo sapiens
aatttctttctgttgcttcattctaggactgtgaggaatgtatccagctggagccgaccttcatcaagggttatacacggaaagccgctgcgctggaagcgatgaaggactacaccaaagccatggatgtgtaccagaaggcgctagacctggactccagctgtaaggaggcggcagacggctaccagcgctgtatgatggcgcagtacaaccggcacgacagccccgaagatgtgaagcgacgagccatggccgaccctgaggtgctcgcccctgagttgcagctcgcccctgagttagcagctcgcccctgagttagcagctcgccgtattgaattcaacacaccacaatactatgcagctcgcccctgagtt

SEQ ID NO: 459806 - DNA, 1229 bp, Homo sapiens
ggcgactacaataagtgccgggagcttgtgagaaggccattgaagtggggagagaaaaccgagaagactatcgacagatgccaaagcatatgctcgaattggcaactcctacttcaaagaagaaaagtacaaggatgccatccatttctataacaagtctctggcagagcaccgaaccccagatgtgctcaagaaatgccagcaggcagagaaaatcctgaaggagcaagagcggctggcctacataaaccccgacctggctttggaggagaagaacaaaggcaacgagtgttttcagaaaggggactatccccaggccatgaagcattatacagaagccatcaaaaggaacccgaaagatgccaaattatacagcaatcgagctgcctgctacaccaaactcctggagttccagctggcactcaaggactgtgaggaatgtatccagctggagccgaccttcatcaagggttatacacggaaagccgctgcgctggaagcgatgaaggactacaccaaagccatggatgtgtaccagaaggcgctagacctggactccagctgtaaggaggcggcagacggctaccagcgctgtatgatggcgcagtacaaccggcacgacagccccgaagatgtgaagcgacgagccatggccgaccctgaggtgcagcagatcatgagtgacccagccatgcgccttatcctggaacagatgcagaaggacccccaggcactcagcgaacacttaaagaatcctgtaatagcacagaagatccagaagctgatggatgtgggtctgattgcaattcggtgatgacttgttcatccccccttcccttcgccctcatgtggaaagaggagctgggaccgcggcgagcagcacggagcggaagggagagcaggggagagaaggcctcatctctctatatttatacataaccccggggaagacacagagactcgtacctgcgctgtttgtgccgccgctgcctctgggccctcccagcacacgcatggtctcttcaccgctgccctcgagttccatgtctctttcccctgcccctagttgctgtctcggctgctctcccatagttggttttttttttatttggggcagtgggcatgttatggggaggggagggggttcttccagcctcaggtcccagctgtctcacgttgtttattctgcgtccccttctccaataaaacaagccagttgggcgtggtta

SEQ ID NO: 459807 - DNA, 1600 bp, Homo sapiens
ggcgactacaataagtgccgggagcttgtgagaaggccattgaagtggggagagaaaaccgagaagactatcgacagatgccaaagcatatgctcgaattggcaactcctacttcaaagaagaaaagtacaaggatgccatccatttctataacaagtctctggcagagcaccgaaccccagatgtgctcaagaaatgccagcaggcagagaaaatcctgaaggagcaagagcggctggcctacataaaccccgacctggctttggaggagaagaacaaaggcaacgagtgttttcagaaaggggactatccccaggccatgaagcattatacagaagccatcaaaaggaacccgaaagatgccaaattatacagcaatcgagctgcctgctacaccaaactcctggagttccagctggcactcaaggactgtgaggaatgtatccagctggagccgaccttcatcaagggttatacacggaaagccgctgcgctggaagcgatgaaggactacaccaaagccatggatgtgtaccagaaggcgctagacctggactccagctgtaaggaggcggcagacggctaccagcgctgtatgatggcgcagtacaaccggcacgacagccccgaagatgtgaagcgacgagccatggccgaccctgaggtgcagcagatcatgagtgacccagccatgcgccttatcctggaacagatgcagaaggacccccaggcactcagcgaacacttaaagaatcctgtaatagcacagaagatccagaagctgatggatgtgggtctgattgcaattcggtgatgacttgttcatccccccttcccttcgccctcatgtggaaagaggagctgggaccgcggcgagcagcacggagcggaagggagagcaggggagagaaggcctcatctctctatatttatacataaccccggggaagacacagagactcgtacctgcgctgtttgtgccgccgctgcctctgggccctcccagcacacgcatggtctcttcaccgctgccctcgagttccatgtctctttcccctgcccctagttgctgtctcggctgctctcccatagttggttttttttttatttggggcagtgggcatgttatggggaggggagggggttcttccagcctcaggtcccagctgtctcacgttgtttattctgcgtccccttctccaataaaacaagccagttgggcgtggttataaaaaaaaaaaaaaaaaaaaaacaaaaaaaaaaaaaaaaaacaacaacaaaaaaaaaaaaaaaaaaacaaaaaaaagagagcggcaacaaaacaccaacacaagagggacgacaaaagagagagaaaaaaaaaaagacaagaggacccaagaagaccacaacacacaagaagagacacaaaaagcacgaagaggaaagacaaaccacaggacaacagagaaaagagaccaaacaaagaggcaggaaccaacggccaagaaaaccacacaaaaaacacacagcgagaaaacaacagaagagcgaacaagcgaacaaccacacacagccgcgaaaaaaccgggacggcagacacaaaagcgcggcggcacaa

SEQ ID NO: 459808 - DNA, 1238 bp, Homo sapiens
  misc_feature (1114)..(1114): n is a, c, g, or t
  misc_feature (1126)..(1127): n is a, c, g, or t
ggcgactacaataagtgccgggagcttgtgagaaggccattgaagtggggagagaaaaccgagaagactatcgacagatgccaaagcatatgctcgaattggcaactcctacttcaaagaagaaaagtacaaggatgccatccatttctataacaagtctctggcagagcaccgaaccccagatgtgctcaagaaatgccagcaggcagagaaaatcctgaaggagcaagagcggctggcctacataaaccccgacctggctttggaggagaagaacaaaggcaacgagtgttttcagaaaggggactatccccaggccatgaagcattatacagaagccatcaaaaggaacccgaaagatgccaaattatacagcaatcgagctgcctgctacaccaaactcctggagttccagctggcactcaaggactgtgaggaatgtatccagctggagccgaccttcatcaagggttatacacggaaagccgctgcgctggaagcgatgaaggactacaccaaagccatggatgtgtaccagaaggcgctagacctggactccagctgtaaggaggcggcagacggctaccagcgctgtatgatggcgcagtacaaccggcacgacagccccgaagatgtgaagcgacgagccatggccgaccctgaggtgcagcagatcatgagtgacccagccatgcgccttatcctggaacagatgcagaaggacccccaggcactcagcgaacacttaaagaatcctgtaatagcacagaagatccagaagctgatggatgtgggtctgattgcaattcggtgatgacttgttcatccccccttcccttcgccctcatgtggaaagaggagctgggaccgcggcgagcagcacggagcggaagggagagcaggggagagaaggcctcatctctctatatttatacataaccccggggaagacacagagactcgtacctgcgctgtttgtgccgccgctgcctctgggccctcccagcacacgcatggtctcttcaccgctgccctcgagttccatgtctctttcccctgcccctagttgctgtctcggctgctctcccacaataaattcggggcagggggcatngtaatgcgggannggacaaaacgcgaccagagcacgcccaacaggtcgccagacctggccaaccacagaacaaaaaaaacaggcacacccaacagcaccacacggacaagcacgcccaacgagg

SEQ ID NO: 459809 - DNA, 1119 bp, Homo sapiens
gaagcgaccatcccgaacaactccggatggaattgggccgcgtaggaaaagtacaaggatgccatccatttctataacaagtctctggcagagcaccgaaccccagatgtgctcaagaaatgccagcaggcagagaaaatcctgaaggagcaagagcggctggcctacataaaccccgacctggctttggaggagaagaacaaaggcaacgagtgttttcagaaaggggactatccccaggccatgaagcattatacagaagccatcaaaaggaacccgaaagatgccaaattatacagcaatcgagctgcctgctacaccaaactcctggagttccagctggcactcaaggactgtgaggaatgtatccagctggagccgaccttcatcaagggttatacacggaaagccgctgcgctggaagcgatgaaggactacaccaaagccatggatgtgtaccagaaggcgctagacctggactccagctgtaaggaggcggcagacggctaccagcgctgtatgatggcgcagtacaaccggcacgacagccccgaagatgtgaagcgacgagccatggccgaccctgaggtgccctggaacagatgcagaaggacccccaggcactcagcgaacacttaaagaatcctgtaatagcacagaagatccagaagctgatggatgtgggtctgattgcaattcggtgatgacttgttcatccccccttcccttcgccctcatgtggaaagaggagctgggaccgcggcgagcagcacggagcggaagggagagcaggggagagaaggcctcatctctctatatttatacataaccccggggaagacacagagactcgtacctgcgctgtttgtgccgccgctgcctctgggccctcccagcacacgcatggtctcttcaccgctgccctcgagttccatgtctctttcccctgcccctagttgctgtctcggctgctctcccatagttggttttttttttatttggggcagtgggcatgttatggggaggggagggggttcttccagcctcaggtcccagctgtctcacgttgtttattctgcgtccccttctccaataaaacaagccagttgggcgtggtta

SEQ ID NO: 459810 - DNA, 962 bp, Homo sapiens
ggcgactacaataagtgccgggagcttgtgagaaggccattgaagtggggagagaaaaccgagaagactatcgacagatgccaaagcatatgctcgaattggcaactcctacttcaaagaagaaaagtacaaggatgccatccatttctataacaagtctctggcagagcaccgaaccccagatgtgctcaagaaatgccagcaggcagagaaaatcctgaaggagcaagagcggctggcctacataaaccccgacctggctttggaggagaagaacaaaggcaacgagtgttttcagaaaggggactatccccaggccatgaagcattatacagaagccatcaaaaggaacccgaaagatgccaaattatacagcaatcgagctgcctgctacaccaaactcctggagttccagctggcactcaaggactgtgaggaatgtatccagctggagccgaccttcatcaagggttatacacggaaagccgctgcgctggaagcgatgaaggactacaccaaagccatggatgtgtaccagaaggcgctagacctggactccagctgtaaggaggcggcagacggctaccagcgctgtatgatggcgcagtacaaccggcacgacagccccgaagatgtgaagcgacgagccatggccgaccctgaggtgcagcagatcatgagtgacccagccatgcgccttatcctggaacagatgcagaaggacccccaggcactcagcgaacacttaaagaatcctgtaatagcacagaagatccagaagctgatggatgtgggtctgattgcaattcggtgatgacttgttcatccccccttcccttcgccctcatgtggaaagaggagctgggaccgcggcgagcagcacggagctcaggtcccagctgtctcacgttgtttattctgcgtccccttctccaataaaacaagccagttgggcgtggtta

SEQ ID NO: 459811 - DNA, 1415 bp, Homo sapiens
ggcgactacaataagtgccgggagcttgtgagaaggccattgaagtggggagagaaaaccgagaagactatcgacagatgccaaagcatatgctcgaattggcaactcctacttcaaagaagaaaagtacaaggatgccatccatttctataacaagtctctggcagagcaccgaaccccagatgtgctcaagaaatgccagcaggcagagaaaatcctgaaggagcaagagcggctggcctacataaaccccgacctggctttggaggagaagaacaaaggcaacgagtgttttcagaaaggggactatccccaggccatgaagcattatacagaagccatcaaaaggaacccgaaagatgccaaattatacagcaatcgagctgcctgctacaccaaactcctggagttccagctggcactcaaggactgtgaggaatgtatccagctggagccgaccttcatcaagggttatacacggaaagccgctgcgctggaagcgatgaaggactacaccaaagccatggatgtgtaccagaaggcgctagacctggactccagctgtaaggaggcggcagacggctaccagcgctgtatgatggcgcagtacaaccggcacgacagccccgaagatgtgaagcgacgagccatggccgaccctgaggtgcagcagatcatgagtgacccagccatgcgccttatcctggaacagatgcagaaggacccccaggcactcagcgaacacttaaagaatcctgtaatagcacagaagatccagaagctgatggatgtgggtctgattgcaattcggtgatgacttgttcatccccccttcccttcccgctgccctcgagttccatgtctctttcccctgcccctagttgctgtctcggctgctctcccatagttggttttttttttatttggggcagtgggcatgttatggggaggggagggggttcttccagcctcaggtcccagctgtctcacgttgtttattctgcgtccccttctccaataaaacaagccagttgggcgtggttataaaaaaaaaaaaaaaaaaaaaacaaaaaaaaaaaaaaaaaacaacaacaaaaaaaaaaaaaaaaaaacaaaaaaaagagagcggcaacaaaacaccaacacaagagggacgacaaaagagagagaaaaaaaaaaagacaagaggacccaagaagaccacaacacacaagaagagacacaaaaagcacgaagaggaaagacaaaccacaggacaacagagaaaagagaccaaacaaagaggcaggaaccaacggccaagaaaaccacacaaaaaacacacagcgagaaaacaacagaagagcgaacaagcgaacaaccacacacagccgcgaaaaaaccgggacggcagacacaaaagcgcggcggcacaa

SEQ ID NO: 459812 - DNA, 836 bp, Homo sapiens
ttttctttttctttttctttttttaaataatttgaacaaaaatagttcactgtgggatttgaatgacctacagttctagtatactagggttggacatttctctctttatattttattactctgtacttttgaggttcatgggtgcagtggtcagaaggaaattttactctgccctaaaatctgcctacgtagtagatgccgatgatacagcatctaatatgttgagcacatctgtcagaaaagcatacagtgtggaaggaagtgaggtcatgcggattggtggtgaagtgcgtctcccttccagaaatctgaaaaacagaacagctccctcctcggactcaaacacagccttcgattcaaatatttttctacacataaaccagatgggagaagacttctcctgcaagtaaagctggatcattgttcctccctggaaacatggaaattattttctgagaaggcatagttgtataggctgaaagttcatcctaattattctactttatttaagtacagatttccctttttaaaaagtctttcctatgtttgctgagtgaagttatttttcaaattctggagttcctgagctttcagggtatttttgtagtatatcatctgcacacatccaacgtggattactgagttatttctcatgatatgttttggaaactgtttaaacaccaactgtgtattggcttttcatgtgcacacggttgcagtgtatctctctaacttaagtagtttctgaaactcattaatgataatctggtgtcgggaaaatgatttgtaccgacatttcgttaagggtggctgtatggatggcaagtgtgagagcg

SEQ ID NO: 459813 - DNA, 654 bp, Homo sapiens
catagaccctgaggttctactcagggcctgaggttctcaagaatgaacattcctggacattcattctgtgtcctggtttctaccttcacttggagtaaattatgggggaaagaacatcatgaagacctgctattgtcagagtgtcatttcctctttctatctttctgtggattaattttaaatccatttgatagaattaatcatataagccagtctcatttccctgcaaatgtctgccttcgtgcaggtgattctgtagaaaggagtttctccaataaagcagagcttctctttcaactccatggacatcagagagagtccctttcaaaaaaggaggctcaggtctggagagacaaaggcctctactttcgaaaaggcctcttggatcaagcccagaccctcatcagagctgacaacatgtccagcctgcactactgcaagaacttctttgtctatggtagtgtggtcaactgaagaagccggcttagttgctccagtcaggtgctcacactaagaaaggatgggtgaaggttataaagtggctgtgaatgagaactcggtctgggctctaccaagcagagaagccatgcagagatgagaaaggtgaaagccatgaaaccatgttaagcagaaaaataaaaattcaaaacagaa

SEQ ID NO: 459814 - DNA, 2772 bp, Homo sapiens
cgcggtgtggctccaggtttgtttttctccggtacagcctggtagggagggctcccggcatctccctgcttcggggcagaggatgccgggggtagagtacgggagggctggagcgagggtggactggaggtgccgcttgtcctggaggtgggagagagggagcggctttgccgcctggcctgcgtcctaatcctgtcctggttcttctgctcccgaagggaacgtaggtcccgcgcctgtgataagtaaggttggattttctcttccctgaggtgaaggatgcccggaggcctcggcaggaccgcgcggaaacgggccttctgcccaaaagatgctgcttctctccttattctttcccctcagaatctcgctgtctccttccaaccacctgtggtcggcatccccgcgttgtcactgcgacgcagaggtcgcagcttcatggcctgatgccttcaggaagtattttgaagtcatcgtggctgtggattgggggatttcttgtttccactgacctgtgaggccgcgcacgtggagggaggcaccccgggtcctccggcactgtccggcctcgcctgtgtccctagtagcagtgggcatttccagacggtgcagcttgtggctaaagtgacaggaagatgtaggagctttcagtcttggatgaggattcgaactgaagggcttaggcccagctgtcttggagcaaaacatctgttgtgggatgtggcggcagaggagggcaaggccgaaggagcagacagcaccgcttcttggggagttgtgaaggcatcatgcggagggccgagcttagcagccaagtggaggacagcaccctccatgcctggattcgttactcgctcgttctcgatgttgagctgctggcatattgcagcacaactagagatgtacggatgcccccatcttgatcttacagaatcagaggtgcagccgcaagaaaggtctctacaccctctcggttttctctgctctgccaacactagtggaatatgatcacatcccagggatcagtgtcatttagggatgtgactatgggcttcactcaagaggagtggcatcatctggaccctgctcagaggaccctgtagaggaatgtgatgctggagaactacagccaccttgtctcagtagggtattgcattcctaaaccagaagtgatcctcaaattggagacaggcaaggagccatggatattagaggaaaaatttcgaagccagagtcatctgggtgagttagtgccagatggaatttaaagaattaattaataccagtagaaactattcaagaatgaagttcaatgagtttaacaaaggtggaaaatgtttctgtgatgaaagcatgaaataattcattttgaagaggaaccttctgaatataataacaatgggaacagcttctggctgaatgaagacctcatttggcatcagaagattaaaaattgggagcaaccttttgaatacaatgaatgtgggaaagctttccctgagaattcactcttccttgtacataagagagcttacacaggacagaaaacatgcaaatatactgaacatgggaaaacctgttatatgtcattttttattactcatcagcaaacacatccaagagagaaccactatgaatgtaatgaatgtggagaaagtatctttgaggaatccattctctttgaacatcagaatgtttacccattcagccagaatttaaatcccactctaattcagagaacccactcaattagcaatattattgaatataatgaatgtggaacctttttcagtgaaaaattagcccttcatttacaacagagaacacatccaggggaaaaaccttatgaatgtcatgaatgtggaaaaaccttcacccagaagtcagcccacacaagacatcagagaacacacacagggaaaaccctatgaatgtcacggatgtgggaagaccttctataagaattcagacctcattagaaatcaaagaattcacacaggggagagaccttacagatgtcatgaatggagaaatccttcagtgaaaagtcatcccttactcaaaatcagagaacacacgtggggagaaatcatgaatgtcatgaatgtgggaaaacctcgtttaagtcagttctaactgtgcatcagaaaacacacaggggagaagccctatgaatgctatgcatgtggcaacacctttctcagaaaatccgacctcattaaacatcagagaattcacacaggagaaaaaccttatgaatgtaatgaatgtgggaagtcattctccgagaagtcaacccttactaaacatctaagaacacacagatgggaaatcttatgcatgtattcaatgtggaaaatttttctgctgctactacagtttcacagaacatctgagaagacacacaggggagaaaccttttggatgtaatgaatgtgggaaaaccttccatcagaagttggccctaattgttcaccagagaactcatataagacagaaaccctatggatgtaatgaatgtggaaaatcattctgtgtgaagtcaaaactcattgcacatcatagaacatacacaggggagaaaccctatgaatgtaatgtttgtggaaaattattattaagtcaaaactaactgtacatcacagaacacacttgaggtgaaaccctataaatgtagtaagtgagggaaattactctgggtgaagtcagaactttgtagagcagagaacataaagggtgagagaaatctgttaatataatgataatgagaac

SEQ ID NO: 459815 - DNA, 2634 bp, Homo sapiens
cgcggtgtggctccaggtttgtttttctccggtacagcctggtagggagggctcccggcatctccctgcttcggggcagaggatgccgggggtagagtacgggagggctggagcgagggtggactggaggtgccgcttgtcctggaggtgggagagagggagcggctttgccgcctggcctgcgtcctaatcctgtcctggttcttctgctcccgaagggaacgtaggtcccgcgcctgtgataagtaaggttggattttctcttccctgaggtgaaggatgcccggaggcctcggcaggaccgcgcggaaacgggccttctgcccaaaagatgctgcttctctccttattctttcccctcagaatctcgctgtctccttccaaccacctgtggtcggcatccccgcgttgtcactgcgacgcagaggcgagcgaggtggcgggaagcacccgcggggcggggagggaccctgcgggcgcggactccacaccaagcctctgctcagcgtcaccccgcttgctgtgtcctcgcaggtcgcagcttcatggcctgatgccttcaggaagtattttgaagtcatcgtggctgtggattgggggatttcttgtttccactgacctgtgaggccgcgcacgtggagggaggcaccccgggtcctccggcactgtccggcctcgcctgtgtccctagtagcagtgggcatttccagacggtgcagcttgtggctaaagtgacaggaagatgtaggagctttcagtcttggatgaggattcgaactgaagggcttaggcccagctgtcttggagcaaaacatctgttgtgggatgtggcggcagaggagggcaaggccgaaggagcagacagcaccgcttcttggggagttgtgaaggcatcatgcggagggccgagcttagcagccaagtggaggacagcaccctccatgcctggattcgttactcgctcgttctcgatgttgagctgctggcatattgcagcacaactagagatgtacggatgcccccatcttgatcttacagaatcagaggtgcagccgcaagaaaggtctctacaccctctcggttttctctgctctgccaacactagtggaatatgatcacatcccagggatcagtgtcatttagggatgtgactatgggcttcactcaagaggagtggcatcatctggaccctgctcagaggaccctgtagaggaatgtgatgctggagaactacagccaccttgtctcagtagggtattgcattcctaaaccagaagtgatcctcaaattggagacaggcaaggagccatggatattagaggaaaaatttcgaagccagagtcatctgggtgagttagtgccagatggaatttaaagaattaattaataccagtagaaactattcaagaatgaagttcaatgagtttaacaaaggtggaaaatgtttctgtgatgaaagcatgaaataattcattttgaagaggaaccttctgaatataataacaatgggaacagcttctggctgaatgaagacctcatttggcatcagaagattaaaaattgggagcaaccttttgaatacaatgaatgtgggaaagctttccctgagaattcactcttccttgtacataagagagcttacacaggacagaaaacatgcaaatatactgaacatgggaaaacctgttatatgtcattttttattactcatcagcaaacacatccaagagagaaccactatgaatgtaatgaatgtggagaaagtatctttgaggaatccattctctttgaacatcagaatgtttacccattcagccagaatttaaatcccactctaattcagagaacccactcaattagcaatattattgaatataatgaatgtggaacctttttcagtgaaaaattagcccttcatttacaacagagaacacatccaggggaaaaaccttatgaatgtcatgaatgtggaaaaaccttcacccagaagtcagcccacacaagacatcagagaacacacacagggaaaaccctatgaatgtcacggatgtgggaagaccttctataagaattcagacctcattagaaatcaaagaattcacacaggggagagaccttacagatgtcatgaatggagaaatccttcagtgaaaagtcatcccttactcaaaatcagagaacacacgtggggagaaatcatgaatgtcatgaatgtgggaaaacctcgtttaagtcagttctaactgtgcatcagaaaacacacaggggagaagccctatgaatgctatgcatgtggcaacacctttctcagaaaatccgacctcattaaacatcagagaattcacacaggagaaaaaccttatgaatgtaatgaatgtgggaagtcattctccgagaagtcaacccttactaaacatctaagaacacacagatgggaaatcttatgcatgtattcaatgtggaaaatttttctgctgctactacagtttcacagaacatctgagaagacacacaggggagaaaccttttggatgtaatgaatgtgggaaaaccttccatcagaagttggccctaattgttcaccagagaactcatataagacagaaaccctatggatgtaatgaatgtggaaaa

SEQ ID NO: 459816 - DNA, 1144 bp, Homo sapiens
cgcggtgtggctccaggtttgtttttctccggtacagcctggtagggagggctcccggcatctccctgcttcggggcagaggatgccgggggtagagtacgggagggctggagcgagggtggactggaggtgccgcttgtcctggaggtgggagagagggagcggctttgccgcctggcctgcgtcctaatcctgtcctggttcttctgctcccgaagggaacgtaggtcccgcgcctgtgataagtaaggttggattttctcttccctgaggtgaaggatgcccggaggcctcggcaggaccgcgcggaaacgggccttctgcccaaaagatgctgcttctctccttattctttcccctcagaatctcgctgtctccttccaaccacctgtggtcggcatccccgcgttgtcactgcgacgcagaggcgagcgaggtggcgggaagcacccgcggggcggggagggaccctgcgggcgcggactccacaccaagcctctgctcagcgtcaccccgcttgctgtgtcctcgcaggtcgcagcttcatggcctgatgccttcaggaagtattttgaagtcatcgtggctgtggattgggggatttcttgtttccactgacctgtgaggccgcgcacgtggagggaggcaccccgggtcctccggcactgtccggcctcgcctgtgtccctagtagcagtgggcatttccagacggtgcagcttgtggctaaagtgacaggaagatgtaggagctttcagtcttggatgaggattcgaactgaagggcttaggcccagctgtcttggagcaaaacatctgttgtgggatgtggcggcagaggagggcaaggccgaaggagcagacagcaccgcttcttggggagttgtgaaggcatcatgcggagggccgagcttagcagccaagtggaggacagcaccctccatgcctggattcgttactcgctcgttctcgatgttgagctgctggcatattgcagcacaactagagatgtacggatgcccccatcttgatcttacagaatcagaggtgcagccgcaagaaaggtctcccgcctggcccatcgttaccgttgccagccagttgttcaatgtgtatttcccagctagagacatgacagtgcactc

SEQ ID NO: 459817 - DNA, 1512 bp, Homo sapiens
cgcggtgtggctccaggtttgtttttctccggtacagcctggtagggagggctcccggcatctccctgcttcggggcagaggatgccgggggtagagtacgggagggctggagcgagggtggactggaggtgccgcttgtcctggaggtgggagagagggagcggctttgccgcctggcctgcgtcctaatcctgtcctggttcttctgctcccgaagggaacgtaggtcccgcgcctgtgataagtaaggttggattttctcttccctgaggtgaaggatgcccggaggcctcggcaggaccgcgcggaaacgggccttctgcccaaaagatgctgcttctctccttattctttcccctcagaatctcgctgtctccttccaaccacctgtggtcggcatccccgcgttgtcactgcgacgcagaggcgagcgaggtggcgggaagcacccgcggggcggggagggaccctgcgggcgcggactccacaccaagcctctgctcagcgtcaccccgcttgctgtgtcctcgcaggtcgcagcttcatggcctgatgccttcaggaagtattttgaagtcatcgtggctgtggattgggggatttcttgtttccactgacctgtgaggccgcgcacgtggagggaggcaccccgggtcctccggcactgtccggcctcgcctgtgtccctagtagcagtgggcatttccagacggtgcagcttgtggctaaagtgacaggaagatgtaggagctttcagtcttggatgaggattcgaactgaagggcttaggcccagctgtcttggagcaaaacatctgttgtgggatgtggcggcagaggagggcaaggccgaaggagcagacagcaccgcttcttggggagttgtgaaggcatcatgcggagggccgagcttagcagccaagtggaggacagcaccctccatgcctggattcgttactcgctcgttctcgatgttgagctgctggcatattgcagcacaactagagatgtacggatgcccccatcttgatcttacagaatcagaggtgcagccgcaagaaaggtctacttcagtgtctataaagttttatcgggactcagccatactcatgtatttatgtatagcctgtgagtactttcacactacgagggcagagttgactggttgcagtagagactgtgatggcccacaagcctaaaatttcttttgtttaaatgctattggcgctcttgtaatggtttgccaggccatttacatctctgtgtaaagctttacttcctgcttacactgagcctgaaggtcaaccagactgaaagcttaggttcctctcaggttttttcttactggctttggatctactatgagtttcttggagacagcttatggttagatctttttcttttgttccccttattttctgtttataatttttatggatacatagtgagtatatatatttatgtgatttatatacatgagatattttgatataggcctacaatgtgtaaaat

SEQ ID NO: 459818 - DNA, 1688 bp, Homo sapiens
cgcggtgtggctccaggtttgtttttctccggtacagcctggtagggagggctcccggcatctccctgcttcggggcagaggatgccgggggtagagtacgggagggctggagcgagggtggactggaggtgccgcttgtcctggaggtgggagagagggagcggctttgccgcctggcctgcgtcctaatcctgtcctggttcttctgctcccgaagggaacgtaggtcccgcgcctgtgataagtaaggttggattttctcttccctgaggtgaaggatgcccggaggcctcggcaggaccgcgcggaaacgggccttctgcccaaaagatgctgcttctctccttattctttcccctcagaatctcgctgtctccttccaaccacctgtggtcggcatccccgcgttgtcactgcgacgcagaggcgagcgaggtggcgggaagcacccgcggggcggggagggaccctgcgggcgcggactccacaccaagcctctgctcagcgtcaccccgcttgctgtgtcctcgcaggtcgcagcttcatggcctgatgccttcaggaagtattttgaagtcatcgtggctgtggattgggggatttcttgtttccactgacctgtgaggccgcgcacgtggagggaggcaccccgggtcctccggcactgtccggcctcgcctgtgtccctagtagcagtgggcatttccagacggtgcagcttgtggctaaagtgacaggaagatgtaggagctttcagtcttggatgaggattcgaactgaagggcttaggcccagctgtcttggagcaaaacatctgttgtgggatgtggcggcagaggagggcaaggccgaaggagcagacagcaccgcttcttggggagttgtgaaggcatcatgcggagggccgagcttagcagccaagtggaggacagcaccctccatgcctggattcgttactcgctcgttctcgatgttgagctgctggcatattgcagcacaactagagatgtacggatgcccccatcttgatcttacagaatcagaggtgcagccgcaagaaaggtctctacaccctctcggttttctctgctctgccaacactagtggaatatgatcacatcccagggatcagtgtcatttagggatgtgactatgggcttcactcaagaggagtggcatcatctggaccctgctcagaggaccctgtagaggaatgtgatgctggagaactacagccaccttgtctcagtagggtattgcattcctaaaccagaagtgatcctcaaattggagacaggcaaggagccatggatattagaggaaaaatttcgaagccagagtcatctgggtgagttagtgccagatggaatttaaagaattaattaataccagtagaaactattcaagaatgaagttcaatgagtttaacaaaggtggaaaatgtttctgtgatgaaagcatgaaataattcattttgaagaggaaccttctgaatataataacaatgggaacagcttctggctgaatgaagacctcatttggcatcagaagattaaaaattgggagcaaccttttgaatacaatgaactcaaaagatttacaagagataaaacaaacccgcttggagttggcgctgtagtgttgaaaagctaaactccaaaggcttattggggctctattgctcttg

SEQ ID NO: 459819 - DNA, 1015 bp, Homo sapiens
tggacttttgagaatcaaagtgaactgccagggacaaacaagagtggcgaggaaatggaagcagtcataccactcaggctggaaaatcgctctaggaatggcaagaagaaagtcagctgccatgtcacgaagtgccctgtgagaaggacctgtaaggagggacggagggaggcctctaaatgacagccttcgaggaactgaatcctgctggtgaccatgtgagggagcttggactccggtccccctgtgttgagccttcagatgagttggcagccccagctggtggcatgactgtaacgtcctgaaacaccttcagccagaaagcattcagctaaaccacacctgtatttctgacccaaagaaattgtgagataataaacatttcttctcttgaactgctataccttaagctaattcgttacacagcaatagataacaaatactacctctggacccctgcctgccaccataccaaattccatgctctgagttctagagtcagtggtgtttccacctgtcatgcccagcccttcactgctagtattataatgagggcttgcccatatctctgcccccagatggcagactctaacagcatgagggtcactgcccccatgattcaatcacctccttctgggtccttcccacgacatgtagggattatgggaaccacagttcaagatgagatttgggtggggacacagccaaactatataactgacttaaatatttacttgcatcaggctctgatgtctagtttcaccatcaagtatgcctatcaggaggacattaatttattcattcaacaattattaaaggcctactatgtctcaggcactttgcaagttaacaaagaaaatggaaaaggtacagccagacaggtggcagaaaatccaagagagtatagtgtcacaggtaccaaaaagagtgttataaggagccactggccacatgtgtgaattgctaacctccatagctaggattacaggcatgtgccaccacatctcagcctctc

SEQ ID NO: 459820 - DNA, 1177 bp, Homo sapiens
gaaaaaacaagcaacatctcatccctcactggttttactgttgggggtcttgaaatttcttttattaatacttgaattcactgtagaaaatggagaaaccacggaccagctaaaagaagcaaataagtgtctcggtgggttatttcagatgagcacggtgctattttgaccagagggaacagcttttctgatggtggtggtggtttttctttcttttacttttttccttatttttttttttaaactctcctgttaaaaagaggattctatcttcgaacttgacattctgtcatggtaacctttcttccggcagatgggatttcaaacgtgagcaccttggctagtgctaaatatatggtcctggatgatggtagacaaggctgcccagaaactgtggttttctgtgctgcttctgaaagggctgaatttccggtggcttcctggctatctaattcaaaggccgggcctggcagagctggctgtgcccaactttgctgtacgagttattgtaaaggtgaaggatgctgacacctttgagcccacacccccaaaagtgggcctgtggctgtcccccgaaacccctccggagcacaccccagcctctgccagtcttcagttcagcccaatgaaacagcagttccaggatatgcatttgccattaaaaacaaagaaagaaagaaagaaatcaatccttcggcctctttggcctgagctggtcgtctgcccagagacgctggggggcccaacgccgccggtgtggactgtgggtgttgcggatccggagaccacaggggtcacaggggccgccagtccagggcagatttccctgagtggggccatcactcctaggccttgctgctacagatgcctcccccggagcttgcccgactgccccagcggtcccatcggcgcacgtttcctgtcccctgcccaggatggcacccctagaaggttggggctggcccagcctccctacaggcaacagcacttttgaaatctctggatagttttgaactctctgttcttaattaaatatgcaatttttcacggtaaccaggttaattcttttgtgttgtgttgtaatactgttaggaattttcatagttcttattaaacattattcaggcattgtgaattccataattaaaaaaaatgaaaagaacaaagcttgattcac

SEQ ID NO: 459821 - DNA, 1460 bp, Homo sapiens
aatgccttcctgccatgtggtgacagattaaaagctgctatacactttggaactggaaactgagctcccaatataaaggagataagccatcatgcttacaatatgttgtgcagagctcactggtgggcagtttttcttaacaatgcatcaggacttttgctatttgtaaaggaagcttaaaggaagctgagagtgctgagggcacatctgaaaccactggaggttggcgacgtggaggtcaggtagtagtgctctcccaccaggagtccctctgcacccctggagagagcagtcattatgcaggacaacccatctgctcagaactttcagtggcgacttgtggtgtgactctgttcccattcatctatgtgctgctgtaggcttagcttcccacagcctccccagctttgccatttgtcattatcatttactcttaatatttattctatctatgaccctgatgcacagagtgatagctgatagtctcttaaaacaacgtttacaattattttgacagtttaccgtgttttgttctctcaacaatacttagaatttgtctgagttatagttgcatagacggcaattttcctgacctagttttctgactatgatttatgggtcagtaaactccttaaatgatggaatataacatctcaggccacagggaacacttactatcacatgctcactgttgcaggacggatgcgtggccagcctcaggttgctaaatgttagggtgatctgccttccttctggggcggtgattctccacttgtagatccggccatgaggatttaggtgaacacagtcgatgaagcacgactgccacaaaaatgaacatttcctccacaggaagaatcaccatttggaatctggaaaggctgttcaaaatggacagcaatggtcaggccactttggaccaggacgtgccaggaacagttgaggttggatgggtaggtctctggatacctggggaacatgatgatcccttgtctgcatgcaaatatccaccagagcctccccacaaagaaacaaaggaatcactagttctaaaaacatcctttggtgcttctgcaaaaacagttgggtgtagtgcagcccccaagtccccagaagtttggtggagatggtgggtggaggtcacctccagatttcatgcccgtgctgtggatggaaagcgccatgtgttcagagcagcttctggcttcctggcagccagcagcaacatcagcatcccctgagaagttgctggaaattcagattctcaggctttaccccaaatctactaaatcagaaactccaggacactcctccatctgtgttttagcaaggcctctggtgattctgatgtctccgtggtttgagacccactgccatagagcagggctgtctaatagaacgttctgtggtgatgaaacgtgatcctgccctgaagatgttgtcagccttattttatagtc

SEQ ID NO: 459822 - DNA, 1230 bp, Homo sapiens
gtcgcagcagtatggtgatgacagagttgtggttggtacaggccagaatgtggtcattaccattgcaggagacagagtgtagagctgtgtggcccttgtcagctgcacagggatccgtgccattttccagcagctaccgcactttttccacatcgttggcactggtagcattggcattgtctccctcattctcttcagagctgcacctctttgcccgagccaccactctgcgtcatactgccaccagtcgtgtagtagtgcaatggggacttggcccaggaggcctcctggcccgggaggcccatgcagctgcccccgtgcagacccgaagtcagcgaaggagaagaggccccagctcctgtttgttgattgtgatgaaatgcatgctgaggcacatgccttgggagctaagtggcagctatacttcactactatggcagtaaagatgactataaagactggcgggggatggatcctttcaaatgtacctgagctgggatgcccagcttgtggaacgcacagcaggaggtgagcagtggccaaaggaacatctgaaggaacacctgatgaggctgcacccttggcggaaagaacacctgacatggctgaaagcttggtggaaaaaccacctgatgaggctgcacccttggtggagggaacagctgacaaaattcaatgtttggggaaagcaacatctggaaagtttgaacagtcagcagaagaaacacctaagaaaattatgaggactgcaaaagaaacatctgagaaatttgcatggccagcaaaagaaagacctaggaagatcacatgggaggaaaaagaaacatctgtaaagactgaatgcgtggcaggagtaatacctaataaaactgaagttttggaaaaaggaacatctgagatgctcacgtgtcctacaaaagaaacatctacaaaagcaagtacaaatgataagatgcccacatcagagtcaggacaaaaagaagatacgaaatcaccttcagtttctgaggtcacagctatggatgtggaagagataggaaaggcctcaccacttaagatagaagcagcagctgcatagtggtaacagcaatgagtggatgtcaaaagacagattcaactagcctatcaatattcttgggtgcagttccttctcatgaaagagcaagggaacttaaaaaatatcactgtgaacaacttacagcaaaaataaaacaaatgaaaaataagttt

SEQ ID NO: 459823 - DNA, 995 bp, Homo sapiens
gtcgcagcagtatggtgatgacagagttgtggttggtacaggccagaatgtggtcattaccattgcaggagacagagtgtagagctgtgtggcccttgtcagctgcacagggatccgtgccattttccagcagctaccgcactttttccacatcgttggcactggtagcattggcattgtctccctcattctcttcagagctgcacctctttgcccgagccaccactctgcgtcatactgccaccagtcgtgtagtagtgcaatggggacttggcccaggaggcctcctggcccgggaggcccatgcagctgcccccgtgcagacccgaagtcagcgaaggagaagaggccccagctcctgtttgttgattgtgatgaaatgcatgctgaggcacatgccttgggagctaagtggcagctatacttcactactatggcagtaaagatgactataaagactggcgggggatggatcctttcaaatgtacctgagctgggatgcccagcttgtggaacgcacagcaggaggtgagcagtggccaaaggaacatctgaaggaacacctgatgaggctgcacccttggcggaaagaacacctgacatggctgaaagcttggtggaaaaaccacctgatgaggctgcacccttggtggagggaacagctgacaaaattcaatgtttggggaaagcaacatctggaaagtttgaacagtcagcagaagaaacacctaagaaaattatgaggactgcaaaagaaacatctgagaaatttgcatggccagcaaaagaaagacctaggaagatcacatgggaggaaaaagaaacatctgtaaagactgaatgcgtggcaggagtaatacctaataaaactgaagttttggaaaaaggaacatctgagatgctcacgtgtcctacaaaagaaacatctacaaaagcaagtacaaatgaaggaagcaacaaagacagcaactgaacaacaagaaaatgatattgga

SEQ ID NO: 459824 - DNA, 3292 bp, Homo sapiens
gacacaggaagcactaaagagcagcgcttgacgccatggcccgcccccactccacagtcattggaagagctcaaagttaaaggctcccgctaaaaatcagtatgtttcattttgcagttactgggagggggcttgctgtggccccatctgggagagttgagccctggtccagccccgcgcaggaagggaggctgtaaccgtgccagcctgctgcagctgcagtgatgttttcctgtatgagacaaacaaagtcgcccggatccaaagcatcaattatggcaccattaagttcttccacgtgatcgtcttttcctatgttagcaaggaacatttgaaaaggaaattggaaaaataattccatttaccatagcatttaagagagctgaggctgtggagccagatggctgcgttcagagctggcgctgctgtttaccatgtgaccttggacaagcttctcgcttcattcataccacagtttgttcggctattaggtggaggagctgtaagggggagaggaactttgctgaaaggcacatcctccctgcagagcttgaagaacaatctaaccatgctggcatggggcccatcctacctgcaatgccaaggtaagtctgcgaaagtcacttatattcagagcatgtggattgggactctgaagaacaactttatggtggacaccttcgtctccatctggaactgactcagcacaagaagacagcttcgactccctatgatttcatctctgaccaatcagcactcctggcacactggcttcccccaacccaccaagttatccttaaaaactccattccctgattgctaggggagacagatttgagtaataataaaactccggtctcccccacagctggctctgcacgaattactcttcttctattgcaattcccctgtcttgatgaatcggctctgtctaggcagcaggcaaggtgaaccctttgagcagttacaattctatttaatacctctgtctctgccaggcacggtgactcacgcctgtaatcccaacactttgggaggctgagagagggaaaacgagtcacacggaagcaagtcatgcagccgagctaggattggaacggaagtggcctgcagagcctgcctcccaccccactgtgctatgcctcccattgatgctttcctgtgcctgccatttagctttgctctggtgagtggcaagctgtaccagtggaaagagcctgtcatcagttctgtgcacagcaaggtgaaaaggacagcagaagtgaaagaggagatcgtggagaaagaaatgaagaagttggtgcacagtgtctttaacatggcagattacaccttccctttgcaggcagaagcggaacttagaccaggacgcacagttaccatggcaatgacgcgcgccctaagggcggtggcagcgacgcagagagacctgggaggagacagaggcagggcttgcgacggaagtggcctctctgcttctgcagggctggggaagatgctgcgtccagcgttaccgtggctgtaccttggcctctgcagcctcctggtgggggaggcagaggccccgagccccgtggatccgctggagcggagccggccgtacgcggtgctgcgagggcagaacctggagtccctgtcgcccaggctggagtgcaatggtgcgatctcggctcgctgcaacctccgcgtctggggttcaagcgattctcctgcctcagccccctgagtagctgggattacagtgttgatgggaaccattttcagcatcctgctggtgactgtcatccttatggcattttgtgtctacaagcccattcggcgtcggtgacagccagacaagttcttcaatgagtatttgggaataggataagttgtgttgcacacaggccagtggagaagttggaaccaaaactttcctacttggaaatgacctttggtctggacagttggtaaatgctaaatgaattagaagaaaacatgtactagacattattttttcctaacactgtagcgcaaataattggcccctgagtccgcttctcagtgtttctgactgtacttgttaaaagtaagacctgaaagctccaaaggtcagtgtaaagatggagtgttcatgagaaagaaaacatggtaaccttgtgagtgcctgtaagaaccacactgtaaagaactcatcattaatgcttgaaaatgttattaagaaggagacttaccatgcagacattccctatttaagaaccatttggttacagtgggttaagaatcacagatttttttttttaatctcacctgagttagcctagaatgcgctggttgcaaagtggtgtcagctgtggggatcttgggccctcgttcctcacctgcatcctgccctgcactcaggtgctccccctgaagtcagggtcacatcaggtagacctgttactatatgcacctttggcctggaatgctctgaagttggactggaaatgttactaggttggcctgttacaaaaaggaccccatcctgcttaaacacattgatctcccttgccctgcatttgagtctttctagcccacggtctgaaacttgaggcagctttccagatttggaatgtaaaaggctcagtgggcactctgttcatccctgggtggggagggcccagccaacagaagtgcatgtccactgtgcgggccagtgtgtgtttacacaaatttcatctcagctttgaaaatgctgctattagtttccactgttggtgaactggattttttcctcctattgaaatgatactttcatacttataaagctgtcgtcaatatttatttcaaggtgctagatttaattttgttattaaattgaaatgcttatcttgtgttcaagcacagcactgattttaacaacctgcatttaatgtgaagtaaccgaagtaggatactgtaactgtgtaaggattttgtttgtaatcttgtaacattgaaccattgaaatgttcagttctttgcttttgagcaaaacgtcaattaaaactaaagtaaaatcctatatattgttttactccaccagttatttcccaagtgtttgaaatgcagttcatcttccttgatgtcatttgtggtcagcaggagactgcgaccaagctggcagttatggcagtttccctttcctgtcattatttagagcagactttcaatcccttgacatgccacgtttatgtagtgtgacaagcttgtttatagagcagagtgccttaggaacttagttcctagcagtgtctaacgtgcagaagttgctcaattaaagtttctggcc

SEQ ID NO: 459825 - DNA, 878 bp, Homo sapiens
  misc_feature (870)..(870): n is a, c, g, or t
  misc_feature (874)..(874): n is a, c, g, or t
gacacaggaagcactaaagagcagcgcttgacgccatggcccgcccccactccacagtcattggaagagctcaaagttaaaggctcccgctaaaaatcagtatgtttcattttgcagttactgggagggggcttgctgtggccccatctgggagagttgagccctggtccagccccgcgcaggaagggaggctgtaaccgtgccagcctgctgcagctgcagtgatgttttcctgtatgagacaaacaaagtcgcccggatccaaagcatcaattatggcaccattaagttcttccacgtgatcgtcttttcctatgttagcaaggaacatttgaaaaggaaattggaaaaataattccatttaccatagcatttaagagagctgaggctgtggagccagatggctgcgttcagagctggcgctgctgtttaccatgtgaccttggacaagcttctcgcttcattcataccacagtttgttcggctattaggtggaggagctgtaagggggagaggaactttgctgaaaggcacatcctccctgcagagcttgaagaacaatctaaccatgctggcatggggcccatcctacctgcaatgccaaggtaagtctgcgaaagtcacttatattcagagcatgtggattgggactctgaagaacaactttatggtggacaccttcgtctccatctggtgagtccagcacaagcagcctgagggttccatgggctcaacctcaccctccatccttatttccctgccactccagggctcctcctcatccagacttgcctgtgagtgccccttgatggatgtatttgtctgttctcatgctgctaataaagacatattcgagactaggtaatttanaaanaaaa

SEQ ID NO: 459826 - DNA, 919 bp, Homo sapiens
gacacaggaagcactaaagagcagcgcttgacgccatggcccgcccccactccacagtcattggaagagctcaaagttaaaggctcccgctaaaaatcagtatgtttcattttgcagttactgggagggggcttgctgtggccccatctgggagagttgagccctggtccagccccgcgcaggaagggaggctgtaaccgtgccagcctgctgcagctgcagtgatgttttcctgtatgagacaaacaaagtcgcccggatccaaagcatcaattatggcaccattaagttcttccacgtgatcgtcttttcctatgttagcaaggaacatttgaaaaggaaattggaaaaataattccatttaccatagcatttaagagagctgaggctgtggagccagatggctgcgttcagagctggcgctgctgtttaccatgtgaccttggacaagcttctcgcttcattcataccacagtttgttcggctattaggtggaggtaatactagcaccttccttatagagttggtttttgttttcatttttttggtgggggggagtaagaattgcaaaagttaatatatgtcagcaaaatagacttagaagagtggttggcacatggtaaggacatattagggttaccaaaaattgtttataattgggaaaattgaacaaaagttacagttaaatatctatcccagagactgactggcaaattatcacaatgtacctcttagcttgagccatatggaactgcctgtattctatagctatggcctacaaaatgggcagttctttctttcttttcttttttttggagagagagtctcactctgttgcccaggctgaagtgcagctgcagtgagcagagatagtgccactgcactccagcctgggtgacagagggagactctgtctcaa

SEQ ID NO: 459827 - DNA, 2744 bp, Homo sapiens
tttaggagtcatgcagctggaggctacaagattctgaccctccctaaactgctcctaagatcagtgcttgagatattttgcagaccctgcacttgatggatcagctcagtaaactgactcatctgatcttgtggccccttctcaggaactgactcagcacaagaagacagcttcgactccctatgatttcatctctgaccaatcagcactcctggcacactggcttcccccaacccaccaagttatccttaaaaactccattccctgattgctaggggagacagatttgagtaataataaaactccggtctcccccacagctggctctgcacgaattactcttcttctattgcaattcccctgtcttgatgaatcggctctgtctaggcagcaggcaaggtgaaccctttgagcagttacaattctatttaatacctctgtctctgccaggcacggtgactcacgcctgtaatcccaacactttgggaggctgagagagggaaaacgagtcacacggaagcaagtcatgcagccgagctaggattggaacggaagtggcctgcagagcctgcctcccaccccactgtgctatgcctcccattgatgctttcctgtgcctgccatttagctttgctctggtgagtggcaagctgtaccagtggaaagagcctgtcatcagttctgtgcacagcaaggtgaaaaggacagcagaagtgaaagaggagatcgtggagaaagaaatgaagaagttggtgcacagtgtctttaacatggcagattacaccttccctttgcaggcagaagcggaacttagaccaggacgcacagttaccatggcaatgacgcgcgccctaagggcggtggcagcgacgcagagagacctgggaggagacagaggcagggcttgcgacggaagtggcctctctgcttctgcagggctggggaagatgctgcgtccagcgttaccgtggctgtaccttggcctctgcagcctcctggtgggggaggcagaggccccgagccccgtggatccgctggagcggagccggccgtacgcggtgctgcgagggcagaacctggagtccctgtcgcccaggctggagtgcaatggtgcgatctcggctcgctgcaacctccgcgtctggggttcaagcgattctcctgcctcagccccctgagtagctgggattacagtgttgatgggaaccattttcagcatcctgctggtgactgtcatccttatggcattttgtgtctacaagcccattcggcgtcggtgacagccagacaagttcttcaatgagtatttgggaataggataagttgtgttgcacacaggccagtggagaagttggaaccaaaactttcctacttggaaatgacctttggtctggacagttggtaaatgctaaatgaattagaagaaaacatgtactagacattattttttcctaacactgtagcgcaaataattggcccctgagtccgcttctcagtgtttctgactgtacttgttaaaagtaagacctgaaagctccaaaggtcagtgtaaagatggagtgttcatgagaaagaaaacatggtaaccttgtgagtgcctgtaagaaccacactgtaaagaactcatcattaatgcttgaaaatgttattaagaaggagacttaccatgcagacattccctatttaagaaccatttggttacagtgggttaagaatcacagatttttttttttaatctcacctgagttagcctagaatgcgctggttgcaaagtggtgtcagctgtggggatcttgggccctcgttcctcacctgcatcctgccctgcactcaggtgctccccctgaagtcagggtcacatcaggtagacctgttactatatgcacctttggcctggaatgctctgaagttggactggaaatgttactaggttggcctgttacaaaaaggaccccatcctgcttaaacacattgatctcccttgccctgcatttgagtctttctagcccacggtctgaaacttgaggcagctttccagatttggaatgtaaaaggctcagtgggcactctgttcatccctgggtggggagggcccagccaacagaagtgcatgtccactgtgcgggccagtgtgtgtttacacaaatttcatctcagctttgaaaatgctgctattagtttccactgttggtgaactggattttttcctcctattgaaatgatactttcatacttataaagctgtcgtcaatatttatttcaaggtgctagatttaattttgttattaaattgaaatgcttatcttgtgttcaagcacagcactgattttaacaacctgcatttaatgtgaagtaaccgaagtaggatactgtaactgtgtaaggattttgtttgtaatcttgtaacattgaaccattgaaatgttcagttctttgcttttgagcaaaacgtcaattaaaactaaagtaaaatcctatatattgttttactccaccagttatttcccaagtgtttgaaatgcagttcatcttccttgatgtcatttgtggtcagcaggagactgcgaccaagctggcagttatggcagtttccctttcctgtcattatttagagcagactttcaatcccttgacatgccacgtttatgtagtgtgacaagcttgtttatagagcagagtgccttaggaacttagttcctagcagtgtctaacgtgcagaagttgctcaattaaagtttctggcc

SEQ ID NO: 459828 - DNA, 401 bp, Homo sapiens
actaagttagtggtaatttgttacagaaactaatataattgggatttaacttgccttgggggtgctggctctcccccattttcttctcagagcatctcttgggtcctcaacccttgctgagcccccaccatggcctagaggaccagggatggacttgattagattctcctcttgggattttaaaaaagagaagcagaggctgcatgctcagcttctccgtgccgcactgcaggcacagtgcccggcgccactgttctttaggggtccatgaagatgtctgttggccctgggttagtcatgaggtaagggatatgagggcagttcactttggaggctcagccctttggtgttacttttgctctggaaccttaggagctgtaagggggagaggaactttgctg

SEQ ID NO: 459829 - DNA, 3204 bp, Homo sapiens
gacacaggaagcactaaagagcagcgcttgacgccatggcccgcccccactccacagtcattggaagagctcaaagttaaaggctcccgctaaaaatcagtatgtttcattttgcagttactgggagggggcttgctgtggccccatctgggagagttgagccctggtccagccccgcgcaggaagggaggctgtaaccgtgccagcctgctgcagctgcagtgatgttttcctgtatgagacaaacaaagtcgcccggatccaaagcatcaattatggcaccattaagttcttccacgtgatcgtcttttcctatgttagcaaggaacatttgaaaaggaaattggaaaaataattccatttaccatagcatttaagagagctgaggctgtggagccagatggctgcgttcagagctggcgctgctgtttaccatgtgaccttggacaagcttctcgcttcattcataccacagtttgttcggctattaggtggaggagctgtaagggggagaggaactttgctgaaaggcacatcctccctgcagagcttgaagaacaatctaaccatgctggcatggggcccatcctacctgcaatgccaaggaactgactcagcacaagaagacagcttcgactccctatgatttcatctctgaccaatcagcactcctggcacactggcttcccccaacccaccaagttatccttaaaaactccattccctgattgctaggggagacagatttgagtaataataaaactccggtctcccccacagctggctctgcacgaattactcttcttctattgcaattcccctgtcttgatgaatcggctctgtctaggcagcaggcaaggtgaaccctttgagcagttacaattctatttaatacctctgtctctgccaggcacggtgactcacgcctgtaatcccaacactttgggaggctgagagagggaaaacgagtcacacggaagcaagtcatgcagccgagctaggattggaacggaagtggcctgcagagcctgcctcccaccccactgtgctatgcctcccattgatgctttcctgtgcctgccatttagctttgctctggtgagtggcaagctgtaccagtggaaagagcctgtcatcagttctgtgcacagcaaggtgaaaaggacagcagaagtgaaagaggagatcgtggagaaagaaatgaagaagttggtgcacagtgtctttaacatggcagattacaccttccctttgcaggcagaagcggaacttagaccaggacgcacagttaccatggcaatgacgcgcgccctaagggcggtggcagcgacgcagagagacctgggaggagacagaggcagggcttgcgacggaagtggcctctctgcttctgcagggctggggaagatgctgcgtccagcgttaccgtggctgtaccttggcctctgcagcctcctggtgggggaggcagaggccccgagccccgtggatccgctggagcggagccggccgtacgcggtgctgcgagggcagaacctggagtccctgtcgcccaggctggagtgcaatggtgcgatctcggctcgctgcaacctccgcgtctggggttcaagcgattctcctgcctcagccccctgagtagctgggattacagtgttgatgggaaccattttcagcatcctgctggtgactgtcatccttatggcattttgtgtctacaagcccattcggcgtcggtgacagccagacaagttcttcaatgagtatttgggaataggataagttgtgttgcacacaggccagtggagaagttggaaccaaaactttcctacttggaaatgacctttggtctggacagttggtaaatgctaaatgaattagaagaaaacatgtactagacattattttttcctaacactgtagcgcaaataattggcccctgagtccgcttctcagtgtttctgactgtacttgttaaaagtaagacctgaaagctccaaaggtcagtgtaaagatggagtgttcatgagaaagaaaacatggtaaccttgtgagtgcctgtaagaaccacactgtaaagaactcatcattaatgcttgaaaatgttattaagaaggagacttaccatgcagacattccctatttaagaaccatttggttacagtgggttaagaatcacagatttttttttttaatctcacctgagttagcctagaatgcgctggttgcaaagtggtgtcagctgtggggatcttgggccctcgttcctcacctgcatcctgccctgcactcaggtgctccccctgaagtcagggtcacatcaggtagacctgttactatatgcacctttggcctggaatgctctgaagttggactggaaatgttactaggttggcctgttacaaaaaggaccccatcctgcttaaacacattgatctcccttgccctgcatttgagtctttctagcccacggtctgaaacttgaggcagctttccagatttggaatgtaaaaggctcagtgggcactctgttcatccctgggtggggagggcccagccaacagaagtgcatgtccactgtgcgggccagtgtgtgtttacacaaatttcatctcagctttgaaaatgctgctattagtttccactgttggtgaactggattttttcctcctattgaaatgatactttcatacttataaagctgtcgtcaatatttatttcaaggtgctagatttaattttgttattaaattgaaatgcttatcttgtgttcaagcacagcactgattttaacaacctgcatttaatgtgaagtaaccgaagtaggatactgtaactgtgtaaggattttgtttgtaatcttgtaacattgaaccattgaaatgttcagttctttgcttttgagcaaaacgtcaattaaaactaaagtaaaatcctatatattgttttactccaccagttatttcccaagtgtttgaaatgcagttcatcttccttgatgtcatttgtggtcagcaggagactgcgaccaagctggcagttatggcagtttccctttcctgtcattatttagagcagactttcaatcccttgacatgccacgtttatgtagtgtgacaagcttgtttatagagcagagtgccttaggaacttagttcctagcagtgtctaacgtgcagaagttgctcaattaaagtttctggcc

SEQ ID NO: 459830 - DNA, 812 bp, Homo sapiens
acggttgctccagtagcttgttagaagtcggcttgagggggaaccagcagccctgttattaaagggggctgggtgaatatgaaggggagactcacagaggtaaggatgtggggtttcactaaaggagctccccatttggccagaggaaggagtcacaggcgaggacgtgaaaaactagaaaacctcacgggagccatgaaaaagactaactgtgattctggagacatttctgctttcatctttgatgtaaatggcgacactgggcgattccagcattttcatggtgagctgctgtggaaaggcacttacgaagagagcacggattgtgtctgcacttgtgatttcattcggcatcctgagctgcttggtttcatctccatactggagatagagaacccctgcacacaaaggaaacagttattagtcacaggtcaagactcaggggacacacagcacaagctgagccacttctttcctgctgcacttaggaacgttcaggacaagcttggcaagcatgtaacaagagatctaggtttggaatttccaaggaatgcactgtttggttattgtaactcagcttctgaggagtccaacccagccacacgggaggtcacatgctgaagaaccaccccatctaagcgcccattttacagctggaaccactgaggttatgtggatgagccgtcttgggagtggtctccccagccccaggtgagctaccccagctgatgccagcagaaatgagatggcccctccaagcactgtccaaattgcagaatgataagcaaataaatgactgtcatgtgaagtca

SEQ ID NO: 459831 - DNA, 915 bp, Homo sapiens
taagtcaaactttaaagctccaaaatgatgtcatttgactccaggtctcacatccaggtcatgctgatgcaagaggtgggttcccatggtcttggacagctccgaccctgtggcttggaggttccaaacttttccatattttcctatcttcttctgagcccttcaaactgttccaatctctgcctgttacccaattccaaagttgcctccacattttcagaaaaaaatttgcggatagtcacaagatatgcattccaagcagtcggaagatcacaagcaaacagaaagaggaatgagggcaaggcacctgtgaggaattgtcaatatttcataatgactttattgcagagaaaatgtgctgagaaatgcgaaatccaaggtgaagagtccatcaaaatgagtgtttcagcgctggcaaaattcacagtggcagcttactcaacctctgaagaatatctaacttcattataatccaatttccatactaaattacatgtcacctggcaccatgatagtagactatcaccatgacaatgactgagagagactaaaaaaaggacagaaaagaggccatcaaataaagcccatgctgctcagtgcccacttagtgtttcccgtatttgctttgtgacaccaaacaggaaagagctcacctattcagtgtccctgtttctacatctgtaaaagaaaaaatgtggaaaacatctgtcaagaaagctccaggatctgaagtctaaggaatcactaagaaatgtactgatgaaagaaaggaagtaaattattctctgattgtcacaactgttagcattccaaatatatcaaataatttctaccactgattctatctcaaaattatttctaacccaaattaataagagatgtgtctgggaatatgaataaattaattacttgtgc

SEQ ID NO: 459832 - DNA, 1524 bp, Homo sapiens
gcctcctcagatccgttctctgcgctgccagctcaggtgagccctcgccaaggtgacctcgcaggacactggtgaaggagcagtgaggaacctgcagagtcacacagttggccaccaccatctctagatgggaagacagaaagtagttactttcccaagatctccccacaagcaagtgtatccttggggtttgtacacctactttcaccatggggctctgcctgcccccgcccctgcctcctctcgctgaccaattgagctgtgagcctggagcagatccgtgggctgcagacccccgccccagtgcctctccccctgcagccctgcccctcgaactgtgacatggagagagtgaccctggcccttctcctactggcaggcctgactgccttggaagccaatgacccatttgccaataaagacgatcccttctactatgactggaaaaacctgcagctgagcggactgatctgcggagggctcctggccattgctgggatcgcggcagttctgagtggcaaatgcaaatgcaagagcagccagaagcagcacagtcctgtacctgagaaggccatcccactcatcactccaggctctgccactacttgctgagcacaggactggcctccagggatggcctgaagcctaacactggcccccagcacctcctcccctgggaggccttatcctcaaggaaggacttctctccaagggcaggctgttaggcccctttctgatcaggaggcttctttatgaattaaactcgccccaccaccccctcctcggtagtcttgtgatccatcgtctttgggtctgggggtgggtaatcccttggattgctgactttccctggatgcccactcccagcaagcttcccagtccctgagtccctgccgcccaactgtctcctatggctcccactccagcaagccccacagagagacccatgcactgtgagataccacagtgttataacagaagacctttccatttccaccacttgcacgggggccctagaagtcctgatgcctcagggccccagaggtgtaaaaatgaggtccacatgtcttccagggcctttgaaacaggacacgtagggactgagagcaaggttccaaggggaagccacacaaaggtgaccggaagcagtgcatgctttctgactgaggaacccagggccacgcagtcacgactatcaggagctctgctgtttgaaatcctagcaaaccctgtccttgcatggtggccccatgaccctgacaagagatgcagcctcaacttccaaccccagtgccccactggggagcagaggtttctggacgtgacagccacccacctccaccttcacatgtatcctggggccacatttctcaccttggccaaatcaaataaacctttatctccaagcacctttgtcttggtgtttggcatcagctacacatcagccctttccacccatgcatcctaaatctagcatagacttccagggttgtgaaggtactctttgaatctccaccactctac

SEQ ID NO: 459833 - DNA, 1140 bp, Homo sapiens
gccctccccaaggtgacatcgcaggacactggtgaaggagcagtgaggaacctgcagagtcacacagttggcctgactgccttggaagccaatgacccatttgccaataaagacgatcccttctactatggtggcaaatgcaaatgcaagagcagccagaagcagcacagtcctgtacctgagaaggccatcccactcatcactccaggctctgccactacttgctgagcacaggactggcctccagggatggcctgaagcctaacactggcccccagcacctcctcccctgggaggccttatcctcaaggaaggacttctctccaagggcaggctgttaggcccctttctgatcaggaggcttctttatgaattaaactcgccccaccaccccctcctcggtagtcttgtgatccatcgtctttgggtctgggggtgggtaatcccttggattgctgactttccctggatgcccactcccagcaagcttcccagtccctgagtccctgccgcccaactgtctcctatggctcccactccagcaagccccacagagagacccatgcactgtgagataccacagtgttataacagaagacctttccatttccaccacttgcacgggggccctagaagtcctgatgcctcagggccccagaggtgtaaaaatgaggtccacatgtcttccagggcctttgaaacaggacacgtagggactgagagcaaggttccaaggggaagccacacaaaggtgaccggaagcagtgcatgctttctgactgaggaacccagggccacgcagtcacgactatcaggagctctgctgtttgaaatcctagcaaaccctgtccttgcatggtggccccatgaccctgacaagagatgcagcctcaacttccaaccccagtgccccactggggagcagaggtttctggacgtgacagccacccacctccaccttcacatgtatcctggggccacatttctcaccttggccaaatcaaataaacctttatctccaagcacctttgtcttggtgtttggcatcagctacacatcagccctttccacccatgcatcctaaatctagcatagacttccagggttgtgaaggtactctttgaatctccaccactctac

SEQ ID NO: 459834 - DNA, 1255 bp, Homo sapiens
gcctcctcagatccgttctctgcgctgccagctcaggtgagccctcgccaaggtgacctcgcaggacactggtgaaggagcagtgaggaacctgcagagtcacacagttggcctgactgccttggaagccaatgacccatttgccaataaagacgatcccttctactatgactggaaaaacctgcagctgagcggactgatctgcggagggctcctggccattgctgggatcgcggcagttctgagtggcaaatgcaaatgcaagagcagccagaagcagcacagtcctgtacctgagaaggccatcccactcatcactccaggctctgccactacttgctgagcacaggactggcctccagggatggcctgaagcctaacactggcccccagcacctcctcccctgggaggccttatcctcaaggaaggacttctctccaagggcaggctgttaggcccctttctgatcaggaggcttctttatgaattaaactcgccccaccaccccctcctcggtagtcttgtgatccatcgtctttgggtctgggggtgggtaatcccttggattgctgactttccctggatgcccactcccagcaagcttcccagtccctgagtccctgccgcccaactgtctcctatggctcccactccagcaagccccacagagagacccatgcactgtgagataccacagtgttataacagaagacctttccatttccaccacttgcacgggggccctagaagtcctgatgcctcagggccccagaggtgtaaaaatgaggtccacatgtcttccagggcctttgaaacaggacacgtagggactgagagcaaggttccaaggggaagccacacaaaggtgaccggaagcagtgcatgctttctgactgaggaacccagggccacgcagtcacgactatcaggagctctgctgtttgaaatcctagcaaaccctgtccttgcatggtggccccatgaccctgacaagagatgcagcctcaacttccaaccccagtgccccactggggagcagaggtttctggacgtgacagccacccacctccaccttcacatgtatcctggggccacatttctcaccttggccaaatcaaataaacctttatctccaagcacctttgtcttggtgtttggcatcagctacacatcagccctttccacccatgcatcctaaatctagcatagacttccagggttgtgaaggtactctttgaatctccaccactctac

SEQ ID NO: 459835 - DNA, 1311 bp, Homo sapiens
cagggaagccctgaagagaggcgcccaagaaccagaggcagaatgatgcgaggagtaaaaggaggagaagagcttggtgtcacagaagccaagcgacaaaaatgtaaagaaagacaaccggttccaccggaaacacgcatacggctgcaatttgaaggtcaattcgatattgaactcagtgtggggggaagagtaacagggcaaagtggtgttgttgaaagcattggccatctaacgcttccatatagagacaacttattctgtgagtggcatctccaggggctctccagacactatctcaccaactctttcgaagattttaaccttcagaattcctctggctgtgaaaaagactttgtggagatctgggactatcatacttctggaaacatcttgggaagatactgtgcaaacaccattcctgacagcatagacacttctagcaatactgccgtgggctctgctggaacatctacttctcccaactacccgaacctaaatcctcatggccggatctacgagtggagaatcaccgccccagaaggaaggcagatcaccctaacgtttagcaacctgaggctggccacgcatctgtcctgcaacagtgagcatgtgatagggagggttcccatagaaggaagtaggtctgggctgggaatatcacctcctaggaaatatgcagtaagatggattgtgtgtctaaaggttaaactctttttccaacagatggatctaggccgtatggaggattcactgcttctcatacctccagtgaagatgcagataaagtgggatgttgtaaatgtacttcattttaatcaggaagaagctgctatggtgaatttaaaacttgtaatgccattagatgagcttctagcacagtttcagtcatgttaccatgaggattggtgtgacctgttccatattccgtggtccattatttggtgctgaaagagaccatctacctcctagaagtgtgtggtgggtctcttccaaatactcctgaaggaaactttacttctcctggctatgatggagtcaggaattactcgagaaacctaaactgtgaatggactctcagcaatccaaatcagggaaattcatctatttatattcattttgaagatttttacctagaaagtcaccaagactgtcaatttgatgtccttgagtttcgagtgggtttgttaagagcctggtaagaagtgcaagattgacaaaggtaaggttagtagcggaggtaagtgaaagcttgaatataggaaaccttggaccacttgccattgcagtggataaaattttcaagatttc

SEQ ID NO: 459836 - DNA, 994 bp, Homo sapiens
gtcaggggcgtgttggccccgcacagattgagccgagttgtcgccccgctgggagaagtgaccctcctgcgcctgatcagaacactgaggctcagagaagttaactactccaaagtcatatagccagtattttctggagctgtaattcaaatcagatgtgttcaataccttctactaccccattgctgtctttatgaaaagaaatttcatttcaatataggtgactatgcagcctgcaattcaagtatggtttggagaagatctgcctctaagtcctcggagtcctctgactcccagacacggaccaggattggctaatgtttgtcagtacgatgagtggatagctgtgaggcatgaagccactttgttgcccatgcaagaagatctgtcaatctggttatctggtttattaggtattaaagttaaggcagaaaaattattggaagaacttgataatggagtactattatgtcaactgattgatgttcttcaaaacatggtgaaaacatgcaactctgaagaatcagggaattttccaatgagaaaagtgccctgtaagaaagatgctgcatcaggttcattctttgctcgggacaataccgcaaacttccttcactggtgtagggacattggggttgatgaaacttacctctttgaatctgaaggtttagttttgcacaaagatccaagacaggtgtatctttgtcttcttgaaattggtcgaattgtgtcaagatacggggttgagccaccagtgttagtaaaacttgagaaagaaattgagttagaagagactttgcttaatacttctgggcctgaagattccatcagcattccaaaatcatgctgtcggcatgaagagctacatgaagctgtaagtagttgccacactttcttttgaccatgataccttgaagtctcatagttttaagcacttctagtgtgctacaggtgatgctatttttaaaagcaagtgtttcttattcagaatata

SEQ ID NO: 459837 - DNA, 1285 bp, Homo sapiens
gtcaggggcgtgttggccccgcacagattgagccgagttgtcgccccgctgggagaagtgaccctcctgcgcctgatcagaacactgaggctcagagaagttaactactccaaagtcatatagccagtattttctggagctgtaattcaaatcagatgtgttcaataccttctactaccccattgctgtctttatgaaaagaaatttcatttcaatataggtgactatgcagcctgcaattcaagtatggtttggagaagatctgcctctaagtcctcggagtcctctgactcccagacacggaccaggattggctaatgtttgtcagtacgatgagtggatagctgtgaggcatgaagccactttgttgcccatgcaagaagatctgtcaatctggttatctggtttattaggtattaaagttaaggcagaaaaattattggaagaacttgataatggagtactattatgtcaactgattgatgttcttcaaaacatggtgaaaacatgcaactctgaagaatcagggaattttccaatgagaaaagtgccctgtaagaaagatgctgcatcaggttcattctttgctcgggacaataccgcaaacttccttcactggtgtagggacattggggttgatgaaacttacctctttgaatctgaaggtttaggtaagtgatgttcttgtcattcttgtttttaatgcttactaggatgttttaatatccttcacctctaatttttctttccaaataaggactcaaatgcctcatctcattttcctagaaaaatgtatactttgaatatatgtagaattattggagaatcagatactaaatcaaatatattaaccttttcacttaaagattttatgtgtctagaatgtcctaaaattctgaattcctaaatgagttggctacaggaaggttctggactaatgctttagtaattgatattttcattaagaattactccaccaagcctaaaaagtagtaacttccctttaaccggataattacggaaatgacaggaggcctaataatgtattatcacggtgtttagctttaccttacaaacaacagctgccaacttgattatctaatggattaatatttttgacaattcattttgaggagtcatgctctgttgaagaattattgacgtattttctcatttccttgaagtcaacagaagcatctgtgcagtgactaaagcggtagctatttaagttttatactatatttgaaagcatttatatatgtgtacatacacacacacacccacc

SEQ ID NO: 459838 - DNA, 1933 bp, Homo sapiens
gtcaggggcgtgttggccccgcacagattgagccgagttgtcgccccgctgggagaagtgaccctcctgcgcctggtcaagtgtcttggcaaatcttcctttcttcacgtaagatgtgtattggcggcagccgtgggaggtccagacacaggtggccatggaactcgctggtaatagaggacacatctcttaactgggttgctctaagaactgatgcctaaaccatctcagcatggcgtataaaggagaaggtgggcatggccagcctccctcagctacactgtctcaggttagccctggaagtctttacacacgtagaacccatacccataatatatgtatggcatctgactttttctacccaaatatgggaggtgtggaaagccacatttaccagctccctcagtgcctgattggaagaggggataaggttataattgtcatccatgcttatggaaatcgaaaaggcatccgttacctcactaatgacctcaaagtctattacttgcctctgaaagtcatgtataaccagtctatggccatgaccctctttcacagtctgccattgctcaagtacatatttgttcaggagagagtcacaataatccattcacatagttcattttctgccatggcccatgatgttctcttccatgccaagacaatggggcttcaaacagtcttaacagaccatcccctttctggatttgctaaggtccattcagtgcttacaaacaaacttctaactgtgtctctttgtgacacaagccgtatcatttgcgtttcttatactagtaaggaaaataccgtactacgagcggcactgattactgaaatagtgtctgtcattcctaacgctgtagatcctattgacttcactccagacccatttagaaggcatgatagtataactattgttgtcagcagacttgtttacagaaagggaacaaatttggttagtggtattatacccaaactcttgtcagaaatattaagatttaaatttcataattggaggagagggaccaaagagaatcattttgcaagaagttccggaaagataccagttgcatgacagggtgcatcttttgggagctttagaacacaagaatgttagaaatgtcttagttcaaggacatatttttcttaatacctcccttactgaagcattctgcatggcgatcatggaagcagccagctgtggtttacaggttgtaagtaccagggttggtggaattcctgaggtgcttccggaaaatcttactattttatgagaaacttcagtaaaatctttgtgtgagggattggaaaaagctattttccaactgaagtcaggggcattgctggctccagaaaatatccgtaacatagtaaagactttccacacctgaaggaatgttgtggagagaactgaaaaagcgtatgaccaagtatcagtggaatctgtgttgccaatggacaaacaactggacagacttatttctcacagtggaccagtaacaggctacatctttgctttgttggctgttttcaacttcctcttcctcattttcttgagatggatgactccagattcttatcattgatactggaatagatgccactgggccaaggggtgcctggactcataaatgttctcacagtaaaagagggggtgagaatattaagatatctaaaaccaggtagaagagagcctacattgtaagattttaaacatttgtaatagttgtattaagactatggaaaataacctgctttttgggggcttgtgttttttattagttttttataagttaatttatgtttccctagttctttttcctacatattcatccacttttcccccttttctctgttaaacgcatcactgtttcactccaccctttctctctcttcctcggatttcctttaaaactgtgaattagatcatgtc

SEQ ID NO: 459839 - DNA, 1726 bp, Homo sapiens
gtcaggggcgtgttggccccgcacagattgagccgagttgtcgccccgctgggagaagtgaccctcctgcgcctggtcaagtgtcttggcaaatcttcctttcttcacgtaagatgtgtattggcggcagccgtgggaggtccagacacaggtggccatggaactcgctggtaatagaggacacatctcttaactgggttgctctaagaactgatgcctaaaccatctcagcatggcgtataaaggagaaggtgggcatggccagcctccctcagctacactgtctcaggttagccctggaagtctttacacacgtagaacccatacccataatatatgtatggcatctgactttttctacccaaatatgggaggtgtggaaagccacatttaccagctccctcagtgcctgattggaagaggggataaggttataattgtcatccatgcttatggaaatcgaaaaggcatccgttacctcactaatgacctcaaagtctattacttgcctctgaaagtcatgtataaccagtctatggccatgaccctctttcacagtctgccattgctcaagtacatatttgttcaggagagagtcacaataatccattcacatagttcattttctgccatggcccatgatgttctcttccatgccaagacaatggggcttcaaacagtcttaacagaccatcccctttctggatttgctaaggtccattcagtgcttacaaacaaacttctaactgtgtctctttgtgacacaagccgtatcatttgcgtttcttatactagtaaggaaaataccgtactacgagcggcactgattactgaaatagtgtctgtcattcctaacgctgtagatcctattgacttcactccagacccatttagaaggcatgatagtataactattgttgtcagcagacttgtttacagaaagggaacaaatttggttagtggtattatacccaaactcttgtcagaaatattaagatttaaatttcataattggaggagagggaccaaagagaatcattttgcaagaagttccggaaagataccagttgcatgacagggtgcatcttttgggagctttagaacacaagaatgttagaaatgtcttagttcaaggacatatttttcttaatacctcccttactgaagcattctgcatggcgatcatggaagcagccagctgtggtttacaggtttatgaccaagtatcagtggaatctgtgttgccaatggacaaacaactggacagacttatttctcacagtggaccagtaacaggctacatctttgctttgttggctgttttcaacttcctcttcctcattttcttgagatggatgactccagattcttatcattgatactggaatagatgccactgggccaaggggtgcctggactcataaatgttctcacagtaaaagagggggtgagaatattaagatatctaaaaccaggtagaagagagcctacattgtaagattttaaacatttgtaatagttgtattaagactatggaaaataacctgctttttgggggcttgtgttttttattagttttttataagttaatttatgtttccctagttctttttcctacatattcatccacttttcccccttttctctgttaaacgcatcactgtttcactccaccctttctctctcttcctcggatttcctttaaaactgtgaattagatcatgtc

SEQ ID NO: 459840 - DNA, 883 bp, Homo sapiens
gacttaggggcatggcaaaagttaaacatagagctgacgttgggcccatcgtagagtgtgagatagttctggacacagtctcctggatcgtcaatgctgatgaagtaaaagttgacagtgagaagccttccagcaggagctaccagtgcccactcgcagaagtttcagatccattctacggagtaatgaaggacagcgaggaggaagagttcttactgtccatggctggaaagcaaggctttgcttcccagcatctatcaggcaaatggcaaatgttgactctgatcaataatggtccattcaagctggacaatgatattcatgttccatctcacatgctcaatgcaggtgatgtggcagaaagagcacagagggagctcaccaggggctctggaagaccccaaaggttcaggcccacaaggggcatggctctgcctgctccaggtgcaaggggggcttctctctcagtgtgtcctggggtgggagttgggggtgaatgggtggagaatgggcaaacagcaaagtcacttctgtgtccaaatgagagctctggagttgtggtggaaaaaggacagaccacacttcctgcaacaagggagcactttttcaaggcaacacttgtctttagaggatgttgacgatgccccaaacttactgtagctgtcagggaaattagatttgaaaatgacaattgcagtactcatagaagaataaaacaccggcatagccaaagcatttctgccacagaactgaattcttgaatttccatgactctgaaatgaaatggaagccaagtcatgttagatttattttagaagagaacagcataacagaaattaaactgcctataaaagtatggcttaaatatttaaccatggaaact

SEQ ID NO: 459841 - DNA, 6842 bp, Homo sapiens
  misc_feature (1)..(4): n is a, c, g, or t
  misc_feature (9)..(9): n is a, c, g, or t
  misc_feature (14)..(15): n is a, c, g, or t
nnnnttgtnttttnnaagaatcctgctttgggcaggaatggggaaatgtggcctctgtgtgaacatggtgatggatccaaagggcggcagctggggctgtcagtcacagtcttcccctcggcaagttcttcagaaggagccttttgagattgatggaagctctgtgcagctggcatattctcaagatgcctacctgaaaggcaacgaagcttatagcggcaatgcccgcaatatacctgaacctccaccaatctgctatccctggctgccatctgccccatcagccatggcacagccagttgaaatatctcctcctgactcatcattgagcaaacagcaaaccagtacaccagtactgacacaacctggtagggcctatagaatggaaatacaagtgcctccatcaccaacagatgttgcaaaatcaaacacagcagtgtgtgtttgcaatgaaagtgtaaggactgtcattgtgccttctgagaaggttgtagatttgttatccaatagaaacaaccatacaggtccttcacatagaactgaagaagtgaggtatggcgtgagtgagcagacctctttaaaaacagtgtcaagaaccacatcaccaccattatcaattcccaccactcatctaattcatcagcctgcaggctccagatcactggaaccttctggaattttacttaagtctggaaattacagtggacattctgatggaatctcaagcagcagatctcaagctgtggaggctccctctgtatctgttaatcactattcgccaaattcccatcagcacatagactggaaaaactataaaacttacaaagagtatattgataacagacgattgcacataggttgtcggacaatacaagaaagattagatagtttaagagcagcatctcaaagcacgacagattataaccaggtcgtccccaaccgcactactttgcagggacgacgtcgaagcacctctcatgatcgagtgccccagtctgtccagatacggcaacgcagtgtgtcccaagaaagactggaagattctgtgctaatgaagtattgtccaagaagtgcatctcaaggagcactgacgtctccatctgttagttttagtaatcatagaactcgttcatgggattatattgagggacaggatgaaaccttagaaaatgtcaattctggaactccaatacctgattccaatggagagaaaaaacagacttacaagtggagtgggtttactgaacaggatgatagacgaggtatttgtgaaagacctaggcagcaagaaattcataaatcttttcgaggttccaattttactgtggctccaagcgttgttaattctgataacaggcgaatgagtggtagaggagtgggatctgtgtcgcagtttaaaaaaattccaccagatctaaaaacattgcagtcaaacagaaattttcagactacttgtggaatgtcactgcctcggggtatttcacaagacaggtcacctcttgtgaaagtccgaagtaattctctgaaagctccttccacgcatgtcacaaaaccatcatttagccagaaatcatttgtttctatcaaagaccaaagaccagtaaatcacttgcatcagaacagtctgttgaatcagcagacatgggtaaggactgacagtgcccccgatcagcaagtggagactgggaaatccccctctttatctggagcctctgccaagcctgcccctcagtcgagtgaaaacgctggtacttcagatttagaactacctgtcagtcaaaggaatcaagatttaagtttacaagaggctgaaactgagcaatcagatactttagataataaagaagctgtcatcctaagggaaaaacctccatctggacgccagacaccgcagcctttaaggcatcagtcttacatcttggcagtaaatgaccaggagaccgggtcagacactacctgctggctgcccaatgatgcacgtcgagaggtccacataaaaagaatggaggaaagaaaagcctcgagtaccagtccgcctggcgattctttggcttccatcccatttatagatgaaccaactagccctagcattgatcatgatattgcacatatccctgcctctgctgttatatcagcctctacctctcaggtcccctccatagcaacagttcctccttgcctcacaacttcagctccattaattcgccgtcagctctcacatgaccacgaatctgttggccctcctagcctggatgctcagcccaactcaaagacagaaagatcaaaatcatatgatgagggtctggatgattacagagaagatgcaaaattgtcctttaagcacgtatctagtctgaagggaatcaagatcgcagacagccaaaagtcatcagaagactctgggtccagaaaagattcttcctcagaggtcttcagtgatgctgccaaggaagggtggcttcatttccgaccccttgtcaccgataagggcaagcgagttggtggaagtattcggccatggaaacagatgtatgttgtccttcggggtcattcactttacctgtacaaagataaaagagagcagacgactccgtctgaggaagagcagcccatcagtgttaatgcttgcttgatagacatctcttacagtgagaccaagaggaaaaatgtgtttcgactcaccacgtccgactgtgaatgcctgtttcaggctgaagacagagatgatatgctagcttggatcaagacgatccaggagagcagcaacctaaacgaagaggacactggagtcactaacagggatctaattagtcgaagaataaaagaatacaacaatctgatgagcaaagcagaacagttgccaaaaacacctcgccagagtctcagcatcaggcaaactttgcttggtgctaaatcagagccaaagactcaaagcccacactctccgaaggaagagtcggaaaggaaacttctcagtaaagatgataccagtcccccaaaagacaaaggcacatggagaaaaggcattccaagtatcatgagaaagacatttgagaaaaagccaactgctacaggaactttcggcgtccgactagatgactgcccaccagctcatactaatcggtatattccattaatagttgacatatgttgcaaattagttgaagaaagaggtcttgaatatacaggtatttatagagttcctggaaataatgcagccatctcaagtatgcaagaagaactcaacaagggaatggctgatattgatatacaagatgataaatggcgagatttgaatgtgataagcagtttactaaaatccttcttcagaaaactccctgagcctctcttcacaaatgataaatatgctgattttattgaagccaatcgtaaagaagatcctctagatcgtctgaaaacattaaaaagactaattcacgatttgcctgaacatcattatgaaacacttaagttcctttcagctcatctgaagacagtggcagaaaattcagaaaaaaataagatggaaccaagaaacctagcaatagtgtttggtcccacccttgttcgaacatcagaagacaacatgacccacatggtcacccacatgcctgaccagtacaagattgtagaaacgctcatccagcaccatgactggtttttcacagaagaaggtgctgaagagcctcttacaacagtgcaggaggaaagcacagtagactcccagccagtgccaaacatagatcatttactcaccaacattggaaggacaggagtctccccaggagatgtatcagattcagctactagtgactcaacaaaatctaagggttcttggggatctggaaaggatcagtatagcagggaactgcttgtgtcctccatctttgcagctgctagtcgcaagaggaagaagccgaaagaaaaagcacagcctagcagctcagaagatgaactggacaatgtattttttaagaaagaaaatgtggaacagtgtcacaatgatactaaagaggagtccaaaaaagaaagtgagacactgggcagaaaacagaagatcatcattgccaaagaaaacagcactaggaaagaccccagcacgacaaaagatgaaaagatatcactaggaaaagagagcacgccttctgaagaaccctcaccaccacacaactcaaaacacaacaagtcaccaactctcagctgtcgctttgccatcctgaaagagagccccaggtcacttctggcacagaagtcctcccaccttgaagagacaggctctgactctggcactttgctcagcacgtcttcccaggcctccctggcaaggttttccatgaagaaatcaaccagtccagaaacgaaacatagcgagtttttggccaacgtcagcaccatcacctcagattattccaccacatcgtctgctacatacttgactagcctggactccagtcgactgagccctgaggtgcaatccgtggcagagagcaagggggacgaggcagatgacgagagaagcgaactcatcagtgaagggcggcctgtggaaaccgacagcgagagcgagtttcccgtgttccccacagccttgacttcagagaggcttttccgaggaaaactgcaagaagtgactaagagcagccggagaaattctgaaggaagtgaattaagttgcaccgagggaagtttaacatcaagtttagatagccggagacagctcttcagttcccataaactcatcgaatgtgatactctttccaggaaaaaatcagctagattcaagtcagatagtggaagtctaggagatgccaagaatgagaaagaagcaccttcgttaactaaagtgtttgatgttatgaaaaaaggaaagtcaactgggagtttactgacacccaccagaggcgaatccgaaaaacaggaacccacatggaaaacgaaaatagcagatcggttaaaactgagacccagagcccctgcggatgacatgtttggagtagggaatcacaaagtgaatgccgagactgctaaaaggaaaagcatccggcgcagacatacactaggagggcacagagatgctaccgaaatcagcgttttgaatttttggaaagtgcatgagcagagcggggagagagaatctgaactttcagctgtaaaccggttaaaaccaaaatgctcagcccaggacctttccatctcagactggctggccagggaacgcctacgcaccagtacctctgaccttagcagaggagaaatcggagatccccagacagagaacccaagcacacgagaaatagccacgaccgacacacctttgtctcttcattgcaacacaggcagttcttccagcaccttggcttcaacaaacaggccccttctttccataccaccacagtcacctgaccaaataaacggagaaagcttccagaacgtgagcaaaaatgctagttctgcagcgaatgcccaacctcataaactgtctgaaaccccaggcagtaaagcagagtttcatccctgtctttaaactgggggtatgtccactctagcaagtaaaaaaactactgttacacgttccagtaactctgtcaatattttcttgtatcagaattgttattatgcagccttcatttgggctggtttcatcattttgcactgtgaaatagctttacagtgcattactacagccagaagaacatatatatatatatatatatttaaaaatatatcggatagttgtatacaaatgagcaaggtatttgttgcaacttactacatagcatatacccaaaatcactgaagaaaatcgctggcatcagtgtgcagcaaatttgttcttttggtttcatcactaacaaaagtgcctcatcataaaaatacagttggtttttagggtgccatattgttaaaattagataacttacttacattgaataaacgaatgcgttttattggtaacagatatcattacatttaccagttttaacacaggtggatacagaacttccattctttagtcattccaggtggatctgagttttatattcaaacttttaatacagtttttgagttttgtgtgacttgaatttttaatctttctgtaaaatacgtaacttaaatgaacatattaaatgtgtatcttttcttcagataccagatttgatataatgttgtaacataggtgtgtagatagtggatcctggatggaactggcttctttatcgagaagaatataattctgcatgaggacttaatgaatccaaacctgtgtcatgcctgtgtgcatacccaattaaacactggaaataaaaattgttttggtgaattttgcatggcttgaaacttattctgatatatttttagatgtcatccatttataactaccttacatgattaattggtcctgactttaaaaaggtgcctactatatttatacattccatcttctcctctttcttgctgtggtgggtagagactctttcttacagatgcttacattagcctaacctcacttgttgactgatagtgtttaactcttctaggtaaagtaatgtatgttatgttaatgttcttttcgtgagtgaaacgaacatgagtttggagtcagtccagctctacctagctatcataccttcagttttagcaggtttgattctttgatatttctactgactcgtgcctatggtgatctgctttctcatatggtaaagcatgtgttcacagtttatacaaatcagggtagcaaacttattttatcattatctttgagccagaaaaataaatgtttgtcatggtgtacatagttcagtatacccaaatgatacttcatcttttttttaatcttt

SEQ ID NO: 459842 - DNA, 6896 bp, Homo sapiens
ggcatgctgaacacacacccacatacaaatatttacaataatacacccgagacttacaatgttgcatcttctctgtaatcatccagaccctcatcatatgatttgatctttctgtctttgagatgggctgagcatccaggctaggagggccaacagattcgtggtcatgtgagagctgacggcgaattaatggagctgaagttgtgaggcaaggaggaactgttgctatggaggggacctgagaggtagaggctgatataacagcagaggcagggatatgtgcaatatacctgaacctccaccaatctgctatccctggctgccatctgccccatcagccatggcacagccagttgaaatatctcctcctgactcatcattgagcaaacagcaaaccagtacaccagtactgacacaacctggtagggcctatagaatggaaatacaagtgcctccatcaccaacagatgttgcaaaatcaaacacagcagtgtgtgtttgcaatgaaagtgtaaggactgtcattgtgccttctgagaaggttgtagatttgttatccaatagaaacaaccatacaggtccttcacatagaactgaagaagtgaggtatggcgtgagtgagcagacctctttaaaaacagtgtcaagaaccacatcaccaccattatcaattcccaccactcatctaattcatcagcctgcaggctccagatcactggaaccttctggaattttacttaagtctggaaattacagtggacattctgatggaatctcaagcagcagatctcaagctgtggaggctccctctgtatctgttaatcactattcgccaaattcccatcagcacatagactggaaaaactataaaacttacaaagagtatattgataacagacgattgcacataggttgtcggacaatacaagaaagattagatagtttaagagcagcatctcaaagcacgacagattataaccaggtcgtccccaaccgcactactttgcagggacgacgtcgaagcacctctcatgatcgagtgccccagtctgtccagatacggcaacgcagtgtgtcccaagaaagactggaagattctgtgctaatgaagtattgtccaagaagtgcatctcaaggagcactgacgtctccatctgttagttttagtaatcatagaactcgttcatgggattatattgagggacaggatgaaaccttagaaaatgtcaattctggaactccaatacctgattccaatggagagaaaaaacagacttacaagtggagtgggtttactgaacaggatgatagacgaggtatttgtgaaagacctaggcagcaagaaattcataaatcttttcgaggttccaattttactgtggctccaagcgttgttaattctgataacaggcgaatgagtggtagaggagtgggatctgtgtcgcagtttaaaaaaattccaccagatctaaaaacattgcagtcaaacagaaattttcagactacttgtggaatgtcactgcctcggggtatttcacaagacaggtcacctcttgtgaaagtccgaagtaattctctgaaagctccttccacgcatgtcacaaaaccatcatttagccagaaatcatttgtttctatcaaagaccaaagaccagtaaatcacttgcatcagaacagtctgttgaatcagcagacatgggtaaggactgacagtgcccccgatcagcaagtggagactgggaaatccccctctttatctggagcctctgccaagcctgcccctcagtcgagtgaaaacgctggtacttcagatttagaactacctgtcagtcaaaggaatcaagatttaagtttacaagaggctgaaactgagcaatcagatactttagataataaagaagctgtcatcctaagggaaaaacctccatctggacgccagacaccgcagcctttaaggcatcagtcttacatcttggcagtaaatgaccaggagaccgggtcagacactacctgctggctgcccaatgatgcacgtcgagaggtccacataaaaagaatggaggaaagaaaagcctcgagtaccagtccgcctggcgattctttggcttccatcccatttatagatgaaccaactagccctagcattgatcatgatattgcacatatccctgcctctgctgttatatcagcctctacctctcaggtcccctccatagcaacagttcctccttgcctcacaacttcagctccattaattcgccgtcagctctcacatgaccacgaatctgttggccctcctagcctggatgctcagcccaactcaaagacagaaagatcaaaatcatatgatgagggtctggatgattacagagaagatgcaaaattgtcctttaagcacgtatctagtctgaagggaatcaagatcgcagacagccaaaagtcatcagaagactctgggtccagaaaagattcttcctcagaggtcttcagtgatgctgccaaggaagggtggcttcatttccgaccccttgtcaccgataagggcaagcgagttggtggaagtattcggccatggaaacagatgtatgttgtccttcggggtcattcactttacctgtacaaagataaaagagagcagacgactccgtctgaggaagagcagcccatcagtgttaatgcttgcttgatagacatctcttacagtgagaccaagaggaaaaatgtgtttcgactcaccacgtccgactgtgaatgcctgtttcaggctgaagacagagatgatatgctagcttggatcaagacgatccaggagagcagcaacctaaacgaagaggacactggagtcactaacagggatctaattagtcgaagaataaaagaatacaacaatctgatgagcaaagcagaacagttgccaaaaacacctcgccagagtctcagcatcaggcaaactttgcttggtgctaaatcagagccaaagactcaaagcccacactctccgaaggaagagtcggaaaggaaacttctcagtaaagatgataccagtcccccaaaagacaaaggcacatggagaaaaggcattccaagtatcatgagaaagacatttgagaaaaagccaactgctacaggaactttcggcgtccgactagatgactgcccaccagctcatactaatcggtatattccattaatagttgacatatgttgcaaattagttgaagaaagaggtcttgaatatacaggtatttatagagttcctggaaataatgcagccatctcaagtatgcaagaagaactcaacaagggaatggctgatattgatatacaagatgataaatggcgagatttgaatgtgataagcagtttactaaaatccttcttcagaaaactccctgagcctctcttcacaaatgataaatatgctgattttattgaagccaatcgtaaagaagatcctctagatcgtctgaaaacattaaaaagactaattcacgatttgcctgaacatcattatgaaacacttaagttcctttcagctcatctgaagacagtggcagaaaattcagaaaaaaataagatggaaccaagaaacctagcaatagtgtttggtcccacccttgttcgaacatcagaagacaacatgacccacatggtcacccacatgcctgaccagtacaagattgtagaaacgctcatccagcaccatgactggtttttcacagaagaaggtgctgaagagcctcttacaacagtgcaggaggaaagcacagtagactcccagccagtgccaaacatagatcatttactcaccaacattggaaggacaggagtctccccaggagatgtatcagattcagctactagtgactcaacaaaatctaagggttcttggggatctggaaaggatcagtatagcagggaactgcttgtgtcctccatctttgcagctgctagtcgcaagaggaagaagccgaaagaaaaagcacagcctagcagctcagaagatgaactggacaatgtattttttaagaaagaaaatgtggaacagtgtcacaatgatactaaagaggagtccaaaaaagaaagtgagacactgggcagaaaacagaagatcatcattgccaaagaaaacagcactaggaaagaccccagcacgacaaaagatgaaaagatatcactaggaaaagagagcacgccttctgaagaaccctcaccaccacacaactcaaaacacaacaagtcaccaactctcagctgtcgctttgccatcctgaaagagagccccaggtcacttctggcacagaagtcctcccaccttgaagagacaggctctgactctggcactttgctcagcacgtcttcccaggcctccctggcaaggttttccatgaagaaatcaaccagtccagaaacgaaacatagcgagtttttggccaacgtcagcaccatcacctcagattattccaccacatcgtctgctacatacttgactagcctggactccagtcgactgagccctgaggtgcaatccgtggcagagagcaagggggacgaggcagatgacgagagaagcgaactcatcagtgaagggcggcctgtggaaaccgacagcgagagcgagtttcccgtgttccccacagccttgacttcagagaggcttttccgaggaaaactgcaagaagtgactaagagcagccggagaaattctgaaggaagtgaattaagttgcaccgagggaagtttaacatcaagtttagatagccggagacagctcttcagttcccataaactcatcgaatgtgatactctttccaggaaaaaatcagctagattcaagtcagatagtggaagtctaggagatgccaagaatgagaaagaagcaccttcgttaactaaagtgtttgatgttatgaaaaaaggaaagtcaactgggagtttactgacacccaccagaggcgaatccgaaaaacaggaacccacatggaaaacgaaaatagcagatcggttaaaactgagacccagagcccctgcggatgacatgtttggagtagggaatcacaaagtgaatgccgagactgctaaaaggaaaagcatccggcgcagacatacactaggagggcacagagatgctaccgaaatcagcgttttgaatttttggaaagtgcatgagcagagcggggagagagaatctgaactttcagctgtaaaccggttaaaaccaaaatgctcagcccaggacctttccatctcagactggctggccagggaacgcctacgcaccagtacctctgaccttagcagaggagaaatcggagatccccagacagagaacccaagcacacgagaaatagccacgaccgacacacctttgtctcttcattgcaacacaggcagttcttccagcaccttggcttcaacaaacaggccccttctttccataccaccacagtcacctgaccaaataaacggagaaagcttccagaacgtgagcaaaaatgctagttctgcagcgaatgcccaacctcataaactgtctgaaaccccaggcagtaaagcagagtttcatccctgtctttaaactgggggtatgtccactctagcaagtaaaaaaactactgttacacgttccagtaactctgtcaatattttcttgtatcagaattgttattatgcagccttcatttgggctggtttcatcattttgcactgtgaaatagctttacagtgcattactacagccagaagaacatatatatatatatatatatttaaaaatatatcggatagttgtatacaaatgagcaaggtatttgttgcaacttactacatagcatatacccaaaatcactgaagaaaatcgctggcatcagtgtgcagcaaatttgttcttttggtttcatcactaacaaaagtgcctcatcataaaaatacagttggtttttagggtgccatattgttaaaattagataacttacttacattgaataaacgaatgcgttttattggtaacagatatcattacatttaccagttttaacacaggtggatacagaacttccattctttagtcattccaggtggatctgagttttatattcaaacttttaatacagtttttgagttttgtgtgacttgaatttttaatctttctgtaaaatacgtaacttaaatgaacatattaaatgtgtatcttttcttcagataccagatttgatataatgttgtaacataggtgtgtagatagtggatcctggatggaactggcttctttatcgagaagaatataattctgcatgaggacttaatgaatccaaacctgtgtcatgcctgtgtgcatacccaattaaacactggaaataaaaattgttttggtgaattttgcatggcttgaaacttattctgatatatttttagatgtcatccatttataactaccttacatgattaattggtcctgactttaaaaaggtgcctactatatttatacattccatcttctcctctttcttgctgtggtgggtagagactctttcttacagatgcttacattagcctaacctcacttgttgactgatagtgtttaactcttctaggtaaagtaatgtatgttatgttaatgttcttttcgtgagtgaaacgaacatgagtttggagtcagtccagctctacctagctatcataccttcagttttagcaggtttgattctttgatatttctactgactcgtgcctatggtgatctgctttctcatatggtaaagcatgtgttcacagtttatacaaatcagggtagcaaacttattttatcattatctttgagccagaaaaataaatgtttgtcatggtgtacatagttcagtatacccaaatgatacttcatcttttttttaatcttt

SEQ ID NO: 459843 - DNA, 1035 bp, Homo sapiens
gattatttttaatttcggtccaatgcatattttttcttttttttttttcagcctttctagtgtgtacttagaagtatctgctttaaatttcattttcttaatgactactgctgctaactatcttttcttgtcatttatcatccatatacattatgaattacctgctcaaatatttctgctcatttacactcaagacaaaacaaaaaaatgcacatttaaaacaacatacaactataagttcatctacagtgaacatgtgataacttcagttctctacagacagaatcctaggaaacttcaattctcagggataaacacagaaggcaaaatcttggaagagataaatagaaggactaaccagaaagttgtgaaggaaaccaagagagagttgcattgaaaacccaagggagtagaaaatatcaacagaagctgagtgccaagaagtacaataaattaaaggcaaaagtaaataaataaatacataaatacataaatataattgggtttcataatcgggaagtcattagaaagagttctacttagttgtataattttggttttggcatgtttgtctttacttagttcatgctaataaataccagactaaaaatatctttttaagctcagactaaaaaaaatcaacttttttagtttgaatggcaagaggttatggcagaataaagagacttaagagagaatggagggaaaattgataaagcaaaaggaatcaagctgaaaattcacaaagatagaagaagaatgaagttcaaaatacaaatgcctgggttggctttggacaaaagaagcactacttcatttgaagttgggcagcaacaggaatagaatattccagacaggagctgttcctttaacctggatcacagaatggaatttcaagtgaagcagacctttagtcaacccatagacctacagcggagccacagacaaatctcaggcttcatacatgagaaataaattgatgtttatttgtgtaaaccattttaatttagtaggctgtttcttacctcagaaaaa

SEQ ID NO: 459844 - DNA, 2942 bp, Homo sapiens
taaggaggaatggcaagttgtttaatgggtacagagtttcagatttgcaagatgaaaatgttctagagatctgtttcacaacaatgtgaatctacttaagactgaactgtacactttaaaaaggttaattggcgtcctttgcggtcttttgtccacgtccgggtcaacgcctgacgcgccccttcccggctggacgacgcagctcagggcggggcgaggcgaggttgtgtcgcggaacctgacgggaaacggcccctctaggtccgtggcgcggcgcgcttgtggcagcgacgggcactgccgcgcatgcgcggcccatttccgagagtggcagggctgggcgcggtggggtcgcctctggggtcaaagagcacgccgagcccgccggagggcggggccgcggccttggccctttggcgcgtaggagacagcgcgccaggctggcagccggccttagcggcgtttgctgctcttgctatctggcccacgtcctgtgtcattttcattcacaggatattgcattaccaaaccagaggtggtttgcaagttggagcatggacaggtgctgtggatattagaggaagagtccccaagtcagagccacctagagagtgtgctcatgggagaccctgtgaatataatgaacatgtgagagccttttccgatagaccaatattcattgttcatcagagaactcacataaggaagagtcaccatgaattcaatgaatgtgagaggaggtctgtacattttgctgtaagccaaagcattctgtatatcagaaaacagatacagaagaaaaactctatgaatgtagtgaatgtgggaaaaccttcagccataaatcctcttttatcctacagcagaggatacacagaggagagaaaccctatgaatgcactgaatgtgggaaaacttttggatataggtcatgccttgcagtacatcaaagaacacacacgggacaaaacctatgaatgtaatgaatgtggaaaaaacttctgtgagaagtcaaatcttcatgtacatcagagaacacacacaggagagaaaccctatggatgtaatgaatgtcagaaagcctttggtgataggtcagctctaaaagtacatcagagaatacatactggcgagaaaccctatgagtgtaaggaatgtgggaaaactttctcccagaagccaaacttcattaatcatcaagaacatcagagaattcacacaggggagaaaccctatgaatgtaatgaatgtgagaaaatgttctaccacaagtcatccctcacagtacatcagagaacccacacaggagagaaaccctatgcatgtagtgaatgtgggaaaaccttctaccagaagtcatccctcacaacacatcagagaacacacacaagggagcaaccctatgaatataatgaaagcttttaccagaatcccaacttcactaaatgtcagagagacaacatagaggaaacccttgtcaacatcctgaaggctcagaaaccttcaccttcttggactcgttccatagcagaaacaacccaggttgggcattacctttactcttcacatttttccaagatcagtagaaaatgaacagatcccaggtacctgtgtgggttccctcagacctggccccagtacttttgcctttccttgggagccatctgattcactgctggtttcagcagccaccaacatgccagtgactccgcagtcctcagcttcattacgggcttcccttctgagctccagaaccactcatccagctccctcctgaagatccctgcctgcccgttccacagacacttcgagcacaacatgtccgagacccctctagcccttaccttttgcccagcctctttctttgcacttcccagtctttgcaaatggcacctggatttacctggaggctcataaagaaactctgggagataatttccccatctttcttttgcaccatgaatttgggaccaatatctcttaatgtcttattttgtaggatcaattcttctttccaggagttagctaacgtcttttgtaaagagccagatagcgaatattttatgctttgtggaccaagaaataaaatcaaggatatatgtaggacttattgagcaagagacagaagaaatttacacaatttttgttttgttttgttttattttgtttgtttgttttgatatgaggtctttggcctcactctgttgccaggctgaagtgcaatggtgtgatcacggctcactgcagcctagacctcctaggctcaagtgattcttccacgtcagcctcctgagtagctgggaccacacagccaccacgctgccacatcccgccatgagctgctaatttaaaaaatttctgtgaagatggggttttgccacattgcccaggctaccgccagtttttgttgatgaaattcaaaatataatcatgattgtgttatagtgttttgcaatacaggtctactaatgagaaaagtggaattcttttggggtggttaacattttgcttaattgaggttctttgttactattctatgtcatcaaaatctattgcaaatcatcatctgctaatgttgaattgtaatgagctttcacatatttcatctttgaaaatgtgtttcacataggtactaccagttactgatatcagtccacaaacatgattttattttattattttattttatttctattttattttgagatggagtctcgctctatcgcccaggctggagtgtagtggcatgatctcggctcactgcaagctccacctcctgagttcacgccattctcctgcctcagcctcccaagtagctgggactacaagcgcccgccaccacgcccggctaattttgtattttttagtagagactgggtttcaccatgttagccagaatgatttcgatttcctgacctcgtgatccgccggcctcggcctcc

SEQ ID NO: 459845 - DNA, 747 bp, Homo sapiens
cagctcccgggcatagatgcatcttgtgctggctgagccatgtaactccaagtacgatttattttaagagaaaattgcccaccttttagagtaaataaacttaagagcagaacccagcaacttcatttccacttcctagtgtagcaactgaagagtgagcttctttcagcttcaattgctcttctcagaaagtttttatttggcttaatagaagaaagcacagtttctagaccaaagaggaagaaaataagacaaggcaaggcaaatatgaataaatgacccaggctaaatgccagttccttgcaaagaatttcatttaagcttcactgaattgaaaaggctcaaccagactcaacatttccaacttcctagcaagcagcagaaaatctacctgacagttgctatggagacacgaacaggaagacatggcaaggcggctaggagtgcaaacttcaagagtcagactgccaccatggaaatccggaccttgctgcatatcggcggcagaaacttgcacgtatacacctgcatcagatgtcacattgaaaggatgacaggtgtggtggtgaattgcctgcatcaacttgactgggccacaggatgcccagacacctggttcaacacggtttctgggtatgccccaagaatgtttctagatgggattagcattggaattggtggattgagtaaagcagatggtcctgccaaatgtatgtgggcctcatccaacccactgagggcctgaat

SEQ ID NO: 459846 - DNA, 823 bp, Homo sapiens
tatgctttactcaccgtcggatataatcctcacaacactatgaggaagccctcggtcatctatcttgcctgcactggggacagcggcactcagacaagcccatttttactggtgcccttcagatgcccgcgggctcagctgtctcggtgcctggcattccgggggtattgttcctctctacgagtcccagattccagcaacagctgctgccccaggctcccccgccagcttccccctgcgctccccctgcccgcctgccagagcccccttgctgaagaacgtggcacagtgacagccgaacctgcacagatgcaggcgtctgcggggcttccattctggagcagcactctcatcctgggctctatggatgtgaggggctggataattctttgttacggcagtggagggtgtcccgtgcattacgagctctcctcacttctctctctgtctctcctgccaccatgtgaagaaggtgcttgtttcccctttgccttccgccatgagtgtaagtttcctgaggtctcccagtcatactgctggttaagcctgcagaacggtgtacttgtttgaaatgtatctggcccaatcgctgagcgtccgcgctgcatttctccaaactgcccagcagggggcggtgctacctcggctccgcgcagccacggcttcccgctggcgaaccaagggcgcggaatctggagagggcgaggaacatctttcctcccacctgtcccccgccaggtctgccagacccgtctcatccgtgctgctgcttctgaaaatcagaagagtgaggatgaaataaagtcttcataaaggaaaacca

SEQ ID NO: 459847 - DNA, 1096 bp, Homo sapiens
tatgctttactcaccgtcggatataatcctcacaacactatgaggaagccctcggtcatctatcttgcctgcactggggacagcggcactcagacaagcccatttttactggtgcccttcagatgcccgcgggctcagctgtctcggtgcctggcattccgggggtattgttcctctctacgagtcccagattccagcaacagctgctgccccaggctcccccgccagcttccccctgcgctccccctgcccgcctgccagagcccccttgctgaagaacgtggcacagtgacagccgaacctgcacagatgcaggcgtctgcggggcttccattctggagcagcactctcatcctgggctctatggatgtgaggggctggataattctttgttacggcagtggagggtgtcccgtgcattacgagctctcctcacttctctctctgtctctcctgccaccatgtgaagaaggtgcttgtttcccctttgccttccgccatgagtgtaagtttcctgaggtctcccagtcatactgctggttaagcctgcagaacggtgtacttgtttgaaatgtatctggcccaatcgctgagcgtccgcgctgcatttctccaaactgcccagcagggggcggtgctacctcggctccgcgcagccacggcttcccgctggcgaaccaagggcgcggaatctggagagggcgaggaacatctttcctcccacctgtcccccgccaggtctgccagacccgtctcatccgtgctgctgcttctgaaaatcagaagagtgaggatgaaataaagtcttcataaaggaaaaccaaaaaaaaaaaaacaaaaaaaaaaaaaaatttttgtggggggcttttgggcctttagaaaaagtttttagaacaatcggtttgggcgacggcggcccaagaagtttagggaacaccggggcacataagtggtccaagagaacaaccgggcgagtacacaagtgcgggttccacccgaattaaaaccgcgcggagcaaacggagggtcgtgacaaaccaaagggttcggagcacaaccgggcttacagggggctcaaggagccaaataatgccgg

SEQ ID NO: 459848 - DNA, 1007 bp, Homo sapiens
tatgctttactcaccgtcggatataatcctcacaacactatgaggaagccctcggtcatctatcttgcctgcactggggacagcggcactcagacaagcccatttttactggtgcccttcagatgcccgcgggctcagctgtctcggtgcctggcattccgggggtattgttcctctctacgagtcccagattccagcaacagctgctgccccaggctcccccgccagcttccccctgcgctccccctgcccgcctgccagagcccccttgctgaagaacgtggcacagtgacagccgaacctgcacagatgcaggcgtctgcggggcttccattctggagcagcactctcatcctgggctctatggatgtgaggggctggataattctttgttacggcagtggagggtgtcccgtgcattacgagctctcctcacttctctctctgtctctcctgccaccatgtgaagaaggtgcttgtttcccctttgccttccgccatgagtgtaagtttcctgaggtctcccagtcatactgctggttaagcctgcagaacggtgtacttgtttgaaatgtatctggcccaatcgctgagcgtccgcgctgcatttctccaaactgcccagcagggggcggtgctacctcggctccgcgcagccacggcttcccgctggcgaaccaagggcgcggaatctggagagggcgaggaacatctttcctcccacctgtcccccgccaggtctgccagacccgtctcatccgtgctgctgcttctgaaaatcagaagagtgaggatgaaataaagtcttcataaaggaaaaccatttgcttgtttagatttcattcattcactactcaaatatttactgagctcctactgtgtgccaagccttgttctaagccctgggagtcaacagggaacaaaacagacacaaattccaattcctgccttcctggagcagtccttcctgctgggggccggtgggcaggaggtcttagatgacaaac

SEQ ID NO: 459849 - DNA, 914 bp, Homo sapiens
tgggaagcccccaaggggctggagtgggatgggggtgtgatgcaggccgcccaccaggttccctccgggcaaagcggcagggccccgcgcttcctgagccttcacggaggcctctgcaaagacctcctcttgccccgccttctcttattagtttcctgggctgctgtaacaaattacaacgaacttagtgacttaaaagaacagcctagttttttctcacaggtcctggagtccagaactctgaagttaaggtgtcagcaaagctgcacttcctccagagcctctagggtagaacccatgccttgcctatggtggctgcgggtgttcctggacttgtggctgtacaccccaatgtctgctcccaccatcacgtggccttccaactgtgtgtgtgttgacatgactggattaagaaatacctacaaaactggcaaaacagtacttctggatgtgtctgtgagggtgtttcaaggagactgatgtgtctctggacttggactgggccatgctaccagcatctcagagttgccagcttgtagacagcctgttgtgcgacttctcaacctctgtaatcaagtgagctaattcccctaacaaaccccctctcatatgtctatatctatcgatagctcctattgatctgtctctctgtagaaccctgaccaatacacacatgcttattacaaggtattgacccttggccaatgctgtgcaatggattaactaaagataaagatgttctataactatgagtctgaaaaccagagacctttgttctcgtgtttatctgctgaccttctctccactattatcctatgaccctgccacatccccctctctgagaaacacccaagaatgatcaataaatactaaaaaaaaaaaaaaaaaaaaaaaagagaacagtggcttggtgt

SEQ ID NO: 459850 - DNA, 559 bp, Homo sapiens
aaacccaaaacaatgaaaccttttcaaggaagtaaggtgttgacatgactggattaagaaatacctacaaaactggcaaaacagtacttctggatgtgtctgtgagggtgtttcaaggagactgatgtgtctctggacttggactgggccatgctaccagcatctcagagttgccagcttgtagacagcctgttgtgcgacttctcaacctctgtaatcaagtgagctaattcccctaacaaaccccctctcatatgtctatatctatcgatagctcctattgatctgtctctctgtagaaccctgaccaatacacacatgcttattacaaggtattgacccttggccaatgctgtgcaatggattaactaaagataaagatgttctataactatgagtctgaaaaccagagacctttgttctcgtgtttatctgctgaccttctctccactattatcctatgaccctgccacatccccctctctgagaaacacccaagaatgatcaataaatactaaaaaaaaaaaaaaaaaaaaaaaagagaacagtggcttggtgt

SEQ ID NO: 459851 - DNA, 663 bp, Homo sapiens
ttgtggtggcgttgagctcctctagcccgcgcttgccgtcctctcagtggtagcgcggggactggctgggaagcggtcggtcgagtgtggcctgtgtggactcgcatcttgcccgaagccgggcggaggagagctcaagctaagggtgatcagcccatgacctaaacctccagacaaaataaaacagggaaaatttgctagaatcaagaatgatggatccatgttcagttggagtccagcttcgtactacaaatgagtgccataaaacctactatactcgtcacacaggttttaagactttgcaagaattgtcatcaaatgatatgcttttacttcaacttagaactggaatgacactttctgggaacaatacaatttgctttcatcatgtaaaaatttacattgacagatttgaggatttacagaagtcatgttgtgacccatttaacatacacaagaaattagccaaaaaaaatttgcatgtaattgacttagatgatgccacttttctgagtgctaaatttggaagacagcttgtacctggttggaagctttgtccaaaatgcacacagataatcaatggaagtgtggatgttgatactgaagaccgccagaaaaggaaacctgagtcagatgtatgtgtaatagtcatttttttctaca

SEQ ID NO: 459852 - DNA, 2420 bp, Homo sapiens
ttgtggtggcgttgagctcctctagcccgcgcttgccgtcctctcagtggtagcgcggggactggctgggaagcggtcggtcgagtgtggcctgtgtggactcgcatcttgcccgaagccgggcggaggagagctcaagctaagggtgatcagcccatgacctaaacctccagacaaaataaaacagggaaaatttgctagaatcaagaatgatggatccatgttcagttggagtccagcttcgtactacaaatgagtgccataaaacctactatactcgtcacacaggttttaagactttgcaagaattgtcatcaaatgatatgcttttacttcaacttagaactggaatgacactttctgggaacaatacaatttgctttcatcatgtaaaaatttacattgacagatttgaggatttacagaagtcatgttgtgacccatttaacatacacaagaaattagccaaaaaaaatttgcatgtaattgacttagatgatgccacttttctgagtgctaaatttggaagacagcttgtacctggttggaagctttgtccaaaatgcacacagataatcaatggaagtgtggatgttgatactgaagaccgccagaaaaggaaacctgagtcagatggaagaactgctaaagctttgaggtcattacaatttacgaatccaggaaggcaaactgaatttgctccagaaactggtaaaagagaaaaaagaaggcttacaaaaaatgcaaccgctggttcagacagacaagtgataccagcaaagagtaaggtctatgatagccagggtctcctgatttttagtgggatggacctctgtgactgcctggatgaagactgcttaggatgtttctatgcttgtcctgcctgtggttctaccaagtgtggagctgaatgccgctgtgaccgcaagtggctgtatgagcaaattgaaattgaaggaggagaaataattcataataaacatgctggataatctgcggtaccaaactatggagcctttaaaggtctttatttctaaaaatctgttactctaagatacattttaagcttgattatcatatgacaaagattttaaaaccatctcagtgtgccctaatttttcatcttgggtgctttaagattcactatttgatataaattcagataggctatttttcagtagtcagcgttaagcctgtctggatcaatataaacaagtagggtgtaggcagtcctctatttgcatgtttcccatgggcacaaatttcagtgacctagatttagtttaaataccagtttccttaccaggaaggaaagaaaactggtaaggaaactgttgttgttaaaatctaggttaaaattttagttagcacattgtaactgagtaattacatgaagtacaaacctctctgctagctcttcagtctacaaatcgctatgtaaataacagatatgcttcatgattgtgaccagtcatgttatttctttcaaattcttccagtggtttgtccctgtgcatctgttaattcagttcacgtacagcagagcatgtagttatgctgtctctctgtcatctacttgacattctatagaagtgaacactcgaaagaactggtcaacaaagatgaaagtgcagcaaagcaatgaaaaatgataacactggaagtgaaattttaatcaaacataaatgaatttgtagaagaagtcactgaccatgggaatgttgttcttgctgctgtgtattcataggagcttagtgaaggcaaacttaccaacacaaataagcaaagtggttgcaataaagacagatacgtcccagaggaagtgatggttaaaaaaaaaaaactttacattaaaagatatttaatgtgaatatagaaatatttcacaacattgaaagcacaagcaataaaagggtggaagctgacccaaacttagaaggagtatggcagtttgccgtgaacataaaagatgcttactcagtatggtaagttacttgccagaaaaaaaggcaagccctattcaaactactttgtttttacaatgaaataaaacactttaattctatttctaatgttttaaattacagtgtactaaatatttttaaacatttttgcatttttttctacatttataactggtcttaagagtttttaatatttgagcagaaccttaaaggtcatggaacaatcatcattttccctattgattattaagattgcaggaccatttttatggtcccacagtaccatgtgaaatgaggatcgcttgtagctgggaacagtgcttacttcagggaaaactgattttgatagaaccgactagttgagtattaaactgttttggaaataatttatatatctaagtgctgaaatatatttctcttctccccacttattcaaataaaaaagttttaatacta

SEQ ID NO: 459853 - DNA, 2787 bp, Homo sapiens
ttgtggtggcgttgagctcctctagcccgcgcttgccgtcctctcagtggtagcgcggggactggctgggaagcggtcggtcgagtgtggcctgtgtggactcgcatcttgcccgaagccgggcggaggagagctcaagctaagggtgatcagcccatgacctaaacctccagacaaaataaaacagggaaaatttgctagaatcaagaatgatggatccatgttcagttggagtccagcttcgtactacaaatgagtgccataaaacctactatactcgtcacacaggttttaagactttgcaagaattgtcatcaaatgatatgcttttacttcaacttagaactggaatgacactttctgggaacaatacaatttgctttcatcatgtaaaaatttacattgacagatttgaggatttacagaagtcatgttgtgacccatttaacatacacaagaaattagccaaaaaaaatttgcatgtaattgacttagatgatgccacttttctgagtgctaaatttggaagacagcttgtacctggttggaagctttgtccaaaatgcacacagataatcaatggaagtgtggatgttgatactgaagaccgccagaaaaggaaacctgagtcagatggaagaactgctaaagctttgaggtcattacaatttacgaatccaggaaggcaaactgaatttgctccagaaactggtaaaagagaaaaaagaaggcttacaaaaaatgcaaccgctggttcagacagacaagtgataccagcaaagagtaaggtctatgatagccagggtctcctgatttttagtgggatggacctctgtgactgcctggatgaagactgcttaggatgtttctatgcttgtcctgcctgtggttctaccaagtgtggagctgaatgccgctgtgaccgcaagtggctgtatgagcaaattgaaattgaaggaggagaaataattcataataaacatgctggataatctgcggtaccaaactatggagcctttaaaggtctttatttctaaaaatctgttactctaagatacattttaagcttgattatcatatgacaaagattttaaaaccatctcagtgtgccctaatttttcatcttgggtgctttaagattcactatttgatataaattcagataggctatttttcagtagtcagcgttaagcctgtctggatcaatataaacaagtagggtgtaggcagtcctctatttgcatgtttcccatgggcacaaatttcagtgacctagatttagtttaaataccagtttccttaccaggaaggaaagaaaactggtaaggaaactgttgttgttaaaatctaggttaaaattttagttagcacattgtaactgagtaattacatgaagtacaaacctctctgctagctcttcagtctacaaatcgctatgtaaataacagatatgcttcatgattgtgaccagtcatgttatttctttcaaattcttccagtggtttgtccctgtgcatctgttaattcagttcacgtacagcagagcatgtagttatgctgtctctctgtcatctacttgacattctatagaagtgaacactcgaaagaactggtcaacaaagatgaaagtgcagcaaagcaatgaaaaatgataacactggaagtgaaattttaatcaaacataaatgaatttgtagaagaagtcactgaccatgggaatgttgttcttgctgctgtgtattcataggagcttagtgaaggcaaacttaccaacacaaataagcaaagtggttgcaataaagacagatacgtcccagaggaagtgatggttaaaaaaaaaaaactttacattaaaagatatttaatgtgaatatagaaatatttcacaacattgaaagcacaagcaataaaagggtggaagctgacccaaacttagaaggagtatggcagtttgccgtgaacataaaagatgcttactcagtatggtaagttacttgccagaaaaaaaggcaagccctattcaaactactttgtttttacaatgaaataaaacactttaattctatttctaatgttttaaattacagtgtactaaatatttttaaacatttttgcatttttttctacatttataactggtcttaagagtttttaatatttgagcagaaccttaaaggtcatggaacaatcatcattttccctattgattattaagattgcaggaccatttttatggtcccacagtaccatgtgaaatgaggatcgcttgtagctgggaacagtgcttacttcagggaaaactgattttgatagaaccgactagttgagtattaaactgttttggaaataatttatatatctaagtgctgaaatatatttctcttctccccacttattcaaataaaaaagttttaatactaaaaaaaaaaaaaaaaaaacaaggtcggtggcccaaaaagagtgctgaatttttgctgcacatgcttaaaaacgcagagagtaatgctgaacttaagggtttagatgtagattctctggtcattgagcatatccaagtgaacaaagcacctaagatgcgccgccggacctacagagctcatggtcggattaacccatacatgagctctccctgccacattgagatgatccttacggaaaaggaacagattgttcctaaaccagaagaggaggttgcccagaagaaaaagatatcccagaagaaactgaagaaacaaaaacttatggcacgggagtaaattcagcattaaaataaatgtaattaaaagg

SEQ ID NO: 459854 - DNA, 2450 bp, Homo sapiens
ttgtggtggcgttgagctcctctagcccgcgcttgccgtcctctcagtggtagcgcggggactggctgggaagcggtcggtcgagtgtggcctgtgtggactcgcatcttgcccgaagccgggcggaggagagctcaagctaagggtgatcagcccatgacctaaacctccagacaaaataaaacagggaaaatttgctagaatcaagaatgatggatccatgttcagttggagtccagcttcgtactacaaatgagtgccataaaacctactatactcgtcacacaggttttaagactttgcaagaattgtcatcaaatgatatgcttttacttcaacttagaactggaatgacactttctgggaacaatacaatttgctttcatcatgtaaaaatttacattgacagatttgaggatttacagaagtcatgttgtgacccatttaacatacacaagaaattagccaaaaaaaatttgcatgtaattgacttagatgatgccacttttctgagtgctaaatttggaagacagcttgtacctggttggaagctttgtccaaaatgcacacagataatcaatggaagtgtggatgttgatactgaagaccgccagaaaaggaaacctgagtcagatggaagaactgctaaagctttgaggtcattacaatttacgaatccaggaaggcaaactgaatttgctccagaaactggtaaaagagaaaaaagaaggcttacaaaaaatgcaaccgctggttcagacagacaagtgataccagcaaagagtaaggtctatgatagccagggtctcctgatttttagtgggatggacctctgtgactgcctggatgaagactgcttaggatgtttctatgcttgtcctgcctgtggttctaccaagtgtggagctgaatgccgctgtgaccgcaagtggctgtatgagcaaattgaaattgaaggaggagaaataattcataataaacatgctggataatctgcggtaccaaactatggagcctttaaaggtctttatttctaaaaatctgttactctaagatacattttaagcttgattatcatatgacaaagattttaaaaccatctcagtgtgccctaatttttcatcttgggtgctttaagattcactatttgatataaattcagataggctatttttcagtagtcagcgttaagcctgtctggatcaatataaacaagtagggtgtaggcagtcctctatttgcatgtttcccatgggcacaaatttcagtgacctagatttagtttaaataccagtttccttaccaggaaggaaagaaaactggtaaggaaactgttgttgttaaaatctaggttaaaattttagttagcacattgtaactgagtaattacatgaagtacaaacctctctgctagctcttcagtctacaaatcgctatgtaaataacagatatgcttcatgattgtgaccagtcatgttatttctttcaaattcttccagtggtttgtccctgtgcatctgttaattcagttcacgtacagcagagcatgtagttatgctgtctctctgtcatctacttgacattctatagaagtgaacactcgaaagaactggtcaacaaagatgaaagtgcagcaaagcaatgaaaaatgataacactggaagtgaaattttaatcaaacataaatgaatttgtagaagaagtcactgaccatgggaatgttgttcttgctgctgtgtattcataggagcttagtgaaggcaaacttaccaacacaaataagcaaagtggttgcaataaagacagatacgtcccagaggaagtgatggttaaaaaaaaaaaactttacattaaaagatatttaatgtgaatatagaaatatttcacaacattgaaagcacaagcaataaaagggtggaagctgacccaaacttagaaggagtatggcagtttgccgtgaacataaaagatgcttactcagtatggtaagttacttgccagaaaaaaaggcaagccctattcaaactactttgtttttacaatgaaataaaacactttaattctatttctaatgttttaaattacagtgtactaaatatttttaaacatttttgcatttttttctacatttataactggtcttaagagtttttaatatttgagcagaaccttaaaggtcatggaacaatcatcattttccctattgattattaagattgcaggaccatttttatggtcccacagtaccatgtgaaatgaggatcgcttgtagctgggaacagtgcttacttcagggaaaactgattttgatagaaccgactagttgagtattaaactgttttggaaataatttatatatctaagtgctgaaatatatttctcttctccccacttattcaaataaaaaagttttaatactagtcgacgcggccgcgaatttagtagtagta

SEQ ID NO: 459855 - DNA, 818 bp, Homo sapiens
atcagccggtccctggttccccctaaaaatctcatttttatggtcccacagtaccatgtgaaatgaggatcgcttgtagctgggaacagtgcttacttcagggaaaactgattttgatagaaccgactagttgagtattaaactgttttggaaataatttatatatctaagtgctgaaatatatttctcttctccccacttattcaaataaaaaagttttaatactataaacttttcattgttagcgccacgcagtccttgtcaagattgttctgggggacaaaaacttgatgtataaagcatgaatatacacacagtacttaaacagataccatatctgtggtattaaaattttgggggtggttgattaggattgtaaaaagactccttagggagtgaggatggaaaagagaaacactggttaatacagagtataaataaattttttggaaattgattgcatcttgatgttggaatttgcttggatgctatttggaggatgggggaatggactctcagttctgtggtgtgaaagaggggaaggtgaaactggttcctgccaaacaaaagggaactcagcacacacctcaacattttctatatgtcatttccagaaataatgatgccaaaaaaaaaatcaaatgcataatgactttctgatacttgacagtgtattttataaagctggatattcttaatcatttgtgatacagggatatttaaatgctttcatcttttttgatattttagtgtattgacattttttaactttttttcagttgaaattacataaaaatatagagtatatttggttagac

SEQ ID NO: 459856 - DNA, 3011 bp, Homo sapiens
ttgtggtggcgttgagctcctctagcccgcgcttgccgtcctctcagtggtagcgcggggactggctgggaagcggtcggtcgagtgtggcctgtgtggactcgcatcttgcccgaagccgggcggaggagagctcaagctaagggtgatcagcccatgacctaaacctccagacaaaataaaacagggaaaatttgctagaatcaagaatgatggatccatgttcagttggagtccagcttcgtactacaaatgagtgccataaaacctactatactcgtcacacaggttttaagactttgcaagaattgtcatcaaatgatatgcttttacttcaacttagaactggaatgacactttctgggaacaatacaatttgctttcatcatgtaaaaatttacattgacagatttgaggatttacagaagtcatgttgtgacccatttaacatacacaagaaattagccaaaaaaaatttgcatgtaattgacttagatgatgccacttttctgagtgctaaatttggaagacagcttgtacctggttggaagctttgtccaaaatgcacacagataatcaatggaagtgtggatgttgatactgaagaccgccagaaaaggaaacctgagtcagatggaagaactgctaaagctttgaggtcattacaatttacgaatccaggaaggcaaactgaatttgctccagaaactggtaaaagagaaaaaagaaggcttacaaaaaatgcaaccgctggttcagacagacaagtgataccagcaaagagtaaggtctatgatagccagggtctcctgatttttagtgggatggacctctgtgactgcctggatgaagactgcttaggatgtttctatgcttgtcctgcctgtggttctaccaagtgtggagctgaatgccgctgtgaccgcaagtggctgtatgagcaaattgaaattgaaggaggagaaataattcataataaacatgctggataatctgcggtaccaaactatggagcctttaaaggtctttatttctaaaaatctgttactctaagatacattttaagcttgattatcatatgacaaagattttaaaaccatctcagtgtgccctaatttttcatcttgggtgctttaagattcactatttgatataaattcagataggctatttttcagtagtcagcgttaagcctgtctggatcaatataaacaagtagggtgtaggcagtcctctatttgcatgtttcccatgggcacaaatttcagtgacctagatttagtttaaataccagtttccttaccaggaaggaaagaaaactggtaaggaaactgttgttgttaaaatctaggttaaaattttagttagcacattgtaactgagtaattacatgaagtacaaacctctctgctagctcttcagtctacaaatcgctatgtaaataacagatatgcttcatgattgtgaccagtcatgttatttctttcaaattcttccagtggtttgtccctgtgcatctgttaattcagttcacgtacagcagagcatgtagttatgctgtctctctgtcatctacttgacattctatagaagtgaacactcgaaagaactggtcaacaaagatgaaagtgcagcaaagcaatgaaaaatgataacactggaagtgaaattttaatcaaacataaatgaatttgtagaagaagtcactgaccatgggaatgttgttcttgctgctgtgtattcataggagcttagtgaaggcaaacttaccaacacaaataagcaaagtggttgcaataaagacagatacgtcccagaggaagtgatggttaaaaaaaaaaaactttacattaaaagatatttaatgtgaatatagaaatatttcacaacattgaaagcacaagcaataaaagggtggaagctgacccaaacttagaaggagtatggcagtttgccgtgaacataaaagatgcttactcagtatggtaagttacttgccagaaaaaaaggcaagccctattcaaactactttgtttttacaatgaaataaaacactttaattctatttctaatgttttaaattacagtgtactaaatatttttaaacatttttgcatttttttctacatttataactggtcttaagagtttttaatatttgagcagaaccttaaaggtcatggaacaatcatcattttccctattgattattaagattgcaggaccatttttatggtcccacagtaccatgtgaaatgaggatcgcttgtagctgggaacagtgcttacttcagggaaaactgattttgatagaaccgactagttgagtattaaactgttttggaaataatttatatatctaagtgctgaaatatatttctcttctccccacttattcaaataaaaaagttttaatactataaacttttcattgttagcgccacgcagtccttgtcaagattgttctgggggacaaaaacttgatgtataaagcatgaatatacacacagtacttaaacagataccatatctgtggtattaaaattttgggggtggttgattaggattgtaaaaagactccttagggagtgaggatggaaaagagaaacactggttaatacagagtataaataaattttttggaaattgattgcatcttgatgttggaatttgcttggatgctatttggaggatgggggaatggactctcagttctgtggtgtgaaagaggggaaggtgaaactggttcctgccaaacaaaagggaactcagcacacacctcaacattttctatatgtcatttccagaaataatgatgccaaaaaaaaaatcaaatgcataatgactttctgatacttgacagtgtattttataaagctggatattcttaatcatttgtgatacagggatatttaaatgctttcatcttttttgatattttagtgtattgacattttttaactttttttcagttgaaattacataaaaatatagagtatatttggttagac

SEQ ID NO: 459857 - DNA, 2649 bp, Homo sapiens
ttgtggtggcgttgagctcctctagcccgcgcttgccgtcctctcagtggtagcgcggggactggctgggaagcggtcggtcgagtgtggcctgtgtggactcgcatcttgcccgaagccgggcggaggagagctcaagctaagggtgatcagcccatgacctaaacctccagacaaaataaaacagggaaaatttgctagaatcaagaatgatggatccatgttcagttggagtccagcttcgtactacaaatgagtgccataaaacctactatactcgtcacacaggttttaagactttgcaagaattgtcatcaaatgatatgcttttacttcaacttagaactggaatgacactttctgggaacaatacaatttgctttcatcatgtaaaaatttacattgacagatttgaggatttacagaagtcatgttgtgacccatttaacatacacaagaaattagccaaaaaaaatttgcatgtaattgacttagatgatgccacttttctgagtgctaaatttggaagacagcttgtacctggttggaagctttgtccaaaatgcacacagataatcaatggaagtgtggatgttgatactgaagaccgccagaaaaggaaacctgagtcagatggaagaactgctaaagctttgaggtcattacaatttacgaatccaggaaggcaaactgaatttgctccagaaactggtaaaagagaaaaaagaaggcttacaaaaaatgcaaccgctggttcagacagacaagtgataccagcaaagagtaaggtctatgatagccagggtctcctgatttttagtgggatggacctctgtgactgcctggatgaagactgcttaggatgtttctatgcttgtcctgcctgtggttctaccaagtgtggagctgaatgccgctgtgaccgcaagtggctgtatgagcaaattgaaattgaaggaggagaaataattcataataaacatgctggataatctgcggtaccaaactatggagcctttaaaggtctttatttctaaaaatctgttactctaagatacattttaagcttgattatcatatgacaaagattttaaaaccatctcagtgtgccctaatttttcatcttgggtgctttaagattcactatttgatataaattcagataggctatttttcagtagtcagcgttaagcctgtctggatcaatataaacaagtagggtgtaggcagtcctctatttgcatgtttcccatgggcacaaatttcagtgacctagatttagtttaaataccagtttccttaccaggaaggaaagaaaactggtaaggaaactgttgttgttaaaatctaggttaaaattttagttagcacattgtaactgagtaattacatgaagtacaaacctctctgctagctcttcagtctacaaatcgctatgtaaataacagatatgcttcatgattgtgaccagtcatgttatttctttcaaattcttccagtggtttgtccctgtgcatctgttaattcagttcacgtacagcagagcatgtagttatgctgtctctctgtcatctacttgacattctatagaagtgaacactcgaaagaactggtcaacaaagatgaaagtgcagcaaagcaatgaaaaatgataacactggaagtgaaattttaatcaaacataaatgaatttgtagaagaagtcactgaccatgggaatgttgttcttgctgctgtgtattcataggagcttagtgaaggcaaacttaccaacacaaataagcaaagtggttgcaataaagacagatacgtcccagaggaagtgatggttaaaaaaaaaaaactttacattaaaagatatttaatgtgaatatagaaatatttcacaacattgaaagcacaagcaataaaagggtggaagctgacccaaacttagaaggagtatggcagtttgccgtgaacataaaagatgcttactcagtatggtaagttacttgccagaaaaaaaggcaagccctattcaaactactttgtttttacaatgaaataaaacactttaattctatttctaatgttttaaattacagtgtactaaatatttttaaacatttttgcatttttttctacatttataactggtcttaagagtttttaatatttgagcagaaccttaaaggtcatggaacaatcatcattttccctattgattattaagattgcaggaccatttttatggtcccacagtaccatgtgaaatgaggatcgcttgtagctgggaacagtgcttacttcagggaaaactgattttgatagaaccgactagttgagtattaaactgttttggaaataatttatatatctaagtgctgaaatatatttctcttctccccacttattcaaataaaaaagttttaatactataaacttttcattgttagcgccacgcagtccttgtcaagattgttctgggggacaaaaacttgatgtataaagcatgaatatacacacagtacttaaacagataccatatctgtggtattaaaattttgggggtggttgattaggattgtaaaaagactccttagggagtgaggatggaaaagagaaacactggttaatacagagtataaataaattttttggaaattg

SEQ ID NO: 459858 - DNA, 2950 bp, Homo sapiens
ttgtggtggcgttgagctcctctagcccgcgcttgccgtcctctcagtggtagcgcggggactggctgggaagcggtcggtcgagtgtggcctgtgtggactcgcatcttgcccgaagccgggcggaggagagctcaagctaagggtgatcagcccatgacctaaacctccagacaaaataaaacagggaaaatttgctagaatcaagaatgatggatccatgttcagttggagtccagcttcgtactacaaatgagtgccataaaacctactatactcgtcacacaggttttaagactttgcaagaattgtcatcaaatgatatgcttttacttcaacttagaactggaatgacactttctgggaacaatacaatttgctttcatcatgtaaaaatttacattgacagatttgaggatttacagaagtcatgttgtgacccatttaacatacacaagaaattagccaaaaaaaatttgcatgtaattgacttagatgatgccacttttctgagtgctaaatttggaagacagcttgtacctggttggaagctttgtccaaaatgcacacagataatcaatggaagtgtggatgttgatactgaagaccgccagaaaaggaaacctgagtcagatggaagaactgctaaagctttgaggtcattacaatttacgaatccaggaaggcaaactgaatttgctccagaaactggtaaaagagaaaaaagaaggcttacaaaaaatgcaaccgctggttcagacagacaagtgataccagcaaagagtaaggtctatgatagccagggtctcctgatttttagtgggatggacctctgtgactgcctggatgaagactgcttaggatgtttctatgcttgtcctgcctgtggttctaccaagtgtggagctgaatgccgctgtgaccgcaagtggctgtatgagcaaattgaaattgaaggaggagaaataattcataataaacatgctggataatctgcggtaccaaactatggagcctttaaaggtctttatttctaaaaatctgttactctaagatacattttaagcttgattatcatatgacaaagattttaaaaccatctcagtgtgccctaatttttcatcttgggtgctttaagattcactatttgatataaattcagataggctatttttcagtagtcagcgttaagcctgtctggatcaatataaacaagtagggtgtaggcagtcctctatttgcatgtttcccatgggcacaaatttcagtgacctagatttagtttaaataccagtttccttaccaggaaggaaagaaaactggtaaggaaactgttgttgttaaaattgctagctcttcagtctacaaatcgctatgtaaataacagatatgcttcatgattgtgaccagtcatgttatttctttcaaattcttccagtggtttgtccctgtgcatctgttaattcagttcacgtacagcagagcatgtagttatgctgtctctctgtcatctacttgacattctatagaagtgaacactcgaaagaactggtcaacaaagatgaaagtgcagcaaagcaatgaaaaatgataacactggaagtgaaattttaatcaaacataaatgaatttgtagaagaagtcactgaccatgggaatgttgttcttgctgctgtgtattcataggagcttagtgaaggcaaacttaccaacacaaataagcaaagtggttgcaataaagacagatacgtcccagaggaagtgatggttaaaaaaaaaaaactttacattaaaagatatttaatgtgaatatagaaatatttcacaacattgaaagcacaagcaataaaagggtggaagctgacccaaacttagaaggagtatggcagtttgccgtgaacataaaagatgcttactcagtatggtaagttacttgccagaaaaaaaggcaagccctattcaaactactttgtttttacaatgaaataaaacactttaattctatttctaatgttttaaattacagtgtactaaatatttttaaacatttttgcatttttttctacatttataactggtcttaagagtttttaatatttgagcagaaccttaaaggtcatggaacaatcatcattttccctattgattattaagattgcaggaccatttttatggtcccacagtaccatgtgaaatgaggatcgcttgtagctgggaacagtgcttacttcagggaaaactgattttgatagaaccgactagttgagtattaaactgttttggaaataatttatatatctaagtgctgaaatatatttctcttctccccacttattcaaataaaaaagttttaatactataaacttttcattgttagcgccacgcagtccttgtcaagattgttctgggggacaaaaacttgatgtataaagcatgaatatacacacagtacttaaacagataccatatctgtggtattaaaattttgggggtggttgattaggattgtaaaaagactccttagggagtgaggatggaaaagagaaacactggttaatacagagtataaataaattttttggaaattgattgcatcttgatgttggaatttgcttggatgctatttggaggatgggggaatggactctcagttctgtggtgtgaaagaggggaaggtgaaactggttcctgccaaacaaaagggaactcagcacacacctcaacattttctatatgtcatttccagaaataatgatgccaaaaaaaaaatcaaatgcataatgactttctgatacttgacagtgtattttataaagctggatattcttaatcatttgtgatacagggatatttaaatgctttcatcttttttgatattttagtgtattgacattttttaactttttttcagttgaaattacataaaaatatagagtatatttggttagac

SEQ ID NO: 459859 - DNA, 2287 bp, Homo sapiens
ccgggctgtaggaaaaaatgtaaccgctggtttagacagacaagtgataccagcaaagagtaaggtctatgatagccagggtctcctgatttttagtgggatggacctctgtgactgcctggatgaagactgcttaggatgtttctatgcttgtcctgcctgtggttctaccaagtgtggagctgaatgccgctgtgaccgcaagtggctgtatgagcaaattgaaattgaaggaggagaaataattcataataaacatgctggataatctgcggtaccaaactatggagcctttaaaggtctttatttctaaaaatctgttactctaagatacattttaagcttgattatcatatgacaaagattttaaaaccatctcagtgtgccctaatttttcatcttgggtgctttaagattcactatttgatataaattcagataggctatttttcagtagtcagcgttaagcctgtctggatcaatataaacaagtagggtgtaggcagtcctctatttgcatgtttcccatgggcacaaatttcagtgacctagatttagtttaaataccagtttccttaccaggaaggaaagaaaactggtaaggaaactgttgttgttaaaatctaggttaaaattttagttagcacattgtaactgagtaattacatgaagtacaaacctctctgctagctcttcagtctacaaatcgctatgtaaataacagatatgcttcatgattgtgaccagtcatgttatttctttcaaattcttccagtggtttgtccctgtgcatctgttaattcagttcacgtacagcagagcatgtagttatgctgtctctctgtcatctacttgacattctatagaagtgaacactcgaaagaactggtcaacaaagatgaaagtgcagcaaagcaatgaaaaatgataacactggaagtgaaattttaatcaaacataaatgaatttgtagaagaagtcactgaccatgggaatgttgttcttgctgctgtgtattcataggagcttagtgaaggcaaacttaccaacacaaataagcaaagtggttgcaataaagacagatacgtcccagaggaagtgatggttaaaaaaaaaaaactttacattaaaagatatttaatgtgaatatagaaatatttcacaacattgaaagcacaagcaataaaagggtggaagctgacccaaacttagaaggagtatggcagtttgccgtgaacataaaagatgcttactcagtatggtaagttacttgccagaaaaaaaggcaagccctattcaaactactttgtttttacaatgaaataaaacactttaattctatttctaatgttttaaattacagtgtactaaatatttttaaacatttttgcatttttttctacatttataactggtcttaagagtttttaatatttgagcagaaccttaaaggtcatggaacaatcatcattttccctattgattattaagattgcaggaccatttttatggtcccacagtaccatgtgaaatgaggatcgcttgtagctgggaacagtgcttacttcagggaaaactgattttgatagaaccgactagttgagtattaaactgttttggaaataatttatatatctaagtgctgaaatatatttctcttctccccacttattcaaataaaaaagttttaatactataaacttttcattgttagcgccacgcagtccttgtcaagattgttctgggggacaaaaacttgatgtataaagcatgaatatacacacagtacttaaacagataccatatctgtggtattaaaattttgggggtggttgattaggattgtaaaaagactccttagggagtgaggatggaaaagagaaacactggttaatacagagtataaataaattttttggaaattgattgcatcttgatgttggaatttgcttggatgctatttggaggatgggggaatggactctcagttctgtggtgtgaaagaggggaaggtgaaactggttcctgccaaacaaaagggaactcagcacacacctcaacattttctatatgtcatttccagaaataatgatgccaaaaaaaaaatcaaatgcataatgactttctgatacttgacagtgtattttataaagctggatattcttaatcatttgtgatacagggatatttaaatgctttcatcttttttgatattttagtgtattgacattttttaactttttttcagttgaaattacataaaaatatagagtatatttggttagac

SEQ ID NO: 459860 - DNA, 959 bp, Homo sapiens
cagtgggtcaaattgtttccctgatcagtcccaatgcgagaacctggatgtttcagttgaagttgctgtatttactcgccccttttcttcctccctccgtgctggctttttgtgatggttggtattcagaaaacctctctaaatttctgggctgggcattttgtgtagctctgtcttccctggtactctgttcctcatggactccaactgctttgattgctcagctttctctcctcaactcagtgaatccaccagcttcttccaggtttcctctccctgtactatgtcctggaaatgctcttaaggagggtgttggaatagtcttggtgaggatggaggaagacctcaaggaagcattaaccatgggtttggagaaaagcagtgttcatacaactgagtatgtgattcactctccttccccttccaagaaaaatggaagcactgcaaaaagaatgggaatggatcctcatcaggcaaaggacatatttcttaagtaaactatcagtataattccactggaagcttctaactcatcaagtaaatacaattttgcagtaagcaggacaacttctatttcccatatgaatgctcaaattcacttttcataggcactagcattttcctaccgggaccaacagttagacaaagatttacaggactctccagaaatctgacctaatgcctccagtgcactcatcacccaaccttcttcagaagaatgtgacagattattgtctgcgcaacttaccgtgcacaatgtccagcatgctaaaaaagttactagacatgcagagaaacagggaaacgtgagccatagtcaagaggaaaaacagtaagtaaagaaagacaggatgattctgattttgaaattagcaggcaagcactttaaagagcttattgtaaatgtgctcaagaatttaaaaaaagatagtcataattattgaaaagaaaatcaatag

SEQ ID NO: 459861 - DNA, 1914 bp, Homo sapiens
ttctgctgacatcacaaatcacacatggcttagtcgtttactaatggtcctgtcgttacttagtcgttacacatggtcctgtcgtgtcgtttacatagagactctccatccttactgcaaccttctgcacgttcgcctttggaggccccaagctagtgacatgtcagcgacagggtttgtgtttctttggatgagaagaggcattctggtttttggaattttcaggctttctgctctggtttctcctcatctttgtggttttatctacctttggtctttgatgttggtgacctacacatggagttttggtgtggatgtcctttttgttgatgttgatggtattcctttctgtttgttagttttccctctaacattcaggcccctcagctgcaggtctgttggagtttgctggagctccactccagacgttgtttgcctgggtatcaccagcagaggctgtagaacagcaaatattgctgcccaatccttcctctggaagctttgtcccagaggggcacccacctgtatgaggtgtctgtcagcccctactgggaggtgtctcccagtcaggctacatgggagtcagggacccacttgaggaggcagtctgtctgttctcagatctcaaacgctgtgctgggagaatcactgctctcttcagagctgtcaggcagggatgtttaagtctgcagaagctgtctgctgacttttgttcgtatatgccctgcctccagaagtagaatctagaggggcagtaggccttactgaactgtggtgggcactgcccaatttgagcttccctgccactttgtttacactctgagcatagaaccccctactcaagcctcagcaatggtggacacccctcccccacaagctccagtgtcccaggttgatcctagactgctgtgctagctgtgagcaaggttctgtgggcatgagacctgccgaaccaagcatgggagggaatctcctggtctgctggttgtggagaccatgggaaaagtgtagtatttgggcagaagtgtgccgttcctacagaatttgggtagagtaggtgagagcaagaagcaaggatgaaggaaagggagaacactgaagacagtgtttgctagtgggatttagtccatttttattggcaggattgcacgtcctgatgtcagctgaagagagaaatggtgcctcatagagtgtcctcggcttacctttctgtctggagggtgtctactcaattcaagcgtaaaacgtttttgagagaagacccaattttcctattttgccattccagtggtttttggcaagccaggacacccgttcatcctttcggaaactgatctagctgtcatgtttgccttagctgagccaggaactgcacccacacagactctttgttgggccagtcaaatctctgctcatttactaggaaacttctctttctcctcgagttttcctagagaaagatatttatacatgtatttgtacatggatttctcctataaaatgatgacagtgtggattttgatttgacttttctccaagatgatgcctcttaagtcacccttcttattttattgttattatttctatgaaatcatttaactggaacctttctaactacacaaatcatctacatctgcagagtcttcactgctccttcaccaagaaaccttacaccacaacagatcatagtgattatactatgtaattttgaaacttatagcatttaaaaatatatctgtggctcaaaaaataaattcaaggtccttttctgatatgaaattgtgtgtgtgaagatccactatagaaagtaaaattaaaaaaaacaaccaaaaaaacctgagagtgaccgtggtggaggtggaagccaggatgtgggattgggctgaaactcgatgtatttgatacttctcttat

SEQ ID NO: 459862 - DNA, 806 bp, Homo sapiens
tctagatttaaggattcaatatggactgcctcaaatataaaggtcctgatgtcagctgaagagagaaatggtgcctcatagagtgtcctcggcttacctttctgtctggagggtgtctactcaattcaagcgtaaaacgtttttgagagaagacccaattttcctattttgccattccagtggtttttggcaagccaggacacccgttcatcctttcggaaactgatctagctgtcatgtttgccttagctgagccaggaactgcacccacacagactctttgttgggccagtcaaatctctgctcatttactaggaaacttctctttctcctcgagttttcctagagaaagatatttatacatgtatttgtacatggatttctcctataaaatgatgacagtgtggattttgatttgacttttctccaagatgatgcctcttaagtcacccttcttattttattgttattatttctatgaaatcatttaactggaacctttctaactacacaaatcatctacatctgcagagtcttcactgctccttcaccaagaaaccttacaccacaacagatcatagtgattatactatgtaattttgaaacttatagcatttaaaaatatatctgtggctcaaaaaataaattcaaggtccttttctgatatgaaattgtgtgtgtgaagatccactatagaaagtaaaattaaaaaaaacaaccaaaaaaacctgagagtgaccgtggtggaggtggaagccaggatgtgggattgggctgaaactcgatgtatttgatacttctcttat

SEQ ID NO: 459863 - DNA, 1554 bp, Homo sapiens
tggcttgccttctaaaaaggtccctatggactatttgacttatagtactccatctactgttatatccccagaggaattccggtctcttcgcttgtccttttctccaaacctggatgactacaacccggacatccctgagtggaggagggacatcggtcgagtcatcaaaaaatccctggtggaaaaaggggagctttgtacaaaaacaaacaaactaacccagcaggaagaagctagagcccatgggaagttctggcctgatgtctgcaaagctgagccccacacatgcagagacctcaaaggccctaaaggggatgcaactatggaaccacggacaaacatggggtccttgcctcttgccacaggggttccaggccagcacatcctggtggcggtgctccctggcttacccaccactgctgaactctttgtcctaccctatcaggatccagctggagaaaacaaaaggtcaactgatgacctggagcagatatcagaattgctgatccacacgctcaaccaaaactcagtacacttcgagctgaagccaggagtccgagtccttgtccatgctgctcacttaacagcggagctggcggtgtccacaggagcacagtcactcagggctcgattttcttatgcaaaagacaaacgtgtcaacgggaacagcaattgtgataaggaaagtctcacctgcccagttctctgctcatttttctctgctctgtttcccccacaagcccccctggtggacctcactccaacccacagtggatctgccatgctgatgctgctctcagtggtgtttgtggggctggcagtgttcgtcatctacaagtttaaaaggaagatcccggggattaatgtttatgcccagatgcagaatgagaaagaacaagagatgatcagtccagtcagtcactctgaaagcaggcccaatgtccctcagactgaactaaggaggcctggccagcttatagatgagaaggtggaatcccagctcatagactgtcccttaccagaagttgtaaaatggactttctcatatttcaatggctctctctctgcctgtgaagtaggcatgggaatccaacaacgaggtatagagaatctgacgttcacttgctagattctgctatttattgcagcagaaattttccaggaagctagacaaacctatgaagccactattgctgatccatttctctgtctggttcctcctgtctgttggcattaggagttgaagccttatatgtttacatctagatcctgcattgctgacaacagtgaataaattattatataaccattcatgctccactctaatgtgataatgccaaaccacctagaaggcctttacataaaatttttaatcttacttggaaaacaatgagtatgtaaacggaaacataaccctctttaaatgaatatgggaaaggtctgtggctgtgttaaggggaaatgtaaatgcagtgactggctcctatcatagataatgataacaactgcagtcacatctggtgtccgattttcacagtgcactttcttttattt

SEQ ID NO: 459864 - DNA, 508 bp, Homo sapiens
gcctttctgcagccagctcaccattacttgctccactgggcccctgcagggatgctgtggtcctcccactggcaggcttcagcttcggccttgccatatgccccaacacaaccctccagttgccccaggggctatattggctggtcaacaggttcccactttactacaaatctcaatgcttcttctttggaagcacatacctctgactccagaatctccaggagagacccctgagaaggtcttggcctgaagacactcacctctctttccccaggagtgtcttttagggtgagtttggattatgcacctgtgagtcaggagactagaggcaggaaagagagcaatgagctgagggtggctaagctgggaggtgagcgagggtgccctggctgagaccttgaaaaactccacccatgatgatcaccattatactcctcttcatcaacacacatttgttgagcatctactctttgccaggcaccgtgtcagactctcaggcacagaggca

SEQ ID NO: 459865 - DNA, 848 bp, Homo sapiens
gcctttctgcagccagctcaccattacttgctccactgggcccctgcagggatgctgtggtcctcccactggcaggcttcagcttcggccttgccatatgccccaacacaaccctccagttgccccaggggctatattggctggtcaacaggttcccactttactacaaatctcaatgcttcttctttggaagcacatacctctgactccagaatctccaggagagacccctgagaaggtcttggcctgaagacactcacctctctttccccaggagtgtcttttaggaagacagacaaatagccagcagttccacagcgactcaggggactgccagggttcaaatcctgctcctgctagatgccacttctgctgctcttcattgctgccctagacaaggccaggccctgcggcgtgctgcgagccttccttccgttatctttaccagctctacatggtcattcacagatgagaaagctgaagatcagagagctcacacatttcccacaaggttacacagtcagtaagagacactatcaggattccaatgacctgctgttaaagttcatctcttattcactcattgcctccctcaaggctgaagagtggggtggaggggagaccagcagagctactgagctcaatctgcctccttggccctcccagcccagagctctgccagcggtggtaggaggagtgtgggcctccacaatcccctccctgtccctctccgggggctcctggatcaacagaagcacatgacgccagcatcctcatggagtcattcacaattagtaccagataagaatgcattgtgtagaccagtgctgccccatagactattctgc

SEQ ID NO: 459866 - DNA, 597 bp, Homo sapiens
gtggagtgatagaaaaatcttccaatgaactatcaagaagacagacaaatagccagcagttccacagcgactcaggggactgccagggttcaaatcctgctcctgctagatgccacttctgctgctcttcattgctgccctagacaaggccaggccctgcggcgtgctgcgagccttccttccgttatctttaccagctctacatggtcattcacagatgagaaagctgaagatcagagagctcacacatttcccacaaggttacacagtcagtaagagacactatcaggattccaatgacctgctgttaaagttcatctcttattcactcattgcctccctcaaggctgaagagtggggtggaggggagaccagcagagctactgagctcaatctgcctccttggccctcccagcccagagctctgccagcggtggtaggaggagtgtgggcctccacaatcccctccctgtccctctccgggggctcctggatcaacagaagcacatgacgccagcatcctcatggagtcattcacaattagtaccagataagaatgcattgtgtagaccagtgctgccccatagactattctgc

SEQ ID NO: 459867 - DNA, 1007 bp, Homo sapiens
  misc_feature (973)..(973): n is a, c, g, or t
  misc_feature (976)..(976): n is a, c, g, or t
  misc_feature (986)..(987): n is a, c, g, or t
  misc_feature (989)..(989): n is a, c, g, or t
  misc_feature (992)..(993): n is a, c, g, or t
  misc_feature (995)..(995): n is a, c, g, or t
  misc_feature (997)..(1000): n is a, c, g, or t
ttttttccatgcattttccaagggagaatgataaggtttcaactgggtgacttgtccaccatggaaaaccaaacatggatggcagggatgttcttgaatctgcagcccatgttgcaccagtcactgccaccttgtgtgaccaaaactgaaaaaagatttgcatcaacatgcttttattccagcactgtggttatcaacataagcatcagctttcagggttcctgctacagactttcaaactctccagccactcaagatggcattacactgcaattgggatgtcacagccggatagtacgcttcctaggcgaccattctttggtggtagacccctccctggggacactggaactcaacaggcatccgctcattacagctggtgagctttctgttaacagtgctgcaagaacaaaggtggaggcattgaagcaacttgtgcttctctcctcattgcaacccacccttgtggcaggaaaagtcttcttgatcattcaaaccacttgaagacagcattcttcttcaggaattgaactgaatgtgctgccatcctaggcaaaaactcccaactgactgatttgcaaaggatttgtagctgataaagatggtgcttgggacacacattctccttcctttctggaggaaatctaaatgcctggagctgagcaggtgtttcatgtcgagaaagagaagaatatctggggatagggcattaaatgatgagaggaccaggataaggaaaccagaggctggcctgaatcactacaatcctggtcttgtagaaatccttgactcacctcttcattccaaattagcaaaatgagcaacatgtaattttttttatctacaggatttgggtttgttctgacttgtctaattacactcttcaattcaccaaaagtagactgtgtgtttcattagtctccttttctttttttggatagaaaaagaaaactttgttttcttttctttgtgnaanttgagatatnnanagnnangnnnnttaaaat

SEQ ID NO: 459868 - DNA, 1095 bp, Homo sapiens
ttgtttatgactatgtgcagtaatatgggtgaaactattaggatagtgggatgtatggacttactgctgctgtggccgaacagaggcatttctgtctttctacctaaaggttttaaggtctcaaaatctgcaatacggatgcagcttgaggcctttatcctaactgatatggaaacagaaaatcaaatactgcatgttctcacttataagcaggaactaaacattggggacaggcagcagctggcttctgcagatcttcttcccagagagctgggcaagggcccatctccaactgtcagaggtcagggatttggcagtgagaatagcaaaaacgaaaacaacaaaaccaaaggaaaagtcttggtttctagtttttcccttcaaaatccacatcttcccaaaaaccaagacatgaaaatcctcctaaggagtctggaagaagccatgtggcaagttgtccatatctacaaaatagtttccagccaatactgtagttactggtgaggtaaaaaagtgtcagtctgggtggaaaaggaaacaaaaaataagggaaaacagtatgagatatgatgcacattacaactagcaagggtgaggacggtgtagcttcgtctccttcctctctcagacgtatcgtagagaagatggatctttccttccgccatctctgctaattgatgatgtttgagctcttccttggggaagacatcagcagttcattcactgcagttgccaatcattgaatcagactggctttccaggcattctaactgaattacaatagacaaaaattagttgacaaagtcagcaacgtagaccatgtaaacctcatgattccttatagtgaaataaacagtgaggaagtgacataactggcattgatgatggaaaaaatcaaaaggaagattgttttcctacagcatcaattttatattttcctaaaaaatactgtgaaaggttaatggctacttatccataaatattgtcttatataatgtatttttcattactggtagaagaaggaaatcatagaaacaaaagaaagtaaatttttagattttaataggaaaaaagaaaaaaaaattctccagggct

SEQ ID NO: 459869 - DNA, 2291 bp, Homo sapiens
atatagcatctacactagcaagaatggtgatcagatatcagatgaaaagtgctgtggaagaaggaacagcctcaggcagcgatggaaatttttctgaagatgtgctgtctaaatttgatgaatggacctttattcctgactcttctatggacagtgtgtttgctcaaagtgatgacctggatagtgaaggaagtgaaggctcatttcttgtgaaaaagaaatctaattcaattagtgtaggagaattttaccgagatgccgtattacagcgttgctcaccaaatttgcaaagacattccaattccttggggcccatttttgatcatgaagatttactgaagcgaaaaagaaaaatattatcttcagatgattcactcacaaatgaactaagagatattgatgccctaagccagaaatgctgtataagtgttcatttggagcatcttgaaaagctggagcttcaccagaatgcactcacgagctttccacaacagctatgtgaaactctgaagagtttgacacatttggacttgcacagtaataaatttacatcatttccttcttatttgttgaaaatgagttgtattgctaatcttgatgtctctcgaaatgacattggaccctcagtggttttagatcctacagtgaaatgtccaactctgaaacagtttaacctgtcatataaccagctgtcttttgtacctgagaacctcactgatgtggtagagaaactggagcagctcattttagaaggaaataaaatatcagggatatgctcccccttgagactgaaggaactgaagattttaaaccttagtaagaaccacatttcatccctatcagagaactttcttgaggcttgtcctaaagtggagagtttcagtgccagaatgaattttcttgctgctatgcctttcttgcctccttctatgacaatcctaaaattatctcagaacaaattttcctgtattccagaagcaattttaaatcttccacacttgcggtctttagatatgagcagcaatgatattcagtacctaccaggtcccgcacactggaaatctttgaacttaagggaactcttatttagccataatcagatcagcatcttggacttgagtgaaaaagcatatttatggtctagagtagagaaactgcatctttctcacaataaactgaaagagattcctcctgagattggctgtcttgaaaatctgacatctctggatgtcagttacaacttggaactaagatcctttcccaatgaaatggggaaattaagcaaaatatgggatcttcctttggatgaactgcatcttaactttgattttaaacatataggatgtaaagccaaagacatcataaggtttcttcaacagcgattaaaaaaggctgtgccttataaccgaatgaaacttatgattgtgggaaatactgggagtggtaaaaccaccttattgcagcaattaatgaaaaccaagaaatcagatcttggaatgcaaagtgccacagttggcatagatgtgaaagactggcctatccaaataagagacaaaagaaagagagatctcgtcctaaatgtgtgggattttgcaggtatttctttctatagaattttaaaattcacttttaccatttgtttggaacagggattcaaaaactgagctttctgttctaatatccagaaacctggtagactgtatggaattattccaaagcccttcatttctcctaattttacccttgcctccagaatggagaagaacatggagggatatgttaggaacaatttggtgctaggtactttgatcggttgctgacaaatatgctaaaagtggtcaatcctagtaaaaacccagaatagttctctaaacatggtctgttgtttttctcttattagtatgctaaataataaatagtattattctcccagatttttttttaaaaaaggattcttgcctgtcgtttgaaagattaaaaaaatttgtctctaatctttatttaggtcgtgaggaattctatagtactcatccccattttatgacgcagcgagcattgtaccttgctgtctatgacctcagcaagggacaggctgaagttgatgccatgaagccttggctcttcaatataaaggtgatttgttctgatcatttgaaaatagaaaataattcatgtgtctgtgtgcgtgtgtgtgtgtgtgtgtaagttaatttattttgggcaaacaattgcttcagtctctttaaatactttcttaaaagaagcactaaaattttgaattgggaaacttt

SEQ ID NO: 459870 - DNA, 792 bp, Homo sapiens
acatctttctcctgtgctagatgcttcctgtcctcaaacatcggactccaaattcttcagctttgggacggactggcttccttgctcctcagcttgcagacagccgactgtgggaccttcctttgatttatgcctactcacatatacttggtacatgcacgttccttagaggaggggagataggaagacacacatgtaaatttccacctcagtttggaaacagatactgcaatcccagaaaatcttgccataagaagagcctagccaatagtttgactgcgatttcatgggagacctcaaggcagagtgatccagaataccacagtctggaggctatgaagtccatgattaagaagccagcacgtttgctttctggttccaagatggcacacctttttgctgcttcctccagagaggaggaacactgtgttctcacatagtagaagatggaaggagcagatgcagatgggcatggcaatgtgagaatatgtcagaggccccaggatgaaatgagctcaagtccctgaaatccctgttagaagagtctttccactggttgggaatgctaattgtattttgacaactcaatgtttcagcaactcaaaatgttacagcttctgcattggaataaaaaaaggttagttcctttggaattttgtgagttccaagttttaaaatattaaacctttagagcaatgatttatattgtaataacaacgatatttaggggagaaagactaaataaaaggagagagaaatctccttggtatttgccagtaatttacaggtcag

SEQ ID NO: 459871 - DNA, 1599 bp, Homo sapiens
gccttgcttttctctgttctctgtgggaacagctccggtctacagctcccagtgtgagtgacgcagaagacgggtgatttctgcatttccatctgaggtactgggttcatctcactagggagtaccagacagtgggcgcaggacagtgggtgcagcgcaccatgcgcgagctgaagcagggctaggcattgcctcactcgggaagcgcaaggggatgattccttgggttcaggcctgaatagctagaaaaatggagttgttatcaaccaagatgcagaaaactttgggtggagagatctgtggtggagggagaattggaggtcagcttggacatactgagtgtgacatgtctgttaaacatccagttaaagatgcagagtgtgggagccagagggacattgcacatgtgatggttaagataacaactttgagatggagagatgatcctagattatctggtgggcccaacctagtcacagaagtccttagaagtagagtatctttcccatggtggtcagaggctgaggtgactacgggagaatggccagagagatgcaaggttgctggatttgaagatggaggaagggggccactggccaaggaatgtgggtggctgctagaaggtggaaatggcaaggaaacaaattctcccctataacctcaagaagggaacacaaccctgcaaacccttgatttttgcccagggagatggatatctgacctgcagagctataagataatacatttgtgttgttttcagccactaagtttgtcataatttgttatcacagcaatataaaatgaatacacagagtaagcagttggatatgagtctggagatcctttattcttttaatataggaaatttgtcaacaacaaaaacaagtgtatatatttaaaagttttaaacctgattgttttaggctgtttaatttttgtgaacctaatgatttcagtcaggcccacatttctgaaatgagcgttatgtcagtgtaagctaatttaacacttttatgcagttttcataagtgattgtacaactatttgatgtttattgttgagtttgtgaagcatgacaccacaaaatcataaaaatgttctaatatctgtaaccagaactacagataagtctgtgcagtccttaaaatatactctacatatgtgtggatatatctgtatgtatttgtatatacgtatgcataagtaacctctatttggctacaagtagcacaaattagttctgtgtcagatattataagtatgtttctgtactttgttcattaacttcattattttatttcattaaaaaaaatttttttttaagatgaagttttgctcttgttgcccaggctggagtgcaatggcgtgatcttggctcactgcaacctccgcctcccaggatcacttgagcctgggaggttgaggctgcaatgaggcgtgattgcaccactgcattctggcctgggagacagactttgtcttaaaaaatatatgttaaaaaaaaaaaaaaggagagacagacagacaaggagaatgtcatgcgaagatagatgcacagagagaagacggccatgggactgctggagcagcagcacaatt

SEQ ID NO: 459872 - DNA, 1247 bp, Homo sapiens
acctacagcctcggagggtgagcgtcatggcggcttcttgccctctcccggtgaccccggacctgcccacgctgcgtgccaagttgcagggactgctgcagttcctgagggatgccctgtccatttccaatgcacataccgtggatttctacacagaatccgtgtgggaggagctggtcgacttgccaccggagacagtgctggctgcgctgaggaagtcagcgtcggagacggaggccctgccctcagagacgcgccccctagtggaagcagagtgggaagcaggtatgactgattttcccaaaatattttgtgaaacttctcagaagttggtgagtgtggaagcctttgctctggctgcgaaatactattctgtacaaaacttgggaatatgtactccttttgaacagttgcttgtagcccttcgaggaaatcaaaaccagagaattggtgaaaatcagaaggcagttgagtttatgaatatgaagaaatctcatgaagttcaggcaatgtcagagctgattagcagtattgctgactactatggaataaagcaggtgattgacttgggttccggtaaaggctacctaagctcttttttgtccttgaagtatggcttaaaagtttatggaattgattcttcaaataccaatactcatggagctgaggagagaaacagaaaattgaagaaacattggaaactctgtcatgctcagtcaagattagatgtcaatggactagcattaaaaatggcaaaagaaaggaaagtgcaaaataaagttaaaaataaagctgatactgaggaagtgaaagcaaagaataagcaggaggaaacaggactgagtgatatgatgaaatgggcggggacgtatgcaactaaaggatttaaagctggagaatttaatgtcaacaagggatggtgtgatgattttagaaagacgtttggcttaaaacaaattgtcaagataataggagaagcagcagatgctgatcaagaggcagcagacaagttcccagatgctattaagaaaactgttgaaatgtaagggtatcttcctgaaaaaattttcagtgcagataaaagtgccatattctggataaaaaaaaatgccacaaagaacacttattaataaggaagagaagcaagcaccaggatttaaggcaggaagagataggctaaggctactgttttgtgcaaattcagtcaagtttatcatcagaaatgtccttatctctaaaattactaa

SEQ ID NO: 459873 - DNA, 1247 bp, Homo sapiens
ggtgggttcttggtctcactgacttcaagaatgaagccacagacctttgcggtgagtattacactctttaagatggtgtgtctggagtttgttccttcagatatgtccagagtttcttccttctggtgggttcgtcttgctgacttcaagaacgaagccacagaccttcacagcgagtgttacagctcttaaaggtggtgtggacccaaagagtgagcaacagcaagatttattgtgaagatcgaaataacaaagcttccacagcatggaaggggacctgagcaggtatgactgattttcccaaaatattttgtgaaacttctcagaagttggtgagtgtggaagcctttgctctggctgcgaaatactattctgtacaaaacttgggaatatgtactccttttgaacagttgcttgtagcccttcgaggaaatcaaaaccagagaattggtgaaaatcagaaggcagttgagtttatgaatatgaagaaatctcatgaagttcaggcaatgtcagagctgattagcagtattgctgactactatggaataaagcaggtgattgacttgggttccggtaaaggctacctaagctcttttttgtccttgaagtatggcttaaaagtttatggaattgattcttcaaataccaatactcatggagctgaggagagaaacagaaaattgaagaaacattggaaactctgtcatgctcagtcaagattagatgtcaatggactagcattaaaaatggcaaaagaaaggaaagtgcaaaataaagttaaaaataaagctgatactgaggaagtgaaagcaaagaataagcaggaggaaacaggactgagtgatatgatgaaatgggcggggacgtatgcaactaaaggatttaaagctggagaatttaatgtcaacaagggatggtgtgatgattttagaaagacgtttggcttaaaacaaattgtcaagataataggagaagcagcagatgctgatcaagaggcagcagacaagttcccagatgctattaagaaaactgttgaaatgtaagggtatcttcctgaaaaaattttcagtgcagataaaagtgccatattctggataaaaaaaaatgccacaaagaacacttattaataaggaagagaagcaagcaccaggatttaaggcaggaagagataggctaaggctactgttttgtgcaaattcagtcaagtttatcatcagaaatgtccttatctctaaaattactaa

SEQ ID NO: 459874 - DNA, 1212 bp, Homo sapiens
gagcacagcactgtgcaagtcatgcatgctagttgtttgcttccatgtgaagggaactcagtgaatctgcagaccttagtctatctcttgggggacacatcagactatagcaggcccccattacttccttcatccattcttttaatacattcattcattcattgtcctccttccctcccttcttccttcccattctttctttattcccttccttccctctcccatcccacttcatctatttattctattaacatctttctgacatttttcttgcatgttgggttactccaatctagagaaggaggagaggtgacttatctgcttagtacatttgaaaagagtgaacagggcttacgcatactcagctctcctactttcatctactttttgaaatagtcttcctgctctgctcctccaaggctaggctcttcacctgtgagggacaggaaagggggcttgtcacagttcactgaggctgacattaggttgaggaacacacagatgatttaagcagccttcgattacaacatacctaaaataataaagcaattgaagagggaaaaaaatcagccgaaggtgtataccccctccacgctgggtgactgtggtatatttcatcttcgcattctaaatcaatgctaagcaaagcacagaaatgtttacctttgtctgatctctaattccctaaatttatgtggaatcatgcacagatgcgctggaaaccagcctggaaaagcctggcattttaattgatcccagagcttcttgcctcacggctcctgctgtgatgaagtctgctacttgttccaaagattctccgcctggttgcctagccacggcagctggccaatcaaggtgttcgtatgcagcgaaggaagtaaccaatcaattttttaatttccttctgtaaacgggagtgaatcggggtggatttgaaatctcattagtcaaaacttgccttgttgatccaaaatgaacctcccaaaacatcaccatcgtcatgccacacatcaagtcagaaatcttcatttgttttctcatggcttccagaagagtctgcattaatacattatcatgttttttgggggtgtagctaaattctgtcttcttaaaaaatagataaataaaaaataaccttcaacttttccagcctgcaatgatctcacatactatttttgattcctccataagttacgcattttatccttggtc

SEQ ID NO: 459875 - DNA, 1054 bp, Homo sapiens
  misc_feature (3)..(3): n is a, c, g, or t
  misc_feature (5)..(5): n is a, c, g, or t
  misc_feature (8)..(10): n is a, c, g, or t
  misc_feature (12)..(12): n is a, c, g, or t
  misc_feature (14)..(14): n is a, c, g, or t
aangngtnnntntngacacaaggctgtttcctgcactggtcagggatgaggtcctggagtccagtgcaggggaagtgtgctatggggaagggctgtaggtggtagggacagtcttgctgctccctcctggggcaccctcactggtccctgccgatgccacctcctacctgtcccccatgtacctctcctctgtgttttcctctggtccaggcacaaactcttctcagtgtgccacagcaggcttgaatgggtccaaggaacatgttcttgaaacaaaggaaaaaacaggccagaaacactaactcagggttgcggtcaggtttaaatgagcttatgcactgggatcattgagtacagttcctggcaccgagttggttctgcaatcactgttttctatgggtcccttctgtgggctaagcctgtgagagatgtggctgtgcctgcctggcaaaccattggcctctgtttgccacacagagccaggcacacagcaggtgctcaggaggacacgttgttagtctacgagtctctccttaccagtaacttactcagcacaaagggagaaatagtgatttcacagtggagaggccaagcagacaccaccctaaccaagggtgaagacttcacagaggaggggattgttgggattggtttttatgggtgtacaggaacctgccagatagacaagaggaagaagggcattccaggtagacaagcatccaggacccagaaggagttaaaacacttggggaaactgtagggtctaaaatagggtgtgaggaagggagcagccatggccctcaattttcccatctgcacgtgggatgtttgaatcagctgatctccctgctgacacattgttcattcttcattggtagtggggacaggacccagtcctgttgcagatgtgtgatggggctggctcatacagatttgtgagagcacttctttcagctccatagtcaacaacataaagcccaatagtgaaagtgtttacaccacagaaattggcaaatgctacgaatccagcctttttgtttttctgggacagctc

SEQ ID NO: 459876 - DNA, 1204 bp, Homo sapiens
tctttattatatgaatagcacaggatgatcacgctctctagcgcattctctgctaaacagaaaacacacgcgcacaagaacacacatgcatgcatgtgtgcaacggacatggctaacccgaaactggttttacatttcgaggtaattgtggctctcctctctttactacagacaattctttctctccttctggggcaaagaacatggcttgctcatctttatgttctcagcactgagaatgatgccttgcacacagtaggcacccagaagcatctactgccacatgactggtgctttggtaaacactgtgtcagctgccggcaccacatttttcatcgtttctgttctatattcagttcaacattaaaacggtcccagggctttgaagggtaccctaacctcaactcattgttacaaaagggctctgcattaagcctatgttccaatggtttcgaagatcataatgattattctgtacttattcatggctgtacgctctggcatgcctgtgagctgttctcgtaaaagagatataaggatcaaaacgtacccatgataggtattatctgccagggcagacgctgccctttgatagaagtcacagaaattcagcactggcctaccctcactctaccatggcacagaagaaacttctggatttagggctaccttcgggccaattctgaaataagtaaagttagtctttggtgtctttatgcttctgttcctgtttccttcttcctgttcattccccagcagtctggtctgattctcaagaaacttttccattgtactgaactagagagagattgagacaaactaagattttactaacgacttcctgaaggctgaagtaaagcctttaagatggaaagaaacaactcatcatcctattcgaagatcagtcgggccagccccagtgtaaccctcactgcagcctgaccaagacgaggctgaaacagcaagagcatctaacccacacaaaagctgctcttgtgaaacttaaggtaataactcttcccaaagaagccatgaatacaatttctgatccatccagaaagctctggcttgcagtactgttgcgatgcagttgcacagcagttatgccatgacctcccaacatactgcaagaaaaaaggaagttttttcctttggtacgtagtgatagtcaacaaaagccacttcccttttctatttctctttg

SEQ ID NO: 459877 - DNA, 1322 bp, Homo sapiens
tctttattatatgaatagcacaggatgatcacgctctctagcgcattctctgctaaacagaaaacacacgcgcacaagaacacacatgcatgcatgtgtgcaacggacatggctaacccgaaactggttttacatttcgaggtaattgtggctctcctctctttactacagacaattctttctctccttctggggcaaagaacatggcttgctcatctttatgttctcagcactgagaatgatgccttgcacacagtaggcacccagaagcatctactgccacatgactggtgctttggtaaacactgtgtcagctgccggcaccacatttttcatcgtttctgttctatattcagttcaacattaaaacggtcccagggctttgaagggtaccctaacctcaactcattgttacaaaagggctctgcattaagcctatgttccaatggtttcgaagatcataatgattattctgtacttattcatggctgtacgctctggcatgcctgtgagctgttctcgtaaaagagatataaggatcaaaacgtacccatgataggtattatctgccagggcagacgctgccctttgatagaagtcacagaaattcagcactggcctaccctcactctaccatggcacagaagaaacttctggatttagggctaccttcgggccaattctgaaataagtaaagttagtctttggtgtctttatgcttctgttcctgtttccttcttcctgttcattccccagcagtctggtctgattctcaagaaacttttccattgtactgaactagagagagattgagacaaactaagattttactaacgacttcctgaaggctgaagtaaagcctttaagatggaaagaaacaactcatcatcctattcgaagatcagtcgggccagccccagtgtaaccctcactgcagcctgaccaagacgaggctgaaacagcaagagcatctaacccacacaaaagctgctcttgtgaaacttaagagtttacgttcttggagacattgatggagataataacaacaactatgatcatcatgactgccataaccagctcctactgtatcctagctctgtggagagcacatcacctcatcacacagcaacactacaaggactgcctccactttaagatgtgattaagtaacatgcccaaggcccgtagcaaagaagcagtagagccagaaattaaatttagggttctccaatttcagaagccatgttcttaactctctgtggtattgctcaccatctacagaccaaacagatgaaccctgaataaaacacacttttccaaag

SEQ ID NO: 459878 - DNA, 825 bp, Homo sapiens
aactggctttgctttgtatgtctttcatccttctgtggactagacataagcatgttcttatgttgaaaataaataatgaattgtccctaaatgtggacttcatttccattccattctgttattcagagccttcactatttcaaatagccatctttttttcattaattacatcagctctgcttttgttatgtcttgttggaaaagagaagaaagtttccattatttctcttctagactgtggaatgaagcagatggggcattttgcaaacattcaatcatatcttgaaatctctgaaacctatatcctgaacccttcagttctgatcttgactattgtaactattgtaattaatacttttattttttatctttctcactggactgtaggctctttgaagacagtggaatactgtttgtctccatactgtcaatgcccagcgtaatctctgacaaatgaatttcgctcttgtcgcccaggctggagtgcaatgatgcgatctcggctcactgcaaccttcgcctcctcggttcaagtgattctcctgcctcagactcccgagtacctgggattacaggcatgtgccagcacgcctgtatttttgtatttttagtagagacggggtttcaccatgttggctaggctggtctggaactcctgacctcaggtgatccgcccgccttggcctcccaaagtgctgggattacaggcatgagccatcgtgcccggcctgttgtaatttccttctctatactaaaaggtgttttatacatataaagtatttttctttattataatgagaaataaatcttataaaaatatttggg

SEQ ID NO: 459879 - DNA, 1039 bp, Homo sapiens
ttcgaagcggctgctccagacaggccgccgctgccatcacaagtaccattaacattaccactttatagtgatggcactttgtagtttgacattggccactgtgggagtatttgcagcagaaactggcaaatgctgcaaggtggtcacatggtggttccacagagttaggtctatcccagaatacagtgtagtggacaccaaagaggccaaaagggcaaattccccttcgaaagcagacgacctcctgtggaagatagtgaaacacatgctgtggaaattcagtctgatcttcatcccatatgctggttctcaagatggagcaacagggagatttttctcttcccatgaacacatcctcagcctcaatccaagggcaatgatctgtattattaaagatataggtcaagccagcttgcgcttcttcgtcctgtgggatgttttagaagctgctgtcacattaccaagatctgttctgtggttcctaattattcctcttggcagctttggattccaagtgattcctctcacatagattcatgagtgaatgaaacagacatgatcacttcccttatggctacaaaagaggggagaatggggaaacatggaaatcaaaaagcatccctgtattatctattctcatactgctaacaaagacatacttgagactggttccctatatcccaggatgatgaagacccctctttctccctctgtataccaagaagtttaagtatcagcaacacaccaagggaaaatagcaaacagacttctgtttggacatgaaattgaacaaagagctcacaccagtcagagccagtttgaaccagtctgcacggctctgaaatctgccggacctccctctgaagctggcacaaagacacgaagaacatcattgacttcaatctttggccttctaaccaggaaaggacttgtgaaggtgaatggtttgcagacgaaggggatataaaagagacaaaaccaggataaaaattaaataaaaagtagctgtcttaaactgtaattgcagtcctctgctgag

SEQ ID NO: 459880 - DNA, 971 bp, Homo sapiens
cagagggcgatgtagcctttacttaggagaagtatagaaattaaggaagcttataaaattatgatttattattgcagtcgagctgtcttctgggctttatcagacatttcgtataaatattcttctctctttttgagtctgtgtcatattcagcactgtgaacccttaccagcaagtgactatttttgagttacaggaaggaaaggtgagcagccatgtggctaaagaaagctccttaactaggacatatgggaagcaaaagatggttaacatttttctgctgaatgaattctacattctttcacattctttgtgttgaaataaacttctagcttatctttcaaatggctcctaattttatttatgcaagtacgttactgctttaattccttgatgaaacaaggcaagatataaataaatacaataaaagctattctagctgggtagaacaccttttcaaaagtcttccctagagtaaatatcaaatcaaaatgcctttatgaatcagttgcccttaaaagggtggattttacggtctgaatatctcaatttcaacagaaacacaaaacagaaaaaaaaaaacctggttgtctcagaacatcagttcttaaaatcaaggcataataaatggtctatatgtgtagacaattttgatgtagatgatctctccagacagtctggggaacacaggaaccattgtattgatcagactgtggtcacatgtactacttagctaaagaggttctgttcctgaagatagcttactataacatcaagtgtttgaaataaaataagaccacgaaaccattgtaaagcaaataaaacatgcaatcatgacaatattttgtcaataaaccaaggcctagcaatttaagaagcttagaagaggaataaggtattttacttttgtttgttctgtccttggacttgattgattgattgattgattgagacggttttgctctggttga

SEQ ID NO: 459881 - DNA, 3177 bp, Homo sapiens
  misc_feature (3)..(6): n is a, c, g, or t
  misc_feature (9)..(10): n is a, c, g, or t
  misc_feature (13)..(13): n is a, c, g, or t
ctnnnnttnnctncagcctgtagcgggagtggcttgctgtcagctcgggtccgacactgcagggttcccgacctccagcctcgccaggagagcgccgcgttcagcgactcggagccgggtacctcctgcctgctggattaggtagaaggagaagctcagccaatcctgagggctcggaggcaaggaaggcgggacgaagaggaaaagttgaggacaggagcgtcacccaatccaacgcctgactgcaaaagcgatggcggcgagcacccaattgtagacggcagttagagggaggatggttagtggagagcggaccaatccgtgacaggggagggcaatcttaagccaattaaagctgagaaggtgggaaggggcggagctcgccctgtggctgctcggtggtggggagccactggtggggaccttttttgggccccctttccttcgtggggtactatggagttcccagaacacagtcagcagctgctgcagagcctccgggagcagcggtcccagggtttcctttgtgactgcaccgtgatggtgggtagtacccagttcttggcccatcgggctgtgctggcctcctgcagcccattcttccagcttttctacaaggagcgggaattggacaagagggatctggtgtgtattcacaatgaaattgtcacagccccagcctttgggctgcttctggactttatgtatgctggccagctgaccctgagaggggatacccctgtggaggatgtgctggcagctgccagctacttgcacatgaatgacatcgtcaaggtgtgtaagcggcggcttcaagcccgggccctggcagaggcagacagtaccaagaaggaggaggaaaccaactcacagcttcctagtttggagtttttgtctagtacttcccgtggcacccaaccttcgttggcatctgctgagacatcaggccactggggcaaaggggaatggaaaggctctgctgctccctcacctactgtccgtcctccagatgagccaccaatgtctagtggggctgacactacacagcctggcatggaggttgacgcaccacatctgcgggcacctcatccaccagtggctgatgtctctcttgccagccctagtagctccactgagaccattcctacaaactacttctcttctggcatctcagcagtttcattggagccactgccatctcttgatgtgggtcctgagagtctgagggtggtggaaccaaaggatcctggaggaccactgcaaggcttctatcccccagcctcagccccaacgtcagccccagcccctgtctcagctccagttccatcccaggctccagccccagctgaagctgagctggtccaggtgaaagttgaagctattgtgatctctgatgaagagactgatgtgtcagatgaacagcctcagggtcctgagagagctttcccatctggaggagcagtgtatggggcacagccctcccagccagaggcttttgaagacccaggggcagcaggactggaggaggtggggccaagtgaccacttcctgccaacagaccctcatctaccctaccatctgctgccaggtgcagggcagtatcatcgaggactggtgacctcacctctgcctgcacccgcatccctgcatgagccactttacctgtcttctgagtacgaagcagctccaggaagctttggggtttttactgaggatgttcccacctgcaagacatgtgggaagaccttctcatgctcttacacactacggcgacatgccacggtgcacacacgtgagcgaccctatgagtgccgctactgcctgcggagctacacgcagtcaggggacctctaccgccacatccgcaaggctcacaatgaggacctggccaaacgcagcaaaccagatccagaagtgggaccccttctaggggtgcagcctctccctggctccccaacagcagacagacagagcagcagtggtggagggccacctaaagattttgtattggccccaaaaactaacatctaagggagcatgagctgatgctaggctgctcttaccatccttagatggcagctcagaaggttggtggcaccttatcacccctgctgggtgacaagaataaaggctctgcccaggctgaaagttcctacccttttttttttttaatcttttatttttttgagacagagtctcactctgtcacccagactggagttgcagtgagccgagatcacgccattgcactccaaccctgggtgacagtgcgagactccatctcaaaaaagaaaaaaagaaaagggggaaaatgacaagtaaatattcttctctctttttgagtctgtgtcatattcagcactgtgaacccttaccagcaagtgactatttttgagttacaggaaggaaaggtgagcagccatgtggctaaagaaagctccttaactaggacatatgggaagcaaaagatggttaacatttttctgctgaatgaattctacattctttcacattctttgtgttgaaataaacttctagcttatctttcaaatggctcctaattttatttatgcaagtacgttactgctttaattccttgatgaaacaaggcaagatataaataaatacaataaaagctattctagctgggtagaacaccttttcaaaagtcttccctagagtaaatatcaaatcaaaatgcctttatgaatcagttgcccttaaaagggtggattttacggtctgaatatctcaatttcaacagaaacacaaaacagaaaaaaaaaaacctggttgtctcagaacatcagttcttaaaatcaaggcataataaatggtctatatgtgtagacaattttgatgtagatgatctctccagacagtctggggaacacaggaaccattgtattgatcagactgtggtcacatgtactacttagctaaagaggttctgttcctgaagatagcttactataacatcaagtgtttgaaataaaataagaccacgaaaccattgtaaagcaaataaaacatgcaatcatgacaatattttgtcaataaaccaaggcctagcaatttaagaagcttagaagaggaataaggtattttacttttgtttgttctgtccttggacttgattgattgattgattgattgagacggttttgctctggttga

SEQ ID NO: 459882 - DNA, 1131 bp, Homo sapiens
  misc_feature (1)..(3): n is a, c, g, or t
  misc_feature (5)..(9): n is a, c, g, or t
nnntnnnnngctattgccagaaggtccagagactcacagaccggtgtcacccctgcccagcctgtctatggttgtttctctgccctgtccatcggtcactgccctgcccctatctagccctgacaaaaagtgcaagtgtggtatcccagcctcctgcctctctcttccctcccccgccttccttcctctcgcctgggctgcctgcctcagaagtggggacccaaagggtgcaggacgcctggtctgccttgtgggtcctggacggagcccctacctctgcaaagatgacttggagacaggccgtcctgctgtcttgcttctccgccgtggtgctcctgtctatgctgagagagggaaccagtgtatctgtgggcaccatgcagatggcgggagaagaggcgagtgaagatgcaaaacagaagattttcatgcaggaatcagatgcctcgaatttcctcaagaggcgcggcaagcggtcccccaagtccagagatgaggtcaatgtggaaaacaggcagaagcttcgggttgatgagctgcggagagaatattacgaggaacaaaggaatgaatttgagaacttcgtggaggaacaaaacgatgagcaggaagagaggagccgggaggctgtggagcagtggcgccagtggcactatgacggcctgcacccatcctatctctacaaccgccaccacacctgatcccatcctgaagccggccaagaagacaaagcttgtagcaccattggcatccccgtgttccagcaatctttcccatgcaaaccggcccttcagagggtctcagcttggggtctgcagtggccagcagctcttgaaaagacgcatgcctttccttccagtgtgtgaaagtgtcctgactttcacctctttgcagaccatcttctgaggtgagcaactgcctgcagggcctcctagtaccaaacctacagtggcttcccctggcttcgttcccaagcaaaagaatcagtcaagaatcacatgtttgcttatggcttacaaataaaaacgctgaatcaaccatgtgtattatcttctcaaatctccaaccgaggggtgtcatgctgtcttccctgagcgatgatgtgattcttgctgacttgggtgtttgaaa

SEQ ID NO: 459883 - DNA, 2191 bp, Homo sapiens
  misc_feature (6)..(9): n is a, c, g, or t
gtcagnnnnagatggtggctcaaatgtggagaaagtttagtaaagaagctacttgcaaagggtgggggcaggatgttgggaataaagggatgtcattacatcccagggtcatggagtccctaccactcatgtccgaaggggcaggaagaaccctttggtggtgatgctacaccaggattgaaagatgagaggaggagatggggaattctatctgacatctatcagcagcaaactatccagacttcacttgtgaaatatggaccttgtcaactggggtgtcagcatcagtcaggagacggcggtggtcagacagcagctgggcacaggggagcacagagctgtaggcccagggtcaaggcactgagtgatgggccaggattctgcagtgatacaaatgtttttgggctgtttctttctgaattaaaagagccccacatgtctgacggattcaccaggggaagatacaaaggacagggtcgcagggcttgatagagtctgaacaactggactcagccattgacaatgtccagaaacatatttccccaatccgagcttttccccaaaaactttagttcacagttcctattttgttgatgagttttacttatgaaaagtaaatgtacttatggaaagtataatccacttgaaaactccaactggaagcttatatagaaaattctccagccttataaactatcaggggtcatcggtgaaaatgtccacaggagtgagagaaagcagctgtctcgatttttaaaatgtgaaatctaattttaaatgtgaatggtacatttaaattacaaacatattacatatatacacacatatattccaatgaaacagttcattatgaatatgtaacaaataaatgtatacatatatacaaatcatacatatatatatatatatatatataaatgtatatattatgtaataaatatatgaaaatggaatacataaagatatagtatatctgaatttatacatgcatacttaaatgtatatatgctaaaatatttaataaaatatataaatatatagtagtacatattccccatatagcagatattatatatgtcatatataacactattataggctataaataataaattatatattatatagggtatatatatatatagaattcaatgagttaatatatatacaatgaaaggacctaaaaatgtaatatatattatatatgtaatgtgtagtagattatcatgtgtaatatatgataaataaaatttattatcaacatacaatgcatgtattccaatgaaataaggcatgttcccacggtatatttgggcggtgccatctctgacctaaaataactcgctctgacataatccctgaggaaggatgcctgtaagagcccatggttcccagcatgctcctgcagagccgggctcaccccctgcctccaacagcccttctagacgcaggctccacctttagcctgtggaagaaagagcagccctgggcatcacgtgaccatccccacccctcgcccccctccactgctgattggtccagggatgaacatgcttctgagacaggctaccatctctgcgtgcagtccccgcggaatttacgcactttcgtcttgtgctcttagatgttctccaggtagactgcaaccaacacctttagaataaacccacctgtgcttgggccagcctgagaggtcttcattccttgctgtccagaaaaccttcaaaggctgcagcataaccagcttctaacattgtccactggagcagagactttgggagccgaggtgaagatggcgcaactaccagagggagagctggattctagagtccccacttgcttgcctggaaggagatctgctcagaactgccaggatgtcagaacacggctctgtacgagctcctgagatccagggctgtagttgtgagaatttgtcctaatgcctctagtcttggcctgtgcttcagcttatttgggggaacaaaaccaatctgattgctctcaacatccagttgtcactgattgggttcaaggaaattattttatcttcagaaaacattttgttatttgaagcagctatataagtgagataaatatatttgatacatatgtacagatttatatatatatagcaccaaacatacatatatattatatatatatatttcatataagcgtacatatgccttcc

SEQ ID NO: 459884 - DNA, 2057 bp, Homo sapiens
  misc_feature (6)..(9): n is a, c, g, or t
gtcagnnnnagatggtggctcaaatgtggagaaagtttagtaaagaagctacttgcaaagggtgggggcaggatgttgggaataaagggatgtcattacatcccagggtcatggagtccctaccactcatgtccgaaggggcaggaagaaccctttggtggtgatgctacaccaggattgaaagatgagaggaggagatggggaattctatctgacatctatcagcagcaaactatccagacttcacttgtgaaatatggaccttgtcaactggggtgtcagcatcagtcaggagacggcggtggtcagacagcagctgggcacaggggagcacagagctgtaggcccagggtcaaggcactgagtgatgggccaggattctgcagtgatacaaatgtttttgggctgtttctttctgaattaaaagagccccacatgtctgacggattcaccaggggaagatacaaaggacagggtcgcagggcttgatagagtctgaacaactggactcagccattgacaatgtccagaaacatatttccccaatccgagcttttccccaaaaactttagttcacagttcctattttgttgatgagttttacttatgaaaagtaaatgtacttatggaaagtataatccacttgaaaactccaactggaagcttatatagaaaattctccagccttataaactatcaggggtcatcggtgaaaatgtccacaggagtgagagaaagcagctgtctcgatttttaaaatgtgaaatctaattttaaatgtgaatggtacatttaaattacaaacatattacatatatacacacatatattccaatgaaacagttcattatgaatatgtaacaaataaatgtatacatatatacaaatcatacatatatatatatatatatatataaatgtatatattatgtaataaatatatgaaaatggaatacataaagatatagtatatctgaatttatacatgcatacttaaatgtatatatgctaaaatatttaataaaatatataaatatatagtagtacatattccccatatagcagatattatatatgtcatatataacactattataggctataaataataaattatatattatatagggtatatatatatatagaattcaatgagttaatatatatacaatgaaaggacctaaaaatgtaatatatattatatatgtaatgtgtagtagattatcatgtgtaatatatgataaataaaatttattatcaacatacaatgcatgtattccaatgaaataaggcatgttcccacggtatatttgggcggtgccatctctgacctaaaataactcgctctgacataatccctgaggaaggatgcctgtaagagcccatggttcccagcatgctcctgcagagccgggctcaccccctgcctccaacagcccttctagacgcaggctccacctttagcctgtggaagaaagagcagccctgggcatcacgtgaccatccccacccctcgcccccctccactgctgattggtccagggatgaacatgcttctgagacaggctaccatctctgcgtgcagtccccgcggaatttacgcactttcgtcttgtgctcttagatgttctccagagactttgggagccgaggtgaagatggcgcaactaccagagggagagctggattctagagtccccacttgcttgcctggaaggagatctgctcagaactgccaggatgtcagaacacggctctgtacgagctcctgagatccagggctgtagttgtgagaatttgtcctaatgcctctagtcttggcctgtgcttcagcttatttgggggaacaaaaccaatctgattgctctcaacatccagttgtcactgattgggttcaaggaaattattttatcttcagaaaacattttgttatttgaagcagctatataagtgagataaatatatttgatacatatgtacagatttatatatatatagcaccaaacatacatatatattatatatatatatttcatataagcgtacatatgccttcc

SEQ ID NO: 459885 - DNA, 1463 bp, Homo sapiens
gtcagtaacacgtagttgatcatgggaattgacagtttgggtgcacagatatctgcagtacaggtccaaatgtcaactcttgtaaaagttacacccactctaatacccagtgttggacaaggaagggatatctggctggtgtttggaatgctttatcctgcatattattcatacaaagctgtgaaaacaaaaaacgtgaaggaatatgttcgatggatgatgtactggattgtttttgctctctatactgtgattgaaacagtagccgatcaaacagttgcttggtttcccctgtactatgagctgaagattgcttttgtcatatggctgctttctccctataccaaaggagcaagtttaatatatagaaaattccttcatccacttctttcttcaaaggaaagggagattgatgattatattgtacaagcaaaggaacgaggctatgaaaccatggtaaactttggacggcaaggtttaaaccttgcagctactgctgctgttactgcagcagtaaaggatttctggcttacttctgcacctctacttcaatcaatttgaggtaaccgattattcaaaataaggcatgaaaaagtctgttcttaaaacttggtacttagccagttactaatgtcatttgttgtgtttgcaagccaagttatcaaatgaatgtgttctgtaaaaatttgcattatggttttggatttctttgcatgttgtaatttgtgtgatttattttaaatactttagcataattgattttggtgtgtttggtatggaaagaaaatagccttctgtgttccttagttgcttcatgtataaaatgggggtaatatacctgtgagaatatttaaaagcacagtgcttgcttgcatatagtaggagcccaataaacataaatatcatgtgtctatctccattcaaaattcaagtgaaaatttaagttttttgctattaaattaaattgagattgaatagtattctgctttcaagttagtctgttttagttatcttgaactaaaacaactctatggaaataaatattccagttgagtggtgattttatataactaatagtgaagggatatgaaatgagggcactttcacttttcagagaggtctttgactcaagtatcaaaatgaatgtaatgaacaagaaggaaaattcaaattatatacctaatagcattacattgagggttaaatggaagtttattaactatgcagcactatacatgtaagataactatattattaatgattattaatggtcagcactttaatatagcatagttttcttgttatttggcttttaaaggctttttcttttattaggataggtttataaatgaatacagaaatagcaaagttttcagcttaaaggactatgttttattttagaagttcattttgttttttatttcttgcttagtgaaaatgcattcctgatttccatatctgct

SEQ ID NO: 459886 - DNA, 696 bp, Homo sapiens
ttttcacacataactggtttttaattacatttgacttttcctgatgtctgttcagaatgccggtcccctttggaaggggcaagcacaaaggcagggacaggttggcaagaaggagaagcaaattgagcagagccctacaatccttcctcttttggtggggaaacaggcacagggcaggcttctgcccagagaattgttctcatctgagggtcattgtccacggagattagtctcgcgagcctctggaatcctgatctgtcacagaagcccagagatctgtgctgccgactgtggtggccatggcgtgtgcgtagggggcacctgccgctgcgaggatggctggatgggggcagcctgcgaccagcgggcctgccacccgcgctgtgccgagcatgggacctgccgcgacggcaagtgcgagtgcagccctggctggaatggcgaacactgcaccatcgctcctccaaggctacatgcggaacatagtaggagtatgagaaacatttgtacaatgccaaagaaacaagcgttgcccaagagaaaagatgcctactgccatcatcttcatcctgaagttctgaagagaaagatgcaggaattgatgaagtcctgaatccacctttcataatgcaaagcttgcatcatcttttctaaaagttggtactttaaaatcatgaatttttaaacaactgtact

SEQ ID NO: 459887 - DNA, 595 bp, Homo sapiens
  misc_feature (24)..(24): n is a, c, g, or t
cacacaactcagacgaaaaaaaanttaatgcttaccatttcggcttttcacttgagtgctgtacatgtgtgtccttcaggtactgatgaagcctctacagagctctcttctcagccttgctctgccatttctgctgctactgcagcagtgacactggaatccctgaagcatcaaatcttgaattggaggaaagtacttctttccatattttgtaatatgtcctactaaaggatagcaaagcagagttgtttgctcccatcttagaaacttttaaataaaatttaggtattacttttaaacataggtccacagagaagacaaatctaagtggcaaaaataatgtgtattcagcgtcactattccccaaggatgacaaatgtatgttttttgctgtaatatctcccagttgactccatcttctcttctattgaattttcaaccagagagcttcttagttccttattcaaatacagttttggtagacctaaccagtattatatgtgcctgatctatctaaatctaatcaagtttggtttaaatgaaatcaagtgtactcacagcctctcatacctattccatttttacttttgtacaa

SEQ ID NO: 459888 - DNA, 588 bp, Homo sapiens
cccaacacccataccacaaaaagaaaacccttaaggcttttcacttgagtgctgtacatgtgtgtccttcaggtactgatgaagcctctacagagctctcttctcagccttgctctgccatttctgctgctactgcagcagtgacactggaatccctgaagcatcaaatcttgaattggaggaaagtacttctttccatattttgtaatatgtcctactaaaggatagcaaagcagagttgtttgctcccatcttagaaacttttaaataaaatttaggtattacttttaaacataggtccacagagaagacaaatctaagtggcaaaaataatgtgtattcagcgtcactattccccaaggatgacaaatgtatgttttttgctgtaatatctcccagttgactccatcttctcttctattgaattttcaaccagagagcttcttagttccttattcaaatacagttttggtagacctaaccagtattatatgtgcctgatctatctaaatctaatcaagtttggtttaaatgaaatcaagtgtactcacagcctctcatacctattccatttttacttttgtacaa

SEQ ID NO: 459889 - DNA, 3113 bp, Homo sapiens
agaaagacaaagatcaaagtgccaacacctgatcatggatgataactatgacacttgaatatctgaataattgtataacctgtacttttagtactttacctccttctactgctaattatttcattatttatagagtaagtgtatggcttactctatcacattgtaaactctgtagatctgctctatctatattttctgatgacctctcagccataggaaagttctatgcttggaaatacatcacatcacatcccctgagaaggtttttaaaatgcaaaaatcttcaccctgagattttgattcagtggtttggtgcaaaaaatttgcaaaataaaatgccaagagctttggatttaacccattttatcatcaacctatcatttttactggtgttttccaaagaggaagctgacgctgaaattgtagaaaaacttgcccaagttcacatagctaataagagacagctggtagtgttcaaacccacaggtgtttaattctaatgcctgtatcctggtcaaagaccagtttagtaaaataataggcacaccagagtaaaacttctaaagagcagaggcaaagaaaatatttaaacttagccaaaaagacatattcccttcgaatgagtcatgctaagacaaacagctgaattataaagcagaagaataaaatattgccttccacttattgaaagaagataactatcaagctagaattctatgcacaaaagaaatattcttcaaaaatgaagaagaaacaaaatattttcacatacatgcttgagaaaatttttcaacaacagatttgcctaataaataataataaaggaagttgttcagtcataaataaatcacagatgaaagcaaggaaaaaagggaaatgaatgaagagcaatgggaatgatcagtaagtgctaaatccaaatgaacactgattttataataataggtactgcctaaaatgcattcagaatttaaaatataatgaaaataccacacaacctggggatatatagaattttatgtgttctaatgtcttttggttgtctgacatatggcaaaaagtgctaattatattatactgcttaaataagttaaacatgcatataatattgtaatatccaagatgaacaataaaaaatagtacagtaaatcgatttttaactaaaatttaatagaaagaaaatgggaaaataaaacagaaatacttgattaatccaaaagaagctagtggtaaaaagaagcaaacagcaggtggaaaagaaaaacaatttttaaagtattagagaaaatttagcctagtgattaaaacgtgttattgaccaatttatacttgttttaatcccatctttttcacttcttagtgagtagtaagattatataacaccctaataagtctgttttttccagctgtgtacaacaattgcctaaaaaattagatggctttattgccttgaaggaatactgaacgagaagtttaaacaagtgaattctagccttggtcttactagtgtttaatcgtggccaaaaaaaaaaaaaaaaaagtctttattcactggacatgtcatttagctttggtggtcgttagtatgttgaatttttaaaaataattttaagaagactaactttgcctacttttcagaatttcttttaaaataaatgaaatgaaattacatacataagagaatgctgagaagtgtgtcatgttcaaatgtaaaatgtgtttgacctccttcgtaagtgttgaaatcacttgtcattattggttccctaaaggaggaaacaaataggaaaaaaaaaaaaaaaaaaggactttgtcatcctacaagtattgttcttcagagaggataaattgaagcctttagataaattaactgctaaagtaaagcccttcatgtttaataaacttaatggaaaggaataacttcaacaaatacacaagttattcagtctgttcttgaatagctgtttcttgattcacacacatttggtaaggtattatttagaaaacatcaataaacaaactagctttatcagaactgtaagagtatttacaaaataattttatataaatctattctcaaaagaaagaagggaaggaaggaaggaaggatggagggagggagggacagagggagggagggggaagggagggagggaagaaagaaggaaataaagaaaattaattgttatacatacatttggttttccaaatttaaaatcgcaccaaaagaaaatcctgagcacattcagacagtcattaaatctttgaagaaaatgtttttattagtttaaaaacaaagtgaaaatggactcaggatgttggaacctaagaaggaagaccgcaagtgtttcagaatgttccacaaaaaatagttctgcttacatcattatggaaggaattttgatgagacaggtcatagagggaaaagaaaaaaaggctaatatagccataaagaatgcttttaaatcaagtaatacacttgacttagaaagacaagccagcggcaattataaaataatgacacctaagaatgttttcaagaagtctggttcataatgcattcaaacttaaaaaaatattaaagacaactaaaaaaattttgctcatttttggagcaaaaaaactaccaaagaaggagcagcttgagggaatattaatggattatgagaagaaaatgaaactgaactattttgcgttatcctacaagatgaatgattatagagtacaatagactgactaaccaggagttgaaagccagatcataagatatttgaagagacacagtaacctctcaaaatgaggccaattttcttagatcaggcttttcacttgagtgctgtacatgtgtgtccttcaggtactgatgaagcctctacagagctctcttctcagccttgctctgccatttctgctgctactgcagcagtgacactggaatccctgaagcatcaaatcttgaattggaggtagagtctcaacagttcagataactggacccattccagactgctaagacctacaaccccaaattcttcaccagaccacaagcacagttaatgcaactggtagaatatgttccgggaacatgtgaaataccactttgaagactctca

SEQ ID NO: 459890 - DNA, 3373 bp, Homo sapiens
agaaagacaaagatcaaagtgccaacacctgatcatggatgataactatgacacttgaatatctgaataattgtataacctgtacttttagtactttacctccttctactgctaattatttcattatttatagagtaagtgtatggcttactctatcacattgtaaactctgtagatctgctctatctatattttctgatgacctctcagccataggaaagttctatgcttggaaatacatcacatcacatcccctgagaaggtttttaaaatgcaaaaatcttcaccctgagattttgattcagtggtttggtgcaaaaaatttgcaaaataaaatgccaagagctttggatttaacccattttatcatcaacctatcatttttactggtgttttccaaagaggaagctgacgctgaaattgtagaaaaacttgcccaagttcacatagctaataagagacagctggtagtgttcaaacccacaggtgtttaattctaatgcctgtatcctggtcaaagaccagtttagtaaaataataggcacaccagagtaaaacttctaaagagcagaggcaaagaaaatatttaaacttagccaaaaagacatattcccttcgaatgagtcatgctaagacaaacagctgaattataaagcagaagaataaaatattgccttccacttattgaaagaagataactatcaagctagaattctatgcacaaaagaaatattcttcaaaaatgaagaagaaacaaaatattttcacatacatgcttgagaaaatttttcaacaacagatttgcctaataaataataataaaggaagttgttcagtcataaataaatcacagatgaaagcaaggaaaaaagggaaatgaatgaagagcaatgggaatgatcagtaagtgctaaatccaaatgaacactgattttataataataggtactgcctaaaatgcattcagaatttaaaatataatgaaaataccacacaacctggggatatatagaattttatgtgttctaatgtcttttggttgtctgacatatggcaaaaagtgctaattatattatactgcttaaataagttaaacatgcatataatattgtaatatccaagatgaacaataaaaaatagtacagtaaatcgatttttaactaaaatttaatagaaagaaaatgggaaaataaaacagaaatacttgattaatccaaaagaagctagtggtaaaaagaagcaaacagcaggtggaaaagaaaaacaatttttaaagtattagagaaaatttagcctagtgattaaaacgtgttattgaccaatttatacttgttttaatcccatctttttcacttcttagtgagtagtaagattatataacaccctaataagtctgttttttccagctgtgtacaacaattgcctaaaaaattagatggctttattgccttgaaggaatactgaacgagaagtttaaacaagtgaattctagccttggtcttactagtgtttaatcgtggccaaaaaaaaaaaaaaaaaagtctttattcactggacatgtcatttagctttggtggtcgttagtatgttgaatttttaaaaataattttaagaagactaactttgcctacttttcagaatttcttttaaaataaatgaaatgaaattacatacataagagaatgctgagaagtgtgtcatgttcaaatgtaaaatgtgtttgacctccttcgtaagtgttgaaatcacttgtcattattggttccctaaaggaggaaacaaataggaaaaaaaaaaaaaaaaaaggactttgtcatcctacaagtattgttcttcagagaggataaattgaagcctttagataaattaactgctaaagtaaagcccttcatgtttaataaacttaatggaaaggaataacttcaacaaatacacaagttattcagtctgttcttgaatagctgtttcttgattcacacacatttggtaaggtattatttagaaaacatcaataaacaaactagctttatcagaactgtaagagtatttacaaaataattttatataaatctattctcaaaagaaagaagggaaggaaggaaggaaggatggagggagggagggacagagggagggagggggaagggagggagggaagaaagaaggaaataaagaaaattaattgttatacatacatttggttttccaaatttaaaatcgcaccaaaagaaaatcctgagcacattcagacagtcattaaatctttgaagaaaatgtttttattagtttaaaaacaaagtgaaaatggactcaggatgttggaacctaagaaggaagaccgcaagtgtttcagaatgttccacaaaaaatagttctgcttacatcattatggaaggaattttgatgagacaggtcatagagggaaaagaaaaaaaggctaatatagccataaagaatgcttttaaatcaagtaatacacttgacttagaaagacaagccagcggcaattataaaataatgacacctaagaatgttttcaagaagtctggttcataatgcattcaaacttaaaaaaatattaaagacaactaaaaaaattttgctcatttttggagcaaaaaaactaccaaagaaggagcagcttgagggaatattaatggattatgagaagaaaatgaaactgaactattttgcgttatcctacaagatgaatgattatagagtacaatagactgactaaccaggagttgaaagccagatcataagatatttgaagagacacagtaacctctcaaaatgaggccaattttcttagatcaggcttttcacttgagtgctgtacatgtgtgtccttcaggtactgatgaagcctctacagagctctcttctcagccttgctctgccatttctgctgctactgcagcagtgacactggaatccctgaagcatcaaatcttgaattggaggaaagtacttctttccatattttgtaatatgtcctactaaaggatagcaaagcagagttgtttgctcccatcttagaaacttttaaataaaatttaggtattacttttaaacataggtccacagagaagacaaatctaagtggcaaaaataatgtgtattcagcgtcactattccccaaggatgacaaatgtatgttttttgctgtaatatctcccagttgactccatcttctcttctattgaattttcaaccagagagcttcttagttccttattcaaatacagttttggtagacctaaccagtattatatgtgcctgatctatctaaatctaatcaagtttggtttaaatgaaatcaagtgtactcacagcctctcatacctattccatttttacttttgtacaa

SEQ ID NO: 459891 - DNA, 1591 bp, Homo sapiens
caagacagcttaagtggagcttaagtggacaagatccagggaaatgcctcacaaaacatgtgaagaatctgatggaaagcttattgaagacagcctgattcagctgagatgtcactttacatggaagttgttaattgaagcccctgaaattcctgatttagaaaacaggatctgggaagagattcagttcctggacaccaaatacaatgtgggaatacacaacctactagcctatgtgaaacacctgaaaggccagaatgaggaagccctggtcagcttgaaaaaggctgaagacttaattcagaaagaacatgccaaccaagcagatattagaagtctggtgacctggggcaactttgcctgggtgtattaccacatgggcagattggcagaagcccagacttacctggacaaggtggagaacacttgcaagaagtttgcaaatccttcccgctatagaatggagtgtccagaggtggactgtgaggaaggatgggccttggcgaagtgtggaggaaagaattatgaacgggccaagacctgctttgaaaaggctctggaagggaaccctgaaaaccctgaattcaatactgggtacgcaatcaccgtctatcgcctggataaatttaacacagcatcagggaggaataaggcattttctctgcacgtcctaaaacgagctgtcaggctaaatccagatgatgtatatattagggttctccttgccctgaagcttcaggatgaaggacaggaagctgaaggagaaaagtacattgaagaagctctgaccagtatatcttcacaggcctatgtctttcaatatgcagccaagttttatcgaagaaaagggtctgtggataaagctcttgagctcttaaaaatggccttggagacaacacccacttctgccttcctgcatcaccaaatggggctttgctacagggcacaaatgatccaaatcaaggaagctacaaactggcagcctagagggcaagatagggaaactgtggacagattggttcaattggctatatgcaaatttgaaaagactataatgttaaagcgaacatttgagatggcctatgttgacctggctgaaacgtatgcagaaataggccaccacagaaaggctgaggaacattttcagaaagggttacgcatgaagatctttgaagatcagctaaagcaagagattcattaccactacggccgtttccaagaacatcatgggaaatctcaagataaagcaattacccattatttaaaaggtttgaaaatagaaaaaatgtcccattccagggaaaaacttctcaatgctttagagaaattggctaaaagatgtattcaccagaatgtacgggttgtggaaagtgtcagcctccttgggcttatccacaaattgaaaggagaatcattaggtgtctgtatttcctgagtggttaccctcaagctttgtgctcaaataaactctatacttaatcatagtttctgaattccattatttgagattgagacaacagtctttcccaattgctgccttcaaaaatgtatagtctgatgaaatacaaaatacttcggtataacacatact

SEQ ID NO: 459892 - DNA, 588 bp, Homo sapiens
catttcctcctgtctggttaagatgcccagctcagtgccaaagagcatatcctggatgacagcaagacagttttgtttctgtctcaaaggactgatttacctgccccccatgttcatgccaagttttcctttggcatgtatatgcctggggttccatggctcagaccgaaaggctcctactgagctttctgagagccctgaaaaaggttggcaatttccaagagatccagccatgtacagagtagcagtggggtcaaggaagaggcagcttcttcaggactctcaagctccagcaggattcttgatccatctaccaaagaagcagggaggggtgaaaggtgttgaggagatgaaatgccaggggtttacagtcagggctctcacaccaggtttcaattcacagctgcaggtaagacactgttctggggctcccagaatccctcagatcttccaagagagatgaaaacctccatccccaaaaagagaaaactctctattttcaagtggactgttcctatcaagagaattctatgaaatgttaatttttttaaacttataatattgattcttttctgtataaagaaaatg

SEQ ID NO: 459893 - DNA, 1464 bp, Homo sapiens
agcaggaaccaggaagtgacagtgtgcccagcctctcacctgaccctggacagggatataaagagcccgggctcagggggctccacacctgcacctccctctcacctgctcctctacctgctccaccctcaatccaccagaaccatgggctgctgtggctgctccggaggctgtggctccggctgtggaggccttggctccggctgtgggggctgtggctccggctgtggaggccgtggctccggctgtgggggctgtggctccggctgtggaggctgtggctccggctgtgggggctgtggctccggctgtgggggctgtgggggatgtggctccggctgctgtgtgcctgtctgctgctgcaagcccatgtgctgctgtgtgccagcttgttcctgctccagctgtggcaaagggggctgtggctcttgcgggggctccaagagaggctgtgtctcctgtggggtgtccaagggggcctgtggctcctgtggggggtccaaggggggctgtggctcctgtggggggtccaaggggggctgtggctcctgtggggggtccaaggggggctgtggttcttatggctgctcccagtgcagctgctgtaagccctgctgctgctcctcaggctgtgggtcatcctgctgccagtccagctgctgtaagccttactgctgccagtccagctgctgtaagccctgtagctgcttctcaggctgtggatcatcctgctgccaatccagctgctacaagccctgctgctgccagtccagctgctgtgtccccgtgtgctgccagtgtaagatctgaggctctgactgcagactgcaggtggcctgactggtgaagggcccgtctgcccagcttccttgccctgggttctctggtgctccactgtctccactgtgtcctcactggcttcatccactccacaccagtgcttccgaaactgactgaggaccccttctggctcattgcctactacttctcctgaacttcctctccctgctcctcactcatttaagatccaaagcggcccactgaggccccagaggcagatcagaccccttagaccctgacagctgctccttctttcaggagtgtgatcgaccctcaatctctctggctgtctgtatatcaagactgaatcctgaccctctaaataaacaaagtctctaagcacaaagctcactgtcttgtggttctctccttcccacctctctctcattcccagaagcaccatcttcttgcctccacccctgggcctgttcccatttctctcccctcagcatctttcatgtcatggtccatgtcttcatgcacagaactaacgtctatagctttctgctctgggccccttgttgtgttgggctccagagatgacagagcagagtaaatccaagctcacagtctgggatgtgctttatactattataaggagcaaagggtcagagtgaggacagg

SEQ ID NO: 459894 - DNA, 680 bp, Homo sapiens
gctggggcctccgggcagacggggaagaggtgcagggaggccgatgccctcccataagtgttcgtggtggaggagctggcctggcttcaggtggggatgcatcacactgccctcaggaccattggcctatgcacgcactgcaggagaagagacatcccagctccccaagaaaggaggcctggtgtgggtgccttcctccctcgccagcacccatcgttggccatctattcagaagagcctgtgctgcccactccttcccctagagatcttcccgtgtccctggcttgcagctttggcctcccagggtcctcccacgtgtggactgacagacatgcagagccctcctgggtcatcccagagagagcagatgacctaccagagtgctggggatgccgtgtccaacacaatagcaaggaagctgctttcgtggaagtggtgttctcatgaagatgggaaaaacacataagacatttctgatgacaatcaaagctctatggaaaagaggctgggcacggtggctcatgcctgtaatcccaacaatttgggaggctgaggatgaacataacatcagccaatgccaagaaccaaaaccttcttggattagattcaaaataaactacaggcaacgcagctttttttcttttttctttttttttttttaattttggagttgtgctgtt

SEQ ID NO: 459895 - DNA, 678 bp, Homo sapiens
gctggggcctccgggcagacggggaagaggtgcagggaggccgatgccctcccataagtgttcgtggtggaggagctggcctggcttcaggtggggatgcatcacactgccctcaggaccattggcctatgcacgcactgcaggagaagagacatcccagctccccaagaaaggaggcctggtgtgggtgccttcctccctcgccagcacccatcgttggccatctattcagaagagcctgtgctgcccactccttcccctagagatcttcccgtgtccctggcttgcagctttggcctcccagggtcctcccacgtgtggactgacagacatgcagagccctcctgggtcatcccagagagagcagatgacctaccagagtgctggggatgccgtgtccaacacaatagcaaggaagctgctttcgtggaagtggtgttctcatgaagatgggaaaaacacataagacatttctgatgacaatcaaagctctatggaaaagaggctgggcacggtggctcatgcctgtaatcccaacaatttgggaggctgaggatgaacataacatcagccaatgccaagaaccaaaaccttcttggattagattcaaaataaacaaggatgcggccgaaccccctgttgcacacaagcaccaaatgcgcacaaaaacaaaaaaca

SEQ ID NO: 459896 - DNA, 3161 bp, Homo sapiens
  misc_feature (12)..(12): n is a, c, g, or t
  misc_feature (18)..(18): n is a, c, g, or t
gcccaattgccnactccntcgggacaatcaaccaacacccctttcaagtttgggggtggtgctgtcccggggccacggagaatacatccttctggggaacacgtctgtggaagaaggcctgcatgacttgcttcacccagacctggccctggccggtgactggatctactgcatcacagatattgacccagaccaccggaagctcagccagctagaggccatgatccgcttcctcaccaggaaggacccagacctggagtgtgacgaggagctggtccgggaggtgctgtttgacgcggtggtgacagcccccatggaagcctactggacagcgctggccctcaacatgtccgaggagtctgaacacgtggtggacatggccttcctgggcacccgggctggcctcctgagaagcagcttgttcgtgggctccgagaaggtctccgacaggaagttcctgacacctgaggacgaggccagcgtgttcaccctggaccgcttcccgctgtggtaccgccaggcctcagagcatcctgctggcagcttcgtcttcaacctccgctgggcagaaggaccagaaagtgcgggtgaacccatggtggtgacggcaagcacagctgtggcggtgaccgtggacaagaggacagccattgctgcagccgcgggcgtccaaatgaagctggaattcctccagcgcaaattctgggcggcaacgcggcagtgcagcactgtggatgggccgtgcacacagagctgcgaggacagtgatctggactgcttcgtcatcgacaacaacgggttcattctgatctccaagaggtcccgagagagtgactatgtatgactatcaggccatgtgcaaaccctcgagtcaccaccacagtgcagcccagcccctggtcagcccaatttctgccttcttgacggcgaccaggtggctgctgcaggagctggtgctgttcctgctggagtggagtgtctggggctcctggtacgacagaggggccgaggccaaaagtgtcttccatcactcccacaaacacaagaagcaggacccgctgcagccctgcgacacggagtaccccgtgttcgtgtaccagccggccatccgggaggccaacgggatcgtggagtgcgggccctgccagaaggtatttgtggtgcagcagattcccaacagtaacctcctcctcctggtgacagaccccacctgtgactgcagcatcttcccaccagtgctgcaggaggcgacagaagtcaaatataatgcctctgtcaaatgtgaccggatgcgctcccagaagctccgccggcgaccagactcctgccacgccttccatccagaggagaatgcccaggactgcggcggcgcctcggacacctcagcctcgccgcccctactcctgctgcctgtgtgtgcctgggggctactgccccaactcctgcggtgacaccacccagcctgacctgtgttttggcaaggtgatccttccagagccatcccacaaagtcagcactgacatgggatgcagctaactgcagttgggtcgcccccaggccaacgctcctctcaatcctgggctggtggcccctggctccggagaatgctggatggaacaggaaaccaatcacctggcaccactttcaagatgcttcatggtgcccggtaccatctgccctaggtctcaacatgagcatacttctgacctaaccttcctgtctcctcttcgggaagccagcgtgagctcagcttggaccaagacaaaataatttagttcttcctgtactccagagtccagacccagccaagaaagggtcagttgtttctgaccctttctgtcggagtggtctctggtagaacccaaggacttctgggtactgagaagcagcagcagaatgaggccaaatgcagagatgaggctaaggcaagaatatgccccaactaaagcatagattccccaaagtgaggctcatggtgggaggccactcaccttcctagctgctgctcgaaaaggttttgactgtgttggggtgggggttgggtaagggaatggtcaagactgagaaaggaatgaaatccattcaggaaatatcgacagggctacacgtgatgtccccaaactgctgctattgaagaacttcccaaaacttctttacaaagccctaaaggaaagtttgcatctatgaaaagccaataggctgagacatccaattgctgcatggaaattgatgtacattcaggggacggcaaaaatagctgtaaaatagtgaaaaagagcagtggttgtgctcttttctggccaatgatttacaaaagaatctacttgactctgtccctggagtgaaatccttagggttggaacttgtgggaacattccaacttgctaagcagggtccactgggagggaagctctatctgggaactcacccccagcgcacacacatctcccccagggtcccaaggccccgcagcttcctcccccgaccaaaccccaagacctggatcccaggagacaacagtctccacagtgagagcaacattaagggcaaagccatggagaaatgtgggagaggccggcctcaaatctttccatttaacaaaccccagtgatgggtatggacagcatgcagggcttttggggcgcttcccccgctcctccatcaccctcagcctccacacttcaaagttcaagttcaaagctgttcaagtttcctaccagcaaatagccctaacttgcctctagagtaggccaaatgccaactctgtaaaacacacttacattataggttacagaatgtcactcttaccgtcatgtcttgcaacaaccctgtgaggacagtattaatgcccccttacagcagaagacactgcagctcggagaagacagcttaagtggcagaataatgctagaacagctaaggtttacatgtaccaaataacatgtttcagctcattccatcctcacaacagccccctgaaagtgggtactatcattagtcccatgttatagaaactgcagcagagttgaaaattgcctccaaattaccggaagagtgtatgaagattgaatgtgatgtattcacgtaacatgcttgaaactgcctggcatatactaaacgctaaataaatacatgctaactgcgatcattaaaataccttg

SEQ ID NO: 459897 - DNA, 3246 bp, Homo sapiens
tctgccctcgttgttttctggaatgggagcctcatcactgctgggcattttctgtcgctcttcttccagtgggaacgagagaggctgccgtctctgttcttcccccacccctcccactccccagaaaccccagtttgcactctgccctctgactcagtcctcccatccgctgcggtctctctcctcagttcctgcggaagcacctcctctctttaacttgactctatttttttctctccccgtctcttccctggccttgccctctctctttctgccctgtagccgcgggcgtccaaatgaagctggaattcctccagcgcaaattctgggcggcaacgcggcagtgcagcactgtggatgggccgtgcacacagagctgcgaggacagtgatctggactgcttcgtcatcgacaacaacgggttcattctgatctccaagaggtcccgagagacgggaagatttctgggggaggtggatggtgctgtcctgacccagctgctcagcatgggggtgttcagccaagtgactatgtatgactatcaggccatgtgcaaaccctcgagtcaccaccacagtgcagcccagcccctggtcagcccaatttctgccttcttgacggcgaccaggtggctgctgcaggagctggtgctgtgagtgggggtagacacggggctggtggagggctgcatgcgagggtggcttaggagggtgtccttgagcaggaggctgcaaggtctccaggacaacccacttgctaccagaccccggggaaggagggcacaatccctgggcatggacgccacctcttccctgcatgctgcccctgggagggacctcattgctcaaccagagccctcaagcagggaagagggtgtcctggaggagaggggatgggccgggggctgtcagggatactccagctccttgggaacccaagtcgggagggctcagaggtctccgagattcagtcctgtgtctgacaggttcctgctggagtggagtgtctggggctcctggtacgacagaggggccgagggtgagtgcacggagctgcagggccatgtgctgaagagcagtggcattttggtgaccctgaagcatcgttgttcacatctcaccctgcgtggccttctctcatcacatccctcactcctggctctgtgtgtgacatcatcttgggacaccgccactccatgtgccatcatcaccaccccatgacatcctgccctcatgtgccaccatgttttcctgtgccgtgtccaccctgtgctgggcttatgttccggccagccaaaagtgtcttccatcactcccacaaacacaagaagcaggacccgctgcagccctgcgacacggagtaccccgtgttcgtgtaccagccggccatccgggaggccaacgggatcgtggagtgcgggccctgccagaagagaatgcccaggactgcggcggcgcctcggacacctcagcctcgccgcccctactcctgctgcctgtgtgtgcctgggggctactgccccaactcctgcggtgacaccacccagcctgacctgtgttttggcaaggtgatccttccagagccatcccacaaagtcagcactgacatgggatgcagctaactgcagttgggtcgcccccaggccaacgctcctctcaatcctgggctggtggcccctggctccggagaatgctggatggaacaggaaaccaatcacctggcaccactttcaagatgcttcatggtgcccggtaccatctgccctaggtctcaacatgagcatacttctgacctaaccttcctgtctcctcttcgggaagccagcgtgagctcagcttggaccaagacaaaataatttagttcttcctgtactccagagtccagacccagccaagaaagggtcagttgtttctgaccctttctgtcggagtggtctctggtagaacccaaggacttctgggtactgagaagcagcagcagaatgaggccaaatgcagagatgaggctaaggcaagaatatgccccaactaaagcatagattccccaaagtgaggctcatggtgggaggccactcaccttcctagctgctgctcgaaaaggttttgactgtgttggggtgggggttgggtaagggaatggtcaagactgagaaaggaatgaaatccattcaggaaatatcgacagggctacacgtgatgtccccaaactgctgctattgaagaacttcccaaaacttctttacaaagccctaaaggaaagtttgcatctatgaaaagccaataggctgagacatccaattgctgcatggaaattgatgtacattcaggggacggcaaaaatagctgtaaaatagtgaaaaagagcagtggttgtgctcttttctggccaatgatttacaaaagaatctacttgactctgtccctggagtgaaatccttagggttggaacttgtgggaacattccaacttgctaagcagggtccactgggagggaagctctatctgggaactcacccccagcgcacacacatctcccccagggtcccaaggccccgcagcttcctcccccgaccaaaccccaagacctggatcccaggagacaacagtctccacagtgagagcaacattaagggcaaagccatggagaaatgtgggagaggccggcctcaaatctttccatttaacaaaccccagtgatgggtatggacagcatgcagggcttttggggcgcttcccccgctcctccatcaccctcagcctccacacttcaaagttcaagttcaaagctgttcaagtttcctaccagcaaatagccctaacttgcctctagagtaggccaaatgccaactctgtaaaacacacttacattataggttacagaatgtcactcttaccgtcatgtcttgcaacaaccctgtgaggacagtattaatgcccccttacagcagaagacactgcagctcggagaagacagcttaagtggcagaataatgctagaacagctaaggtttacatgtaccaaataacatgtttcagctcattccatcctcacaacagccccctgaaagtgggtactatcattagtcccatgttatagaaactgcagcagagttgaaaattgcctccaaattaccggaagagtgtatgaagattgaatgtgatgtattcacgtaacatgcttgaaactgcctggcatatactaaacgctaaataaatacatgctaactgcgatcattaaaataccttg

SEQ ID NO: 459898 - DNA, 3532 bp, Homo sapiens
tctgccctcgttgttttctggaatgggagcctcatcactgctgggcattttctgtcgctcttcttccagtgggaacgagagaggctgccgtctctgttcttcccccacccctcccactccccagaaaccccagtttgcactctgccctctgactcagtcctcccatccgctgcggtctctctcctcagttcctgcggaagcacctcctctctttaacttgactctatttttttctctccccgtctcttccctggccttgccctctctctttctgccctgtagccgcgggcgtccaaatgaagctggaattcctccagcgcaaattctgggcggcaacgcggcagtgcagcactgtggatgggccgtgcacacagagctgcgaggacagtgatctggactgcttcgtcatcgacaacaacgggttcattctgatctccaagaggtcccgagagacgggaagatttctgggggaggtggatggtgctgtcctgacccagctgctcagcatgggggtgttcagccaagtgactatgtatgactatcaggccatgtgcaaaccctcgagtcaccaccacagtgcagcccagcccctggtcagcccaatttctgccttcttgacggcgaccaggtggctgctgcaggagctggtgctgtgagtgggggtagacacggggctggtggagggctgcatgcgagggtggcttaggagggtgtccttgagcaggaggctgcaaggtctccaggacaacccacttgctaccagaccccggggaaggagggcacaatccctgggcatggacgccacctcttccctgcatgctgcccctgggagggacctcattgctcaaccagagccctcaagcagggaagagggtgtcctggaggagaggggatgggccgggggctgtcagggatactccagctccttgggaacccaagtcgggagggctcagaggtctccgagattcagtcctgtgtctgacaggttcctgctggagtggagtgtctggggctcctggtacgacagaggggccgagggtgagtgcacggagctgcagggccatgtgctgaagagcagtggcattttggtgaccctgaagcatcgttgttcacatctcaccctgcgtggccttctctcatcacatccctcactcctggctctgtgtgtgacatcatcttgggacaccgccactccatgtgccatcatcaccaccccatgacatcctgccctcatgtgccaccatgttttcctgtgccgtgtccaccctgtgctgggcttatgttccggccagccaaaagtgtcttccatcactcccacaaacacaagaagcaggacccgctgcagccctgcgacacggagtaccccgtgttcgtgtaccagccggccatccgggaggccaacgggatcgtggagtgcgggccctgccagaaggtatttgtggtgcagcagattcccaacagtaacctcctcctcctggtgacagaccccacctgtgactgcagcatcttcccaccagtgctgcaggaggcgacagaagtcaaatataatgcctctgtcaaatgtgaccggatgcgctcccagaagctccgccggcgaccagactcctgccacgccttccatccagaggtgcgggttgaggcggatcgagggtgggctggattttcatccccaaaccctctgtgcctgggtctgtgcccctctgctctgcgttcgcaggagaatgcccaggactgcggcggcgcctcggacacctcagcctcgccgcccctactcctgctgcctgtgtgtgcctgggggctactgccccaactcctgcggtgacaccacccagcctgacctgtgttttggcaaggtgatccttccagagccatcccacaaagtcagcactgacatgggatgcagctaactgcagttgggtcgcccccaggccaacgctcctctcaatcctgggctggtggcccctggctccggagaatgctggatggaacaggaaaccaatcacctggcaccactttcaagatgcttcatggtgcccggtaccatctgccctaggtctcaacatgagcatacttctgacctaaccttcctgtctcctcttcgggaagccagcgtgagctcagcttggaccaagacaaaataatttagttcttcctgtactccagagtccagacccagccaagaaagggtcagttgtttctgaccctttctgtcggagtggtctctggtagaacccaaggacttctgggtactgagaagcagcagcagaatgaggccaaatgcagagatgaggctaaggcaagaatatgccccaactaaagcatagattccccaaagtgaggctcatggtgggaggccactcaccttcctagctgctgctcgaaaaggttttgactgtgttggggtgggggttgggtaagggaatggtcaagactgagaaaggaatgaaatccattcaggaaatatcgacagggctacacgtgatgtccccaaactgctgctattgaagaacttcccaaaacttctttacaaagccctaaaggaaagtttgcatctatgaaaagccaataggctgagacatccaattgctgcatggaaattgatgtacattcaggggacggcaaaaatagctgtaaaatagtgaaaaagagcagtggttgtgctcttttctggccaatgatttacaaaagaatctacttgactctgtccctggagtgaaatccttagggttggaacttgtgggaacattccaacttgctaagcagggtccactgggagggaagctctatctgggaactcacccccagcgcacacacatctcccccagggtcccaaggccccgcagcttcctcccccgaccaaaccccaagacctggatcccaggagacaacagtctccacagtgagagcaacattaagggcaaagccatggagaaatgtgggagaggccggcctcaaatctttccatttaacaaaccccagtgatgggtatggacagcatgcagggcttttggggcgcttcccccgctcctccatcaccctcagcctccacacttcaaagttcaagttcaaagctgttcaagtttcctaccagcaaatagccctaacttgcctctagagtaggccaaatgccaactctgtaaaacacacttacattataggttacagaatgtcactcttaccgtcatgtcttgcaacaaccctgtgaggacagtattaatgcccccttacagcagaagacactgcagctcggagaagacagcttaagtggcagaataatgctagaacagctaaggtttacatgtaccaaataacatgtttcagctcattccatcctcacaacagccccctgaaagtgggtactatcattagtcccatgttatagaaactgcagcagagttgaaaattgcctccaaattaccggaagagtgtatgaagattgaatgtgatgtattcacgtaacatgcttgaaactgcctggcatatactaaacgctaaataaatacatgctaactgcgatcattaaaataccttg

SEQ ID NO: 459899 - DNA, 2784 bp, Homo sapiens
tctgccctcgttgttttctggaatgggagcctcatcactgctgggcattttctgtcgctcttcttccagtgggaacgagagaggctgccgtctctgttcttcccccacccctcccactccccagaaaccccagtttgcactctgccctctgactcagtcctcccatccgctgcggtctctctcctcagttcctgcggaagcacctcctctctttaacttgactctatttttttctctccccgtctcttccctggccttgccctctctctttctgccctgtagccgcgggcgtccaaatgaagctggaattcctccagcgcaaattctgggcggcaacgcggcagtgcagcactgtggatgggccgtgcacacagagctgcgaggacagtgatctggactgcttcgtcatcgacaacaacgggttcattctgatctccaagaggtcccgagagagtgactatgtatgactatcaggccatgtgcaaaccctcgagtcaccaccacagtgcagcccagcccctggtcagcccaatttctgccttcttgacggcgaccaggtggctgctgcaggagctggtgctgttcctgctggagtggagtgtctggggctcctggtacgacagaggggccgaggccaaaagtgtcttccatcactcccacaaacacaagaagcaggacccgctgcagccctgcgacacggagtaccccgtgttcgtgtaccagccggccatccgggaggccaacgggatcgtggagtgcgggccctgccagaaggtatttgtggtgcagcagattcccaacagtaacctcctcctcctggtgacagaccccacctgtgactgcagcatcttcccaccagtgctgcaggaggcgacagaagtcaaatataatgcctctgtcaaatgtgaccggatgcgctcccagaagctccgccggcgaccagactcctgccacgccttccatccagaggagaatgcccaggactgcggcggcgcctcggacacctcagcctcgccgcccctactcctgctgcctgtgtgtgcctgggggctactgccccaactcctgcggtgacaccacccagcctgacctgtgttttggcaaggtgatccttccagagccatcccacaaagtcagcactgacatgggatgcagctaactgcagttgggtcgcccccaggccaacgctcctctcaatcctgggctggtggcccctggctccggagaatgctggatggaacaggaaaccaatcacctggcaccactttcaagatgcttcatggtgcccggtaccatctgccctaggtctcaacatgagcatacttctgacctaaccttcctgtctcctcttcgggaagccagcgtgagctcagcttggaccaagacaaaataatttagttcttcctgtactccagagtccagacccagccaagaaagggtcagttgtttctgaccctttctgtcggagtggtctctggtagaacccaaggacttctgggtactgagaagcagcagcagaatgaggccaaatgcagagatgaggctaaggcaagaatatgccccaactaaagcatagattccccaaagtgaggctcatggtgggaggccactcaccttcctagctgctgctcgaaaaggttttgactgtgttggggtgggggttgggtaagggaatggtcaagactgagaaaggaatgaaatccattcaggaaatatcgacagggctacacgtgatgtccccaaactgctgctattgaagaacttcccaaaacttctttacaaagccctaaaggaaagtttgcatctatgaaaagccaataggctgagacatccaattgctgcatggaaattgatgtacattcaggggacggcaaaaatagctgtaaaatagtgaaaaagagcagtggttgtgctcttttctggccaatgatttacaaaagaatctacttgactctgtccctggagtgaaatccttagggttggaacttgtgggaacattccaacttgctaagcagggtccactgggagggaagctctatctgggaactcacccccagcgcacacacatctcccccagggtcccaaggccccgcagcttcctcccccgaccaaaccccaagacctggatcccaggagacaacagtctccacagtgagagcaacattaagggcaaagccatggagaaatgtgggagaggccggcctcaaatctttccatttaacaaaccccagtgatgggtatggacagcatgcagggcttttggggcgcttcccccgctcctccatcaccctcagcctccacacttcaaagttcaagttcaaagctgttcaagtttcctaccagcaaatagccctaacttgcctctagagtaggccaaatgccaactctgtaaaacacacttacattataggttacagaatgtcactcttaccgtcatgtcttgcaacaaccctgtgaggacagtattaatgcccccttacagcagaagacactgcagctcggagaagacagcttaagtggcagaataatgctagaacagctaaggtttacatgtaccaaataacatgtttcagctcattccatcctcacaacagccccctgaaagtgggtactatcattagtcccatgttatagaaactgcagcagagttgaaaattgcctccaaattaccggaagagtgtatgaagattgaatgtgatgtattcacgtaacatgcttgaaactgcctggcatatactaaacgctaaataaatacatgctaactgcgatcattaaaataccttg

SEQ ID NO: 459900 - DNA, 2810 bp, Homo sapiens
tctgccctcgttgttttctggaatgggagcctcatcactgctgggcattttctgtcgctcttcttccagtgggaacgagagaggctgccgtctctgttcttcccccacccctcccactccccagaaaccccagtttgcactctgccctctgactcagtcctcccatccgctgcggtctctctcctcagttcctgcggaagcacctcctctctttaacttgactctatttttttctctccccgtctcttccctggccttgccctctctctttctgccctgtagccgcgggcgtccaaatgaagctggaattcctccagcgcaaattctgggcggcaacgcggcaggatctggactgcttcgtcatcgacaacaacgggttcattctgatctccaagaggtcccgagagacgggaagatttctgggggaggtggatggtgctgtcctgacccagctgctcagcatgggggtgttcagccaagtgactatgtatgactatcaggccatgtgcaaaccctcgagtcaccaccacagtgcagcccagcccctggtcagcccaatttctgccttcttgacggcgaccaggtggctgctgcaggagctggtgctgttcctgctggagtggagtgtctggggctcctggtacgacagaggggccgaggccaaaagtgtcttccatcactcccacaaacacaagaagcaggacccgctgcagccctgcgacacggagtaccccgtgttcgtgtaccagccggccatccgggaggccaacgggatcgtggagtgcgggccctgccagaaggtatttgtggtgcagcagattcccaacagtaacctcctcctcctggtgacagaccccacctgtgactgcagcatcttcccaccagtgctgcaggaggcgacagaagtcaaatataatgcctctgtcaaatgtgaccggatgcgctcccagaagctccgccggcgaccagactcctgccacgccttccatccagaggagaatgcccaggactgcggcggcgcctcggacacctcagcctcgccgcccctactcctgctgcctgtgtgtgcctgggggctactgccccaactcctgcggtgacaccacccagcctgacctgtgttttggcaaggtgatccttccagagccatcccacaaagtcagcactgacatgggatgcagctaactgcagttgggtcgcccccaggccaacgctcctctcaatcctgggctggtggcccctggctccggagaatgctggatggaacaggaaaccaatcacctggcaccactttcaagatgcttcatggtgcccggtaccatctgccctaggtctcaacatgagcatacttctgacctaaccttcctgtctcctcttcgggaagccagcgtgagctcagcttggaccaagacaaaataatttagttcttcctgtactccagagtccagacccagccaagaaagggtcagttgtttctgaccctttctgtcggagtggtctctggtagaacccaaggacttctgggtactgagaagcagcagcagaatgaggccaaatgcagagatgaggctaaggcaagaatatgccccaactaaagcatagattccccaaagtgaggctcatggtgggaggccactcaccttcctagctgctgctcgaaaaggttttgactgtgttggggtgggggttgggtaagggaatggtcaagactgagaaaggaatgaaatccattcaggaaatatcgacagggctacacgtgatgtccccaaactgctgctattgaagaacttcccaaaacttctttacaaagccctaaaggaaagtttgcatctatgaaaagccaataggctgagacatccaattgctgcatggaaattgatgtacattcaggggacggcaaaaatagctgtaaaatagtgaaaaagagcagtggttgtgctcttttctggccaatgatttacaaaagaatctacttgactctgtccctggagtgaaatccttagggttggaacttgtgggaacattccaacttgctaagcagggtccactgggagggaagctctatctgggaactcacccccagcgcacacacatctcccccagggtcccaaggccccgcagcttcctcccccgaccaaaccccaagacctggatcccaggagacaacagtctccacagtgagagcaacattaagggcaaagccatggagaaatgtgggagaggccggcctcaaatctttccatttaacaaaccccagtgatgggtatggacagcatgcagggcttttggggcgcttcccccgctcctccatcaccctcagcctccacacttcaaagttcaagttcaaagctgttcaagtttcctaccagcaaatagccctaacttgcctctagagtaggccaaatgccaactctgtaaaacacacttacattataggttacagaatgtcactcttaccgtcatgtcttgcaacaaccctgtgaggacagtattaatgcccccttacagcagaagacactgcagctcggagaagacagcttaagtggcagaataatgctagaacagctaaggtttacatgtaccaaataacatgtttcagctcattccatcctcacaacagccccctgaaagtgggtactatcattagtcccatgttatagaaactgcagcagagttgaaaattgcctccaaattaccggaagagtgtatgaagattgaatgtgatgtattcacgtaacatgcttgaaactgcctggcatatactaaacgctaaataaatacatgctaactgcgatcattaaaataccttg

SEQ ID NO: 459901 - DNA, 1050 bp, Homo sapiens
  misc_feature (12)..(12): n is a, c, g, or t
  misc_feature (18)..(18): n is a, c, g, or t
gcccaattgccnactccntcgggacaatcaaccaacacccctttcaagtttgggggtggtgctgtcccggggccacggagaatacatccttctggggaacacgtctgtggaagaaggcctgcatgacttgcttcacccagacctggccctggccggtgactggatctactgcatcacagatattgacccagaccaccggaagctcagccagctagaggccatgatccgcttcctcaccaggaaggacccagacctggagtgtgacgaggagctggtccgggaggtgctgtttgacgcggtggtgacagcccccatggaagcctactggacagcgctggccctcaacatgtccgaggagtctgaacacgtggtggacatggccttcctgggcacccgggctggcctcctgagaagcagcttgttcgtgggctccgagaaggtctccgacaggaagttcctgacacctgaggacgaggccagcgtgttcaccctggaccgcttcccgctgtggtaccgccaggcctcagagcatcctgctggcagcttcgtcttcaacctccgctgggcagaaggaccagaaagtgcgggtgaacccatggtggtgacggcaagcacagctgtggcggtgaccgtggacaagaggacagccattgctgcagccgcgggcgtccaaatgaagctggaattcctccagcgcaaattctgggcggcaacgcggcagtgcagcactgtggatgggccgtgcacacagagctgcgaggacagtgatctggactgcttcgtcatcgacaacaacgggttcattctgatctccaagaggtcccgagagccaggaatcaaactgagaaagaagcccattcaaacctgaagcaaatccagatatattcaccagatgtatttccttgaagcaaggcagaagcatcagaaccgcctcctgcctgagcctcggggaaaggggcatagtatttggttctgtgtgagctttgctactaattagaaacgtgatgtgggcaagcgaaaaacataaaaaaaaactgagactagtctccc

SEQ ID NO: 459902 - DNA, 3442 bp, Homo sapiens
tctgccctcgttgttttctggaatgggagcctcatcactgctgggcattttctgtcgctcttcttccagtgggaacgagagaggctgccgtctctgttcttcccccacccctcccactccccagaaaccccagtttgcactctgccctctgactcagtcctcccatccgctgcggtctctctcctcagttcctgcggaagcacctcctctctttaacttgactctatttttttctctccccgtctcttccctggccttgccctctctctttctgccctgtagccgcgggcgtccaaatgaagctggaattcctccagcgcaaattctgggcggcaacgcggcagtgcagcactgtggatgggccgtgcacacagagctgcgaggacagtgatctggactgcttcgtcatcgacaacaacgggttcattctgatctccaagaggtcccgagagacgggaagatttctgggggaggtggatggtgctgtcctgacccagctgctcagcatgggggtgttcagccaagtgactatgtatgactatcaggccatgtgcaaaccctcgagtcaccaccacagtgcagcccagcccctggtcagcccaatttctgccttcttgacggcgaccaggtggctgctgcaggagctggtgctgtgagtgggggtagacacggggctggtggagggctgcatgcgagggtggcttaggagggtgtccttgagcaggaggctgcaaggtctccaggacaacccacttgctaccagaccccggggaaggagggcacaatccctgggcatggacgccacctcttccctgcatgctgcccctgggagggacctcattgctcaaccagagccctcaagcagggaagagggtgtcctggaggagaggggatgggccgggggctgtcagggatactccagctccttgggaacccaagtcgggagggctcagaggtctccgagattcagtcctgtgtctgacaggttcctgctggagtggagtgtctggggctcctggtacgacagaggggccgagggtgagtgcacggagctgcagggccatgtgctgaagagcagtggcattttggtgaccctgaagcatcgttgttcacatctcaccctgcgtggccttctctcatcacatccctcactcctggctctgtgtgtgacatcatcttgggacaccgccactccatgtgccatcatcaccaccccatgacatcctgccctcatgtgccaccatgttttcctgtgccgtgtccaccctgtgctgggcttatgttccggccagccaaaagtgtcttccatcactcccacaaacacaagaagcaggacccgctgcagccctgcgacacggagtaccccgtgttcgtgtaccagccggccatccgggaggccaacgggatcgtggagtgcgggccctgccagaaggtatttgtggtgcagcagattcccaacagtaacctcctcctcctggtgacagaccccacctgtgactgcagcatcttcccaccagtgctgcaggaggcgacagaagtcaaatataatgcctctgtcaaatgtgaccggatgcgctcccagaagctccgccggcgaccagactcctgccacgccttccatccagaggagaatgcccaggactgcggcggcgcctcggacacctcagcctcgccgcccctactcctgctgcctgtgtgtgcctgggggctactgccccaactcctgcggtgacaccacccagcctgacctgtgttttggcaaggtgatccttccagagccatcccacaaagtcagcactgacatgggatgcagctaactgcagttgggtcgcccccaggccaacgctcctctcaatcctgggctggtggcccctggctccggagaatgctggatggaacaggaaaccaatcacctggcaccactttcaagatgcttcatggtgcccggtaccatctgccctaggtctcaacatgagcatacttctgacctaaccttcctgtctcctcttcgggaagccagcgtgagctcagcttggaccaagacaaaataatttagttcttcctgtactccagagtccagacccagccaagaaagggtcagttgtttctgaccctttctgtcggagtggtctctggtagaacccaaggacttctgggtactgagaagcagcagcagaatgaggccaaatgcagagatgaggctaaggcaagaatatgccccaactaaagcatagattccccaaagtgaggctcatggtgggaggccactcaccttcctagctgctgctcgaaaaggttttgactgtgttggggtgggggttgggtaagggaatggtcaagactgagaaaggaatgaaatccattcaggaaatatcgacagggctacacgtgatgtccccaaactgctgctattgaagaacttcccaaaacttctttacaaagccctaaaggaaagtttgcatctatgaaaagccaataggctgagacatccaattgctgcatggaaattgatgtacattcaggggacggcaaaaatagctgtaaaatagtgaaaaagagcagtggttgtgctcttttctggccaatgatttacaaaagaatctacttgactctgtccctggagtgaaatccttagggttggaacttgtgggaacattccaacttgctaagcagggtccactgggagggaagctctatctgggaactcacccccagcgcacacacatctcccccagggtcccaaggccccgcagcttcctcccccgaccaaaccccaagacctggatcccaggagacaacagtctccacagtgagagcaacattaagggcaaagccatggagaaatgtgggagaggccggcctcaaatctttccatttaacaaaccccagtgatgggtatggacagcatgcagggcttttggggcgcttcccccgctcctccatcaccctcagcctccacacttcaaagttcaagttcaaagctgttcaagtttcctaccagcaaatagccctaacttgcctctagagtaggccaaatgccaactctgtaaaacacacttacattataggttacagaatgtcactcttaccgtcatgtcttgcaacaaccctgtgaggacagtattaatgcccccttacagcagaagacactgcagctcggagaagacagcttaagtggcagaataatgctagaacagctaaggtttacatgtaccaaataacatgtttcagctcattccatcctcacaacagccccctgaaagtgggtactatcattagtcccatgttatagaaactgcagcagagttgaaaattgcctccaaattaccggaagagtgtatgaagattgaatgtgatgtattcacgtaacatgcttgaaactgcctggcatatactaaacgctaaataaatacatgctaactgcgatcattaaaataccttg

SEQ ID NO: 459903 - DNA, 3232 bp, Homo sapiens
  misc_feature (12)..(12): n is a, c, g, or t
  misc_feature (18)..(18): n is a, c, g, or t
gcccaattgccnactccntcgggacaatcaaccaacacccctttcaagtttgggggtggtgctgtcccggggccacggagaatacatccttctggggaacacgtctgtggaagaaggcctgcatgacttgcttcacccagacctggccctggccggtgactggatctactgcatcacagatattgacccagaccaccggaagctcagccagctagaggccatgatccgcttcctcaccaggaaggacccagacctggagtgtgacgaggagctggtccgggaggtgctgtttgacgcggtggtgacagcccccatggaagcctactggacagcgctggccctcaacatgtccgaggagtctgaacacgtggtggacatggccttcctgggcacccgggctggcctcctgagaagcagcttgttcgtgggctccgagaaggtctccgacaggaagttcctgacacctgaggacgaggccagcgtgttcaccctggaccgcttcccgctgtggtaccgccaggcctcagagcatcctgctggcagcttcgtcttcaacctccgctgggcagaaggaccagaaagtgcgggtgaacccatggtggtgacggcaagcacagctgtggcggtgaccgtggacaagaggacagccattgctgcagccgcgggcgtccaaatgaagctggaattcctccagcgcaaattctgggcggcaacgcggcagtgcagcactgtggatgggccgtgcacacagagctgcgaggacagtgatctggactgcttcgtcatcgacaacaacgggttcattctgatctccaagaggtcccgagagacgggaagatttctgggggaggtggatggtgctgtcctgacccagctgctcagcatgggggtgttcagccaagtgactatgtatgactatcaggccatgtgcaaaccctcgagtcaccaccacagtgcagcccagcccctggtcagcccaatttctgccttcttgacggcgaccaggtggctgctgcaggagctggtgctgttcctgctggagtggagtgtctggggctcctggtacgacagaggggccgaggccaaaagtgtcttccatcactcccacaaacacaagaagcaggacccgctgcagccctgcgacacggagtaccccgtgttcgtgtaccagccggccatccgggaggccaacgggatcgtggagtgcgggccctgccagaaggtatttgtggtgcagcagattcccaacagtaacctcctcctcctggtgacagaccccacctgtgactgcagcatcttcccaccagtgctgcaggaggcgacagaagtcaaatataatgcctctgtcaaatgtgaccggatgcgctcccagaagctccgccggcgaccagactcctgccacgccttccatccagaggagaatgcccaggactgcggcggcgcctcggacacctcagcctcgccgcccctactcctgctgcctgtgtgtgcctgggggctactgccccaactcctgcggtgacaccacccagcctgacctgtgttttggcaaggtgatccttccagagccatcccacaaagtcagcactgacatgggatgcagctaactgcagttgggtcgcccccaggccaacgctcctctcaatcctgggctggtggcccctggctccggagaatgctggatggaacaggaaaccaatcacctggcaccactttcaagatgcttcatggtgcccggtaccatctgccctaggtctcaacatgagcatacttctgacctaaccttcctgtctcctcttcgggaagccagcgtgagctcagcttggaccaagacaaaataatttagttcttcctgtactccagagtccagacccagccaagaaagggtcagttgtttctgaccctttctgtcggagtggtctctggtagaacccaaggacttctgggtactgagaagcagcagcagaatgaggccaaatgcagagatgaggctaaggcaagaatatgccccaactaaagcatagattccccaaagtgaggctcatggtgggaggccactcaccttcctagctgctgctcgaaaaggttttgactgtgttggggtgggggttgggtaagggaatggtcaagactgagaaaggaatgaaatccattcaggaaatatcgacagggctacacgtgatgtccccaaactgctgctattgaagaacttcccaaaacttctttacaaagccctaaaggaaagtttgcatctatgaaaagccaataggctgagacatccaattgctgcatggaaattgatgtacattcaggggacggcaaaaatagctgtaaaatagtgaaaaagagcagtggttgtgctcttttctggccaatgatttacaaaagaatctacttgactctgtccctggagtgaaatccttagggttggaacttgtgggaacattccaacttgctaagcagggtccactgggagggaagctctatctgggaactcacccccagcgcacacacatctcccccagggtcccaaggccccgcagcttcctcccccgaccaaaccccaagacctggatcccaggagacaacagtctccacagtgagagcaacattaagggcaaagccatggagaaatgtgggagaggccggcctcaaatctttccatttaacaaaccccagtgatgggtatggacagcatgcagggcttttggggcgcttcccccgctcctccatcaccctcagcctccacacttcaaagttcaagttcaaagctgttcaagtttcctaccagcaaatagccctaacttgcctctagagtaggccaaatgccaactctgtaaaacacacttacattataggttacagaatgtcactcttaccgtcatgtcttgcaacaaccctgtgaggacagtattaatgcccccttacagcagaagacactgcagctcggagaagacagcttaagtggcagaataatgctagaacagctaaggtttacatgtaccaaataacatgtttcagctcattccatcctcacaacagccccctgaaagtgggtactatcattagtcccatgttatagaaactgcagcagagttgaaaattgcctccaaattaccggaagagtgtatgaagattgaatgtgatgtattcacgtaacatgcttgaaactgcctggcatatactaaacgctaaataaatacatgctaactgcgatcattaaaataccttg

SEQ ID NO: 459904 - DNA, 3116 bp, Homo sapiens
  misc_feature (12)..(12): n is a, c, g, or t
  misc_feature (18)..(18): n is a, c, g, or t
gcccaattgccnactccntcgggacaatcaaccaacacccctttcaagtttgggggtggtgctgtcccggggccacggagaatacatccttctggggaacacgtctgtggaagaaggcctgcatgacttgcttcacccagacctggccctggccggtgactggatctactgcatcacagatattgacccagaccaccggaagctcagccagctagaggccatgatccgcttcctcaccaggaaggacccagacctggagtgtgacgaggagctggtccgggaggtgctgtttgacgcggtggtgacagcccccatggaagcctactggacagcgctggccctcaacatgtccgaggagtctgaacacgtggtggacatggccttcctgggcacccgggctggcctcctgagaagcagcttgttcgtgggctccgagaaggtctccgacaggaagttcctgacacctgaggacgaggccagcgtgttcaccctggaccgcttcccgctgtggtaccgccaggcctcagagcatcctgctggcagcttcgtcttcaacctccgctgggcagaaggaccagaaagtgcgggtgaacccatggtggtgacggcaagcacagctgtggcggtgaccgtggacaagaggacagccattgctgcagccgcgggcgtccaaatgaagctggaattcctccagcgcaaattctgggcggcaacgcggcaggatctggactgcttcgtcatcgacaacaacgggttcattctgatctccaagaggtcccgagagagtgactatgtatgactatcaggccatgtgcaaaccctcgagtcaccaccacagtgcagcccagcccctggtcagcccaatttctgccttcttgacggcgaccaggtggctgctgcaggagctggtgctgttcctgctggagtggagtgtctggggctcctggtacgacagaggggccgaggccaaaagtgtcttccatcactcccacaaacacaagaagcaggacccgctgcagccctgcgacacggagtaccccgtgttcgtgtaccagccggccatccgggaggccaacgggatcgtggagtgcgggccctgccagaaggtatttgtggtgcagcagattcccaacagtaacctcctcctcctggtgacagaccccacctgtgactgcagcatcttcccaccagtgctgcaggaggcgacagaagtcaaatataatgcctctgtcaaatgtgaccggatgcgctcccagaagctccgccggcgaccagactcctgccacgccttccatccagaggagaatgcccaggactgcggcggcgcctcggacacctcagcctcgccgcccctactcctgctgcctgtgtgtgcctgggggctactgccccaactcctgcggtgacaccacccagcctgacctgtgttttggcaaggtgatccttccagagccatcccacaaagtcagcactgacatgggatgcagctaactgcagttgggtcgcccccaggccaacgctcctctcaatcctgggctggtggcccctggctccggagaatgctggatggaacaggaaaccaatcacctggcaccactttcaagatgcttcatggtgcccggtaccatctgccctaggtctcaacatgagcatacttctgacctaaccttcctgtctcctcttcgggaagccagcgtgagctcagcttggaccaagacaaaataatttagttcttcctgtactccagagtccagacccagccaagaaagggtcagttgtttctgaccctttctgtcggagtggtctctggtagaacccaaggacttctgggtactgagaagcagcagcagaatgaggccaaatgcagagatgaggctaaggcaagaatatgccccaactaaagcatagattccccaaagtgaggctcatggtgggaggccactcaccttcctagctgctgctcgaaaaggttttgactgtgttggggtgggggttgggtaagggaatggtcaagactgagaaaggaatgaaatccattcaggaaatatcgacagggctacacgtgatgtccccaaactgctgctattgaagaacttcccaaaacttctttacaaagccctaaaggaaagtttgcatctatgaaaagccaataggctgagacatccaattgctgcatggaaattgatgtacattcaggggacggcaaaaatagctgtaaaatagtgaaaaagagcagtggttgtgctcttttctggccaatgatttacaaaagaatctacttgactctgtccctggagtgaaatccttagggttggaacttgtgggaacattccaacttgctaagcagggtccactgggagggaagctctatctgggaactcacccccagcgcacacacatctcccccagggtcccaaggccccgcagcttcctcccccgaccaaaccccaagacctggatcccaggagacaacagtctccacagtgagagcaacattaagggcaaagccatggagaaatgtgggagaggccggcctcaaatctttccatttaacaaaccccagtgatgggtatggacagcatgcagggcttttggggcgcttcccccgctcctccatcaccctcagcctccacacttcaaagttcaagttcaaagctgttcaagtttcctaccagcaaatagccctaacttgcctctagagtaggccaaatgccaactctgtaaaacacacttacattataggttacagaatgtcactcttaccgtcatgtcttgcaacaaccctgtgaggacagtattaatgcccccttacagcagaagacactgcagctcggagaagacagcttaagtggcagaataatgctagaacagctaaggtttacatgtaccaaataacatgtttcagctcattccatcctcacaacagccccctgaaagtgggtactatcattagtcccatgttatagaaactgcagcagagttgaaaattgcctccaaattaccggaagagtgtatgaagattgaatgtgatgtattcacgtaacatgcttgaaactgcctggcatatactaaacgctaaataaatacatgctaactgcgatcattaaaataccttg

SEQ ID NO: 459905 - DNA, 1811 bp, Homo sapiens
tctgccctcgttgttttctggaatgggagcctcatcactgctgggcattttctgtcgctcttcttccagtgggaacgagagaggctgccgtctctgttcttcccccacccctcccactccccagaaaccccagtttgcactctgccctctgactcagtcctcccatccgctgcggtctctctcctcagttcctgcggaagcacctcctctctttaacttgactctatttttttctctccccgtctcttccctggccttgccctctctctttctgccctgtagccgcgggcgtccaaatgaagctggaattcctccagcgcaaattctgggcggcaacgcggcagtgcagcactgtggatgggccgtgcacacagagctgcgaggacagtgatctggactgcttcgtcatcgacaacaacgggttcattctgatctccaagaggtcccgagagacgggaagatttctgggggaggtggatggtgctgtcctgacccagctgctcagcatgggggtgttcagccaagtgactatgtatgactatcaggccatgtgcaaaccctcgagtcaccaccacagtgcagcccagcccctggtcagcccaatttctgccttcttgacggcgaccaggtggctgctgcaggagctggtgctgtgagtgggggtagacacggggctggtggagggctgcatgcgagggtggcttaggagggtgtccttgagcaggaggctgcaaggtctccaggacaacccacttgctaccagaccccggggaaggagggcacaatccctgggcatggacgccacctcttccctgcatgctgcccctgggagggacctcattgctcaaccagagccctcaagcagggaagagggtgtcctggaggagaggggatgggccgggggctgtcagggatactccagctccttgggaacccaagtcgggagggctcagaggtctccgagattcagtcctgtgtctgacaggttcctgctggagtggagtgtctggggctcctggtacgacagaggggccgagggtgagtgcacggagctgcagggccatgtgctgaagagcagtggcattttggtgaccctgaagcatcgttgttcacatctcaccctgcgtggccttctctcatcacatccctcactcctggctctgtgtgtgacatcatcttgggacaccgccactccatgtgccatcatcaccaccccatgacatcctgccctcatgtgccaccatgttttcctgtgccgtgtccaccctgtgctgggcttatgttccggccagccaaaagtgtcttccatcactcccacaaacacaagaagcaggacccgctgcagccctgcgacacggagtaccccgtgttcgtgtaccagccggccatccgggaggccaacgggatcgtggagtgcgggccctgccagaaggtatttgtggtgcagcagattcccaacagtaacctcctcctcctggtgacagaccccacctgtgactgcagcatcttcccaccagtgctgcaggaggcgacagaagtcaaatataatgcctctgtcaaatgtgaccggatgcgctcccagaagctccgccggcgaccagactcctgccacgccttccatccagaggtgcgggttgaggcggatcgagggtgggctggattttcatccccaaaccctctgtgcctgggtctgtgcccctgcagacaggagcatatagggatgccaatgaacacacctgtgcctgtgcttctcgggggaaacattcgcgtttatgccctgtgacactgtgatataataagaaacagatctt

SEQ ID NO: 459906 - DNA, 912 bp, Homo sapiens
ctacacatggacagcaaatcctatgctcactggctctaccttctgctttgcttgtttcagagctagtccatcaggctctaaatttttaaacgtaagcagaagaatgatgaaagagatggggccaacactctcagagctgagcactgtggaggcggaagatacagagagctccattgcagccacagtgatggatggcatcgatagagaaaatcccacaaaagagcttgacttttctcatgaatctgcagtttcttccgaaaaagtgaaattttatcaaatgatcttgggaagcccatctaagggcttccaaagagaaaatgctacttatcaagaatcatgcctttcctgttgcagagtagaagtaaacaaaatcaagaaatctccaatgctcacacaattttaacaggtttggccaatacaacagagacgtgaaaaccaacagatgtcccccaccaatccaggaatgagtgaattcttgctctatcaggacctgtgagacttccctcaagagctggttgttaaaaagagcctaggacctcttccctctcttgcttcctctcttgccttgtgatcttcacatcctgactctccttcaccttccactctgagtggaagtttcctgaggctctcgcaagaagcagatatcggcaccatgcttcttttacagtcttcatagtcctgagaacaaaacagttcagatcaactcaacaatattccaagtgggctttgcagagcatcttctggactaagtagaaggagaaggagaaggagccagaccttccctgtggccatgctttctctaaaacagccctgatgacttactttttcaggttgaggtctgagtaagcctccatattatgtaataataattatattattatgtaataatataaaataatgatatcaattatc

SEQ ID NO: 459907 - DNA, 890 bp, Homo sapiens
ctacacatggacagcaaatcctatgctcactggctctaccttctgctttgcttgtttcagagctagtccatcaggctctaaatttttaaacgtaagcagaagaatgatgaaagagatggggccaacactctcagagctgagcactgtggaggcggaagatacagagagctccattgcagccacagtgatggatggcatcgatagagaaaatcccacaaaagagcttgacttttctcatgaatctgcagtttcttccgaaaaagtgaaattttatcaaatgatcttgggaagcccatctaagggcttccaaagagaaaatgctacttatcaagaatcatgcctttcctgttgcagagtagaagtaaacaaaatcaagaaatctccaatgctcacacaattttaacaggtttggccaatacaacagagacgtgaaaaccaacagatgtcccccaccaatccaggaatgagtgaattcttgctctatcaggacctgtgagacttccctcaagagctggttgttaaaaagagcctaggacctcttccctctcttgcttcctctcttgccttgtgatcttcacatcctgactctccttcaccttccactctgagtggaagtttcctgaggctctcgcaagaagcagatatcggcaccatgcttcttttacagtcttcatagtcctgagaacaaaatctaaatcctaggattccttgacattctgttactgagagtctgcagtctcaagactttaaggataatagttccaaaggaatgttatctgtacgttttttctgagtaaacacttccatttcaagcaaaacatttgggattctatttgttggctgtttctccagcttccatttccctccccctttttttttctgccatcagc

SEQ ID NO: 459908 - DNA, 1963 bp, Homo sapiens
gctagcagcctccgggatttaaactacccagcttgcggtcctttgttatggcagccatgggaaaagactccagcagacagcaacgcaagggggcatctatgcgattgaccatggccggaagcacacctccatgcgatgcggtgaggggacaaactaatgcaggaacagaaaatcaaatagcccatgttctcacttataagtgggagccaaatgatgagaacacatggacacagaggggaacaacacatactggggcccacttgaggttagagggtggaggagggagaggagcagaaaagataactattggagttgccccagctgaaaaccttctgcagagcccagtgcagaaggaagatgtggagcctcagccaggaccagggaagtcaatccccccttcccacaagcctgtggccccaacctacagtggacaggccaccccaaagggatccagggtggtcaagagccctggatcaccagggaaaagatttcttgactccacttggggaggaatttatcttgattgaatgtgaacagttagatgagttttcgtaaatgtatacagttgtgcctgagggaactgctctgtgagctgacaaccaaaggataggagtaatttaatgagacaaaggaagtaaaaaactgctccaggcagagatgatggcgtgagcctctgcagggagcatagcacatttaaggaactcaggtgaatcctgaattgccatgaaagggcaaaatatgtcaccccagttcattcactgtgcttcctatttcatatttaatatttctttccaaacatgtgagagtcaacagcatattaatgcctaaatgcataaactctagttatgcaaaacacttgtctagaacaactcagtccctgatggtttactcaaggttttaccataacaagaagtaaatattaggattgtaaaattcagaatggtccctgagggggaataaaattgtaataaaaaaatttcctcctttttcaggtcttgtttcagtgagaatgtaaagtacgtgagctatgtgctttgtgatgaagtcgttgatttatttcactttggaacaagcacaccacaacaaagtgagaatgagaaggtaattcagagggagaagaaggaaacggaactgtacgtagaaatatatcctcatatgaacttagattctgaaataaatctaggttgtaaaaacaccaaaaggctgtttccatgagccacgtttccctttgtaaaggtaacataaatttccacttgtaaaggaattgtgaagtggtgcctctctccaataccagaagaggagaataactgttaatcactggagatgacttatcactggagacattaccaaggtcctgcctcttgcttcttttgccctggtgttaatcccatgcagctggtgcagaaacagaaccaagagcttggaagtcacaaggtggcgccaccccaactaggactgttctttcaaagcccagtgcccagttggtgaaatgacccaccagcattgcacaggagagccccagagagatatgtccaggatatacgatcagtctggtgttctgagccttaaggtatggttgcagcgatgacgcattgcagaaccaaaggaatttgtccttaggatagaccttccaaaggccgatcaacagcgacaaaaaacaagctttcaaaccaacaagagaagacatgattgcagtgccttcataacgacattgctttattgatgaaatgcaaggaaaactacgttagaatctactgattctctttgagatctaataatacgctttattcaaatcttattcacaaaccacttcctccacgggtctttcacaggaactgaaattggccagttacaaacagaattggttctactgtcctttgaaatcacagacgcagacatgttttagaatacaaaagacaccaagctttctttgggaaacacgtcctgtttggaaaaaaaaaaa

SEQ ID NO: 459909 - DNA, 1096 bp, Homo sapiens
ctggcggcggatggaagccgttgtgcagcagcccgttcacagcggcggcgctggtgcccacgggggcccctggagagtgcgggaccgagcgctcctgctgcccgctgcggtcgcccatgccgggggctggcggggctgtgcgcgggccccggctcaggcggcctcgctggaggtcattctccggcgtctttatttccccggatcctccctgcggcttccgattcagcagccgcagagccggcgcctggggatggcgaacccggcgctcctcccctcctcctgccgactcccccacctcctctgcgccctgccccccgcgcgccggccccacggcgccggcctggagcacgccagccccgggcgcggaatcggggatccccgcgcacccccagccggggctcccgccgcccgccttcccctgatccccaggccgcgcgacttcaaacgcggcttcctcgcctcccagactggtccccgccactgagcatgcccagtcctgcccgccaccgccaccgacgagtttcaacatggggaatcaagttctctgggcttgcagagaggagatgggcgggttgggctttgtatggcgatgtgaaaaccagatgggtctgggagagacagcgaaaggagcgaaccgtttcaggaggaatacgggaggaagacaattatttgcagaggtgtcaggggatttgatgcagatgatcatcatggcttggagaaacaatgaaggaagcaaagtatgccatctatgctgcgggaggtaactccagaagaccccagagagaacgagtttggacttttaactgagggccattggaaactactgaagagttttaggcagcataagaactactagattttcattgtgggaggatcctcagcagcagcctcagaaaggagattggggaaggagatccctagtcagggagaccaagaagactactggaaaaaaacaggggaatcctcaaggacctgcaaacaagaaaccaaatccccccactccccccagccaaaatgtgttcattttgaccagctgtgtgtgtgttttaaattaaaagtttgaattagaaagcaagtaggataaatttatatactt

SEQ ID NO: 459910 - DNA, 3718 bp, Homo sapiens
ctgggacctgtcccgcgtccacgtgaatgcggggggcagcattcaccatcccctccctgaaacagcgcccctgcatggtctgccctgagcggcggggacgcacgaagagctccctggctccaccagcccgttccccagatgcaggacctcagatcagcaaggacctggagcccccgccccacggttgccaggaggcggacaggggcggctcctggggggctaccaccccgaggcctttccgccagaacttgagcgacttgggaaggcacagtgtcctgcccttgaagaggaacctgtgtcctggaggcagcagcctgggagctcctcctccgaggacaccgcagaggcgagtgactctggcggcgcagcgctggctttcccgtccgcagaggagagctgtggggctgggtgagctggaccagggagcacggctggctgctctcggcctctgatggggagtggacagcttagggggttgcccccgtgccagccagcctgctggccactctgggcttcatcacagcctcacctgcctgtgccagcacctagcactgaaggctggagcttctggccatgctggtcaacttccccaacgagcctctgctgcctgggaacagcaaggccagagctacaccgtcctgcacttggcagccatgtaccttggagatggtgaagctgctagtggggacataggacgccgatgttgacatcagggaatacattgggaaaagggcctcccagcatgacaaaaaaaaaatgcaaattgttacaaaactggtagtatttgtaagtgcaagcactacacgctgctttgttcttttaccaattgcatttgcattttaaggtactactggtacagccatggtggagaacagtttggaggttcctctaaacactgaaaatagaggtgccacatgatccagcaatcccactgttggatatataccccagaaataagaaatgagtatatcgaagaaattatctgcactcccatgttggttgcaccactgttgacaatagctaagatttggaagcaacctaagtgtccatcaacagattaatgtattaaagaaaatgtggtagatacacacagtggagtattattcagccctaaaaaagaatgagattcagtcatttgcaacaacatggaaggaactggatatcattatgttaagggaaataagccaagcacggaaaggcagacattacatgttctcacttatttgtgggatctaaaaatctaaacaattgaactcatgaacatagtaagtactgggggctgggggggggggagacagggcacgggtaatgggtacggaaataggcagaaggaatgaataagacatactatttgacagcacaacagggggactctagtcaataattgtacatttaacaataactaaaagaatctaattggattgtaacacaaaggaaacatgcttaaagggatggataaccactctccatgatgtgattagttcatgctgcatgcctgtatcaaaacatctcatgcaccccataaatatatatgtttattatatactcacaaaaatgcttgaaaataaaaataaaggaactactgaaggtcaggtcagagtggaaatgtaaaaatactaattagagaataatgtgaatacaacaggaatcctgttggtattctgtttatattgtaagcagcagttcaattgttttgtaaaagtaatttcaattttaatcactgaactaaagaaatgggcaaggctgacttccgtaatatatgttctacctaaccatctctaacaccgctgtcaaggaggaccagtgttaaggtacattactaacaaccacacaaatttttaaaagaaaagaacactcttagcagcctatggtactttgaaatgaaatattgcctctcattctcacttgtgttgccattccaaaagtatgaatttgctgaggtttatattctgggtattatataaccattggttctgtttggcataaccctattaaatggtgctcagagctgaattacctacagaaactttctggtttaattagcataaattggtataaatattagtgagcccatacttctgtgatataattaaaccaacttaatgattctcacataaggtgtcaatttattttactaatgcattcataatctatgctttgtagcaacatttttcaaatgtttaaaatgctaaatcttctcaattttccaatcttttcttgaatctattagatacctatagtgtagttactgaatagctaggagacaaatacacctagttagaaatggcactgctttataaaaggcactagagaaaagacgagactattcctatatttaaatgctgctggcaagtgaattcctttgtatataaatgaaagataccattcattaaaatgaaagacgtgttttaagtatgattcttacatttcattcatttatgatagagtaaatggctttataattactttaaaatttaactcactagtacattaaatctgttcattgcaagattagaatcaactgtgaggggaactaatttaaacaagcccttccttagtcttattgagtctcatatttgctgaaagtacctacagcttgcaggataagggagttcacggaccatagggtgagtgaacccatgcacaaattgcaaactgcccagagctactacatttaggatttttagacctttaattttccaagtcatagaaatttgttacaggttcatcacatctttgtctacatggcaactgaatttctttaaagataggttaaaaaaaggcataaaactatgaattattatccatttgtgtgcctctatttttgctttagaattatggaaatggaccctgtgaatttgggaaacactgttatgtatacacatgggtgaaaaacaatctaacattgtgtaaattaaaatatttttttgaagttgaaaaacatccatttgttctaaatctatatatattatgtgtatctagtacagaataaggtgtaacttctcattcattaatcttaggttttacagatacgtaaagctgaagcaactctaaagagtagacacttcagaacaggaaggttctggtcaatgttgagagtagacactttcactgaaggttctggtgaaatgtgggtaactaattgcttgaaatctgtaatttgctatatagctaactattaagttaaaatgtcatttaccatgccttttacactaaaagctttaacttttgtgagaaaataatattttaaatgttcaattattacttctgaggaaagctacttctagcattctttgtcatgatgtgcttgtgtgcagtaagcagagcattttcagccacttacctctacaatgttcctgtttttcaatttctgatttagattataaaaggcaaatgattaatttaatttgatactcagagttgtgtttacttttaatggacaaatatatgtcagatactttgatgtttattgatatgacaccgtgtggttaaacaacgcaagtatgtccacgtgtttcttatagggtacacttgaaactaatgatgtttatgcagttcacttatgtaacttgaaaatctggtactattgcattcaggactgaaatcttggagtttaggtgtcttgtctctcattttgaaaataagtgaaagttgagaatgtaaaatctataaagttcatttttttaactaggaaaaaaacacaaattaatgacagaca

SEQ ID NO: 459911 - DNA, 467 bp, Homo sapiens
ctcccattttgaaacccttaataaaaacttgctggtctgagactcagcaggcagcacagacttactgatatgtactgtcacctccagcggcccagctgtaaaattcctctctttgtagtgtctctctttatttctcagctggctgacacttatggaaaatggaaagaacctatgttgaaatattgggggcaggttccatcaatagttcttacatggatttacttattttttgtctccctccataccctagaaactcctggagggcagagctgtgtctgccatcttcatcattgcattaccaccaccaagcacagtgcctggcacaaaagagttgctcaataaataaatcaggatgaatggataaatacatggataggcactttgagctacagatgagtttaaatactttgtgtttttcttagtcaaacatgtgcaattaagcatgtgataaatgatatgatgaccac

SEQ ID NO: 459912 - DNA, 1156 bp, Homo sapiens
agcaggtgagtggtaacaggctttaatcctttcaaagcatgctgtgggatgagatattggcattgagcgggagcgtctgtgatggtcctgtaggcttccgaggcgatcgattgggcagtgtcggtctgcagctgctaagccaagaagatctgggaaggagtcagtcagagagccttgggctggagttccaggggctctgggagtggctgccaggaaacactgaagactgccaggagaccacaggaagctacgaagaggcaaggcaggactccccgacaagtgcaggagggagcgtggccctgctggcacctccgtttcagactgctggctaccagagccacaagacaatcaatttctctggtttcaagtcacccagcttttggacccgtggcttgcttctaatctatatctatggaaaagttgaagggattttgcagatgtaactaagcccctaatccattcactttgagttaatcaaaagggagattattcagggtgggcctgacatcttcagacagacaaggggaggggctcctgtgatgggatcagtcagatgcctgcctggccgctccccctgaggggacttgggctcctcttaacattggcaggctggtataaacttccggctcagatcaagctatgcctgatgctgccttaagccttatgaggtcgccacggaaccgcagaaactcctggagggcagagctgtgtctgccatcttcatcattgcattaccaccaccaagcacagtgcctggcacaaaagagttgctcaataaataaatcaggatgaatggataaatacatggataggcactttgagctacagatgagtttaaatactttgtgtttttcttagtcaaacatgtgcaattaagcatgtgataaatgatatgatgaccacacctgtgtgttgcctgatgttctttgcaatcactaaatgaagtcaattgtgcctgttttgacagttctgttttcaacctaatgatctgtttcttttaacttctggctgttggctttgtttgggtttgttagcctgacaaagtggcagacattagtatttgctcttttgtttaaatgtcatgaactttaaaaatgcctttgcttttgggtcacaatatggcaaccagagtgtcagttggagctggggtctcatc

SEQ ID NO: 459913 - DNA, 1141 bp, Homo sapiens
atagctatgaagaatcatggtcatgtattttataaaacattcttcacagtttaaaaggcaatcacccaaaaccaaccgtggctacccattcaagactgtttccacactgtggaagctttgtactttcactctgctcaataaagcctgcagctttttctcactctcagtccatgtctctttcactcactgtggtcagcttccacaccatttctttggtgtggcttggcaagaacctcaggtgttacatcttggcgagccagacaggagactccagaaaaggtatctagatcatcatgcagatcaaagccatcaagctacaaatgatcttacaaatggaacctcaaatgagctcagctcacggcttctaccgaggacccctggatcaacccgctggtccctcaattaccctagaaaattcccctctggaggacaccaaactgcagggccccttcttcacccctaaccagcaggaagtagccagaacgactgccacacggttcccaacagcagttggggtgtcctgtttagaggcaggactgagaggaggtgccagctgggcttcctgggtcaagtaggggctcagaaagctgtgaaactcactcatttcctgcatcaggacttacttcagtcctggatgaataatattgaagatatacgcttaaaatattcctaacaccaggattcgtgcatgtgttttcttccccaagaaagctataaacagtgaaaaatttgctgtaagtttccctgtatcttctctccctctctcccttcccccgcccctgaaactaaaataaaggaatgttaactgctcatttttctgtgaccagtggaccttatctacactcccaattcagattccttgtaaacatactttgtaaagtcctgtaagatcctgtctcctttgccatgctgctgcaaggtcctaaagtagataaaacctaagttgcaattccggttttcctcaaaatctaagacatgtcacaaaataatttactgcctttgtttccggctcctgtaacaagcttcccacctcatgtatctcccgctttaaagagtttaaaaggcaatcacccaaaaccaacagtggctacccgttcaggacccctcccatgctgtggaagctttgtactttcactctgct

SEQ ID NO: 459914 - DNA, 1122 bp, Homo sapiens
atagctatgaagaatcatggtcatgtattttataaaacattcttcacagtttaaaaggcaatcacccaaaaccaaccgtggctacccattcaagactgtttccacactgtggaagctttgtactttcactctgctcaataaagcctgcagctttttctcactctcagtccatgtctctttcactcactgtggtcagcttccacaccatttctttggtgtggcttggcaagaacctcaggtgttacatcttggcgagccagacaggagactccagaaaaggatcaaagccatcaagctacaaatgatcttacaaatggaacctcaaatgagctcagctcacggcttctaccgaggacccctggatcaacccgctggtccctcaattaccctagaaaattcccctctggaggacaccaaactgcagggccccttcttcacccctaaccagcaggaagtagccagaacgactgccacacggttcccaacagcagttggggtgtcctgtttagaggcaggactgagaggaggtgccagctgggcttcctgggtcaagtaggggctcagaaagctgtgaaactcactcatttcctgcatcaggacttacttcagtcctggatgaataatattgaagatatacgcttaaaatattcctaacaccaggattcgtgcatgtgttttcttccccaagaaagctataaacagtgaaaaatttgctgtaagtttccctgtatcttctctccctctctcccttcccccgcccctgaaactaaaataaaggaatgttaactgctcatttttctgtgaccagtggaccttatctacactcccaattcagattccttgtaaacatactttgtaaagtcctgtaagatcctgtctcctttgccatgctgctgcaaggtcctaaagtagataaaacctaagttgcaattccggttttcctcaaaatctaagacatgtcacaaaataatttactgcctttgtttccggctcctgtaacaagcttcccacctcatgtatctcccgctttaaagagtttaaaaggcaatcacccaaaaccaacagtggctacccgttcaggacccctcccatgctgtggaagctttgtactttcactctgct

SEQ ID NO: 459915 - DNA, 551 bp, Homo sapiens
ctcgttgttttacttctaagaaactgaaggcatgatattctgaagactagaggtgattcaatagcctatgaatcttcttcatttggaaccccactgggcctgatctgtttcccatcaccaatgcacttctgctaaacctatatcctatcaagtactctccctaaatgctcagagaccataacagaagatgagggtgtgtgagattataaaagccaaattagtggagtggaatctggaggctaaagcaactccatcttggatgctaatctgccatgttggcttctgattaaccccagttctggagggcctctgaggtttccaatttatctactgtcccttgtgtaagaacaagtacttatcataaatcctgctattagggcaaatttctacccattccctctgaagcatgtgcacctctcctctacatgtaatctcccctacaatagataaacccctctgggtctgggggctaatagtgtgggaacccatcatcttgcctcactgctgcacaagccacaggtgtggcttctgtttctaagtccctattaaat

SEQ ID NO: 459916 - DNA, 1657 bp, Homo sapiens
atagctatgaagaatcatggtcatgtattttataaaacattcttcacagtttaaaaggcaatcacccaaaaccaaccgtggctacccattcaagactgtttccacactgtggaagctttgtactttcactctgctcaataaagcctgcagctttttctcactctcagtccatgtctctttcactcactgtggtcagcttccacaccatttctttggtgtggcttggcaagaacctcaggtgttacatcttggcgagccagacaggagactccagaaaaggggtgattttcctgtaccagtccaatgcctccagaggaagatcatacatttgccattttactgcttagtacgcatgcttgagcctgctcgcccaactgctgagatcttattcagaaactgctgatcaccaactccaggtgtttttattacacaagacaaaaacggaaaaacagtaacaaatgattggttaagcctttcaaaacaaagaagttgaaggtcactggaataggttcattacactcaagcaaaggcctggggaaatgatagaattacctctgttgacccagaagagcaccaaaagcaccagtgtgcagaaatcagagacctcaagctaaaagtcataaaaggacaagaacctggaagtcgtcgaactgtggaagcaaaagacctgtaatgctcctgcttgccgagctgtgagcagtggtagtaaaagagcagtaacattctctcctgcttgccaaacaggagagaagccactggcaccactccctcccactcactgaactatagaagagaaaaaattgaaacaccaaaattggggaaatgcgacttttgcgaaaatttgaaagtgcatgcttcacagaaggaagggggagctggtctattatgtctcactataacaagactaaaattttgcaaataaattgttcctgccataatttatccttggtagaaatgaagaaattggagagagaaaaaattggattctaggtcctgaccattgtttttgaatttttattattttcctacaatttaggctaaattctgaactatttgctggctacaagaggcctctaaaaaagagctgggttttagttttcttcatgctctttaaagcatgatattctgaagactagaggtgattcaatagcctatgaatcttcttcatttggaaccccactgggcctgatctgtttcccatcaccaatgcacttctgctaaacctatatcctatcaagtactctccctaaatgctcagagaccataacagaagatgagggtgtgtgagattataaaagccaaattagtggagtggaatctggaggctaaagcaactccatcttggatgctaatctgccatgttggcttctgattaaccccagttctggagggcctctgaggtttccaatttatctactgtcccttgtgtaagaacaagtacttatcataaatcctgctattagggcaaatttctacccattccctctgaagcatgtgcacctctcctctacatgtaatctcccctacaatagataaacccctctgggtctgggggctaatagtgtgggaacccatcatcttgcctcactgctgcacaagccacaggtgtggcttctgtttctaagtccctattaaatgtttctagataccagaaata

SEQ ID NO: 459917 - DNA, 1249 bp, Homo sapiens
agcacaggatatccaaaagttctgttctctctcagaggacatgctgtcccaaaatatggcactttggcatataaaatgttttaagctgaaggaatttgagaaacagcaggtgaaggaaagattttctgaccctcccctaatgcaggctataaaaccctcacatgagaagtaccctccttatgcccagagaaaaggaacatctttgtctccaaagacacagggacacggagatgatgaacaggccttgctaagtttcctccactctattacccttagcttgtacctttatccaaccacattcttccatgactctccagtcttcatcaaacctggcataaaaacactcagacttaaccacttctttgggtcttcatttccttatgaaggctccagtgcaggtattgtaaaaggtaccacattccaaactctccaatttcagtgtggaactgaaggtttccagaattctggagacaatgaaataagatttgcacactgtgacaacacaggtctctaacagcgaatccaagactgggatttttttaaagctctcttcccttccccaccttgagtgtacaatggagagtgctagtgtggtgtcacatggtgcaacatggctcagtgttgtgtgaaactaagatttggggcatattttataatgaacataacatatgagcataacagtcgtgattaacgtatacaattaaagatatgtggaaatgactccatctccgaccacacatcctctgagtaattttgatggggatggcttatgttctactgccacctcgtggtgggcattctgtgaacatgcatcttggaacagtggggagaaccagtttggacttctgaggatccaaaagcccaagaaaaaaatctgagttctcacgacaaagtcacttcctgctacaacacctggaaaatgtcatgacccgagctagtctcacttcagagtccctggtttctagtacggtgcctgacagatagatgactttctttatatgttgctgaagacaggcagagaggaagaaaggaagagaggataaagggaggaataaacttgatataagcatctttgcataattaacaactgggtcaaattttcttcatttcattgagattcttgatacaagcctctgctgatgaattggattccaaaaaggtagttacaatttacatttatgccaagtgcaagcacatacatttattacatctttgctaaaatcataattatctttaaaactttgcccaa

SEQ ID NO: 459918 - DNA, 1288 bp, Homo sapiens
agcacaggatatccaaaagttctgttctctctcagaggacatgctgtcccaaaatatggcactttggcatataaaatgttttaagctgaaggaatttgagaaacagcaggtgaaggaaagattttctgaccctcccctaatgcaggctataaaaccctcacatgagaagtaccctccttatgcccagagaaaaggaacatctttgtctccaaagacacagggacacggagatgatgaacaggccttgctaagtttcctccactctattacccttagcttgtacctttatccaaccacattcttccatgactctccagtcttcatcaaacctggcataaaaacactcagacttaaccacttctttgggtcttcatttccttatgaaggctccagtgcaggtattgtaaaaggtaccacattccaaactctccaatttcagtgtggaactgaaggtttccagaattctggagacaatgaaataagatttgcacactgtgacaacacaggtctctaacagcgaatccaagactgggatttttttaaagctctcttcccttccccaccttgagtgtacaatggagagtgctagtgtggtgtcacatggtgcaacatggctcagtgttgtgtgaaactaagatttggggcatattttataatgaacataacatatgagcataacagtcgtgattaacgtatacaattaaagatatgtggaaatgactccatctccgaccacacatcctctgagtaattttgatggggatggcttatgttctactgccacctcgtggtgggcattctgtgaacatgcatcttggaacagtggggagaaccagtttggacttctgaggatccaaaagcccaagaaaaaaatctgagttctcacgacaaagtcacttcctgctacaacacctggaaaatgtcatgacccgagctagtctcacttcagagtccctggtttctagtacggtgcctgacagatagatgactttctttatatgttgctgaagacaggcagagaggaagaaaggaagagaggataaagggaggaataaacttgatataagcatctttgcataattaacaactgggtcaaattttcttcatttcattgagattcttgatacaagcctctgctgatgaattggattccaaaaagatattgttgtccaggccacaccatacgggacttaccactcccagttgctaacatctgcacgtatttgcctggaggtctcctctggtcaccagatcctactctgcctgggccacatgacaaggtgatgtg

SEQ ID NO: 459919 - DNA, 1870 bp, Homo sapiens
gaacagtccatggggcctgaggctcctgggaatccgccgaacctccaccgcccccgctgcctccccaaatgtccggcgcctggagtataagcccatcaagaaagtcatggtggccaacagaggacctaggaatctaacttcttgtttctttgccctctaggtgagattgccatccgtgtgttccgggcctgcacggagctggcatccgcaccgtagccatctactctgagcaggacacgggccagatgcaccggcagaaagcagatgaagcctatctctatcgccgcggcctggcccccgtgcaggcctacctgcacatcccagacatcatcaaggtggccaaggagaacaacgtagatgcagtgcaccctggctacgggttcctctctgagcgagcggacttcgcccaggcctgccaggatgcaggggtccggtttattggccaagcccagaagtggtccgcaagatgggagacaaggtggaggcccgggccatcgccattgctgcgggtgttcccgttgtccctggcacagatgcccccatcacgtccctgcatgaggcccacgagttctccaacacctacggcttccccatcatcttcaaggcggcctatgggggtggagggcgtggcatgagggtggtgcacagctacgaggagctggaggagaattacacccgggcctactcagaggctctggccgcctttgggaatggggcgctgtttgtggagaagttcatcgagaagccacggcacatcgaggtgcagatcttgggggaccagtatgggaacatcctgcacctgtacgagcgagactgctccatccagcggcggcaccagaaggtggtcgagattgcccccgccgcccacctggacccgcagcttcggactcggctcaccagcgactctgtgaaactcgctaaacaggtgggctacgagaacgcaggcaccgtggagttcctggtggacaggcacggcaagcactacttcatcgaggtcaactcccgcctgcaggtggagcacacggtcacagaggagatcaccgacgtagacctggtccatgctcagatccacgtggctgagggcaggagcctacccgacctgggcctgcggcaggagaacatccgcatcaacgggtgtgccatccagtgccgggtcaccaccgaggaccccgcgcgcagcttccagccggacaccggccgcattgaggtgggcggagctcgagcagagggagatgccagctcacctgtgcacaggttctgcctggtgcctggggctgcagtgccaagttgccacagcccggcagttagggaggacccgcatgtgggctctgaagtggacatagagtacacggaggcaggcagtgcccagaggaggggcggcgcctcccaggggaagagactgctgggcgcccaggtcaggaggaagccgtgagggtgggagcggggagcaggctggcttggtggagcaaaacgcagggacccagacacaaagccagcccctgaccctccagctcccacaggagccccacgcctggctgccgacggagcccaagcaccacctcccatctgagggatgggctgacatggcaggacctgggggtgggggtggcaaaggactgggcccagaggtcccaatggagtctgagccaagctcaggggcccatcaaggatgggggagggagtcggagatggcggcacaggagggagaccgagaggtgttccggagcggagagggcataggatccgcctggataatgttccgccttccaaggagccgtcatctcgccccactacgactccctgctggtcaaagtcattgcccacggcaaagaccaccccacggccgccaccaagatgagcagggccttgc

SEQ ID NO: 459920 - DNA, 1216 bp, Homo sapiens
aaaactctaagttactaccaagcacgtctattgtctttacggatgaagacctgcacgcaagctgcatctcacagtggcatggcagccacacaccagaaggcagtgaaaataattgcatacaaaaatggggatgggtatcgtaatgggaagttaattgtggctggaacattccccatggacaaatccttgaaactcctcagcgtggccctttataatcttgttctctggcggcgagtagcggcatgtcagccagccaccatggttcctaccaagagccctgtgcagcccgtggtggttgaaggaggctggaccgaacagactcaacaggaaattaaactcatggaacttataagacatacagaggcacacctttctgaaatccaagaaatggaatccaaaataaattttccaattgcaaccaaacgtatagcagtcaagccgagcaacctgtataagcagcccaacacaaaacgagtgtggatttatctaaatggaggcagacctgaagatggcacttatgcctggggcaaaactatttcagagctgctgcaagactgctcctctcgtctcaaaatgacccacccagctagagcactgtacacccccagtggagagccaattcagtcctgggacgacatagagcgagatatggtcatctgtgtgtctatgggacatggtttcaaaaccccaaaagagttaaaacaactgatggagatcagagcaaattatgccagaatccgaaggcagcagggccctcaagccacagacattgtggtgtcaccatccacgaagctgctgtctctggcacatctccacaattaactcctatcagaaccatcggattttctgctgtatttttctggaaagaaaactttctttacccacttataaacagaagactgtgacaagaaggccaattatttccatcgctgaagactctaaatttggcaaatcttctaaataacaatcctgcatagtttattaaaaaaaattagtcgtaaaatttatccttcaaaaatctgcattttaaataaaccctgacagtgatttctcaagactgtaaagatattagtctgagaatgcaactctaacagactgctctgggcatcttttctctttgccttggccaggcctctcagaattgagtgagcgtgtgactccatttgcacagtgggacagatgagtacaactgaaataaaaagtggaggcctctgca

SEQ ID NO: 459921 - DNA, 518 bp, Homo sapiens
cagatagttcagatttccggtcagtcttagtaaagaccccttttataacattgataaaattttatcacagagctatgaaaacaaaattagatttcataactcacatcaggccttgaaggggatgcctctataaattttacaaaccctatcaagtttaatgcacctattctgataattttttcaatagcaaattctactgaacttcatatatactatgtgtgtatataaatgtgtgtatgtgtgtgcgtgtgttcatgtatatacatatatatagatttgtttctctctctaccttacaggaaagaaaactttctttacccacttataaacagaagactgtgacaagaaggccaattatttccatcgctgaagactctaaatttggcaaatcttctaaataacaatcctgcatagtttattaaaaaaaattagtcgtaaaatttatccttcaaaaatctgcattttaaataaaccctgacagtgatttctcaagactgtaaagatattagtctgagaat

SEQ ID NO: 459922 - DNA, 1725 bp, Homo sapiens
tcctgtccctgaccccagcttcactatgtgtccacaggagtgctttcactggtgctgtgactttttacaagctcattatgggaatatgactattaggtgggctaaaaagagcacagcattgcagacaggcaagaatagcagattaaaaggcaaaggtggtgtagcagctgggccagttttggagtctgcaaagaagttaggagaggagagactgggagaaggattaaagacccaaaatgagagacctagattaaagacctacaatactcccctcaaaaacaatactataaaagtactagaagaaaatataggatctgatgtttcatatactttcagtagggaaggccttcctaagtaccacaagaaacctaacttgaaacttgaaatttctaaaaataaaagtaaccgtctcagtcagttttgtgtttgctataaacagaataccatagactagctaatttatattcccaatatggagatatctagactgttcactatgattttttttctttttcaagtttttttcaagtttccctatggtacatgtccatttatcctgatctgtaaaatggggatattaaaatcagtttaaatcatataacttgcagttctgtaggtctaatatggtaaaaaaaaaaaaaaaaaaagacaatttcctatgatctttcctaatagtacctattccataaagctcatgagaaaattaaaacatctaatgtgtctaagctcttagcacaatataaatatgctggaataagcttctataaattttagttactattcctactgttattaaaataagaaaagccaaaaagtattaggtcaatatgcaagtgaagaaatacattcaaaataatactatccagtagccaaagtaattcagaataagttacttttttaagtttctcaaagtaagaataattagcctttatttgcctttctggaaaataaatgttgttgaaacaatatgcatgactttgtatgcattcaatgcaataatctttcaagaaatcaccccagaaatattttgatactgcctttagctcatatcattaaaaggttttcagtatccagctttaaattataacattgtacagttttaatatagttattttgttccataacaattgagaccaaaaagctgagagaattactgaagtggattcaaactcaaaatatctaaaatctgaatagactttggggaagactaacatcgcaaattgcaaattcgtccaattgattttagaagtataatctattcaatgaagcaatcataataaattcagaggatatttaatctctgagaacttgaattttatgactatgaaaagctgagaagtagcaggtatatttggataatatttcacttattctactgcattaagacctgtcttatggttttaaagatgttaagtatattcttaataattttctatatttcggtaggtttatctgaccatttacagatgagcgtgcttatatacaaatatgtcaatgaccacataaacctagaaacaattacatctctcaaaatgttagtggatatgaagggctacaactagaaatgggaaaaaaagagcttgaaagagaagctgaaaaggactctaagcacctgtcaagagattggcatttacatttcttaaatgtgaaaggagggaaaaaaagaagctctgtgggtatataagtaagttttagatctggttattaaggaagttggcattcagc

SEQ ID NO: 459923 - DNA, 3435 bp, Homo sapiens
gggctgccctcacctctacatctgtaggcgatgctgttttcagtaaaaaacaaaactgggcaaactaaagtacgtcaagaaacaaaagcaaagtaccatgatgcctcacccttcaaaaacaaaagcaagtatattaagacattaaaaaatgaaacaagcatttttttttattattttcttagaaaaggcggcgagaatcctgagtggaagggatctgaactttcatgtcatgtacttcgagaagagggtagatgagactcaagaatgataatcagaccagtcctactcctcccaacccccaaaagatggcatttacacatcacggaaacctatgggtctaacaggttattctctctctctcagttcttgggaaaagggagacaagccctcggccagattcctttagggaagagttctctgtgccggtggctggagcttgcggtgcgtgctcagccaggaggccccagccaggcacctctagactccgatgtgccacagagggcaggggctcccgctgtcacttccattttagaccaaacagctcctgggtgcagcgactctttcaccctctcttcagggtggggagaaacggggtggactggagcccgcgcggccctcacgaactctccctgagcagccccagcttccgcagggcctccctgcgcgcctcctccgaggagccgcggcccgcgaactgcacggtgatgccctggggccggggcagggagtctgcgcggcgccagtcctgggcgccgttgggctgccggggcccggggaagctctgacgggcccgcgtgctgggcagggccgggccagggcggaagcagagggacttcccagcgggcgcgaaggagctgggtgcgctcttcagggcctcgtgcgcacttgggaagccgttggccagcgccgggccccgcggagcctgaccccctgcccggagactctcagcggggcccggcaggccccggccacgcgccacccgctccggggaggagccgccccctggggccccctcgccggcgtcccccgcggcggggaaggcgccggcgtggccgtggatggtggccaacacctgcgccctgcgctcctgcacgctgacggccgccctggacagggtcctgcggggctcccgggccgcgccgttggtgcaggccctggaagacaagggaggagcctgtgagccaccggcccacgtgaaagtaaatgcatgaagttccctctcgctgaactgaaaagagcctcaacctggacctgacaccaacttcgccggtgctgcctggctggttgctctagcgccctgaaggagaggaatgcagtcatatttcactgtgattttcagtgtcatttccacgaagactaatgatgttgagcttttttttctccataatacaggaaagagacccaaacccatgaagaatgagatacatgtacagttttgattataaaaccaaagaataatggcttcacaagatgacggctgggctcctgggctgccttcagtgtctttaaacaggtaatacagatcttgctttcttctctctctctctgagagatcttgactgagacagacacaccccaagtgtgcagcatttgaggcgctccgagaccctcatgagcttgggtcctccatggctgcctcgtcactatatggtgagttcctaaaagggggcaaactgagtcttatcccatcacctctcagttcttatatgcagtaggcatgtatgaaatgttgagtgaattggccttttagaaaagctactgagttatgttttaaagcagctgtttgaccaggaccatttggattccagctgggtgagaaggcagcatgaaagggcggggttatggctgatggggcggctcctccctcaaggcacctccggttcagtgtcccctcctgaagtcacagagcaaacagcacatcagatttctagcacactcctcagactttgctccggcccggccacgtgggaagccccccagtgcttgccatgccttcttagtccatgagccatgtgtggggccaaaggtgtcaagtgctctggagcaacagggtggctcaggagctgccggctgcctggtcacagaccgctgtgtgacttcagggccacagcacttgtgggcgtagggagagggggattcgagacagttcatcaaatattaaatcctaaaaactcattcataaatttggatcactgtttctgcccaagccagaggtaaaaacaaataacaggtagacttgggatgtccccagccaccctcacaaaagcagccatgctgttccagctccactccttgagaaccatgcgagtgcagagctctccgccctttccgagcagccaaatcctatttcttctagaggaagcttcgggatgtgtgaaggcagacccgacttcaggacctcattcagagtgagagcctgggaacgctggtgtgaggcagcaccgtgccctcgccgtgcacccagggggttttgtgagacgaggcacaggaaagcatgaaagaaaaactgtcactcaccaaagtgaagcttctggagcgagagctgctgcttcgactctccaggctgccgcctctgctgaaggctcggagcctgcagctgggggacgtgtctgagttcatgtcagatgcgtctgatttccgggccggctcgatcacaggaagcagggcaggagccagcagcccattctgcggcaacagctcactcctagagacaccaaacacgaatgacaatggagcaaatggccacactcgggtatacggagcagctcaagcaaccaggtcttcctgccattcccctgaaagggctggttttgccaaacgccagagccacattccagctgccgagccctgcagactcttcctttacgacgtcagttgtatccacttcccttctggtcccacacccaagttcaggaccattttagcacgtgcctacattattgccacagccattgtcttcatctgttttgtgctgctgtacaaggaacaaacttatttggcttgtggtttgggaggttgggaaatccaagatccagggccacatctgctgaaggccttcctgctgtaccgtaacataacgggaggcatcactggtgagagagagagagcacaagaaagggccaaactcgcttttatagtgaacccactcctgcaataacaacgttcaaatgctaaccacctcttcccgtccctgcccctcaacatggccatgctggggattaagtgtccaacacatgagctttgggatacatgttccaactacagccgccacctgctgtcctccttgccttctccctcttctctacacttctgccggattctctagttggattaatcttgaaacatcacttaattgttaccactctcccaaaagcagtcaattttaacccattcccaacaggcttgagaataaaagtttcagccaatcagtcatca

SEQ ID NO: 459924 - DNA, 757 bp, Homo sapiens
tgtccttgcccagtgtaagtttcctggagctgcagcagcctttttgtcaccatgagggcagctggtgggaaccctaggaaagcaggaaatcacctagagccggaacagcctgagcctctgaaccaacccacagctgactacccgtcactttgtcgtgtctctgtgatttgagtccatcatttcaactgcggttgaaggtatactttgacaaagccctgttcttaaccattatggtgaaacgcatgaatccctcttcgggctatttgctgcatgatcctcagcaaattaaatagttaatctccctcagtttcctcatttataaaggataggatgataaagcatagagatcgtgaggattacatgaggcatttacctagaagatacttagaacaatgctggacacaaactaagtacttaacaaatgtaacatttctcctattagttagtactcctaagactaattatgccaccactgattcacagtcccttatcaaaaacctttcaggccagatgtgtttgtgaaattcagaattttttgaatgtttaaaaaaggtgagatatattgtatgcccccgtagtcaaacaatgtttctatagcagaaatgtgtgagtattcacaaatattcaccctaagtgggatatataaaggttgtaaatagggccaggcacagtggctcatgcttgtaatcccagtactttggaaggccaaagcgggaggattgcttgaaccgcagttgaaagacgcagcctcggcaac

SEQ ID NO: 459925 - DNA, 2079 bp, Homo sapiens
ctgatttgccaatgaacacactcattttggccatgccaagggggatctgtgtgtgtgatggggccgggccaaggagcagtttgattcaacttttgcaaagccatgacttctgtttttccatttacccaatcttccccctttcaaactcccatgacgtcttttaaaaagcaccatgtctgctcatcttactgagatgtacaagataacacgtaaagcctgtagtagggagcctggcatggagtaggcatttccgaggcgctccttccatgccctgctgccctcttatttaaacattcccagcacttccttgggcactagaataaggttagattttacctttgaaatttacggtttctttagatattacaataacaataattggttatcgtctttacctggaaatgcttccccctttgattagtctgttttgcactgctataaaggaatactgaggctgggtatttacaaagcagtttatttgtctcatagttctacagactgtacacgaagcaacggtgtcagcatctgcttccagtggggcctcaggaagctttcaatcatggcagaaggccaaggggcagcggggtctcacgtggcaagagagggaggaggaggtgccagcctctttaaacaatcagctcttgcatgaactcttagagccagaactcactcactacctggaagacggcatggagacaataatgagggatccacccccatgacccaaactcctcccactaggcccacctccagcactggtggtcacagttcaacgtgagatttggaggggacaaacatccaaaccgtatcacccctcaacccctcaactacacctggtttgctccttgttttctagattttgactgaaatgtccccttcccggcaaagccgtgtggaccacccgggctaaagcagccacctggtgctggcctgtgtggcccaattccagttctccagggtgctcatcactctgtggcagtttgtcttctggtttgtgagagaagaataaatctgagggacccaaaatcactaaagggaaaagtcaagctgggaactgcttagtgccaacctgcctccccttctattcaaagtcacccctctgctcaatgaaataaatgcatatctgattgcctcctttggagaggctcatcacaaactcaaaagaatgcaaccatttgccttttatctacctatgacctggaagccacctcccgcttcgagttgtcccgcctttccggactgaaccaatggcatggctttctgacatgagcctctgttgcacacgcttgtgtactctttattctgcatctgaagtggcttgtgcagggccatgtgtgattaaggggtttgtctgcttccccaccagactccttgctggtcccgcttaccagccagttgccggggcctgtactgccccggggccgtgtattccaggcttggcttcatgccatgccctctccacctctctcctcctgcgaggtgcagccagtgttgcatggggacttcccatcgtggctcaggcttgctcctctgacctctcctggcacttggtcctccaaaggagctcccctttctgctggccatctgcgtttgctcacctggacttgctgagggagctcgggtgccctgtgtgtgcttatctgtgtgtcccggcgcccggcacaggcagggcccagagtgggtgcctgctcgaggccaggggatgggtgagttcagcagttagctgtggggtgtctgcttaggcccagcccttgggggcctctaggaggggtccccctgctctcctgccctcctgccctctctgcaggagaggctccagtgaagcagacacagctcgatgttaagtgagacaagtcggtgctgttgataaataaaaatattaataaaccacaaatgtaccttccaaagtcaatagttttatgtttgaatggaaagtactatctcccatcttaacctacccctgcttctaagagcttgacaatgtttgttaaatgccacacaccagtgtcctttctaagtcatgttttatttcaacaatagattgaaattttaccatgatgttttatatttcatcctaag

SEQ ID NO: 459926 - DNA, 1787 bp, Homo sapiens
tgtccttgcccagtgtaagtttcctggagctgcagcagcctttttgtcaccatgagggcagctggtgggaaccctaggaaagcaggaaatcacctagagccggaacagcctgagcctctgaaccaacccacagctgactacccgtcactttgtcgtgtctctgtgatttgagtccatcatttcaactgcggttgaagttctacagactgtacacgaagcaacggtgtcagcatctgcttccagtggggcctcaggaagctttcaatcatggcagaaggccaaggggcagcggggtctcacgtggcaagagagggaggaggaggtgccagcctctttaaacaatcagctcttgcatgaactcttagagccagaactcactcactacctggaagacggcatggagacaataatgagggatccacccccatgacccaaactcctcccactaggcccacctccagcactggtggtcacagttcaacgtgagatttggaggggacaaacatccaaaccgtatcacccctcaacccctcaactacacctggtttgctccttgttttctagattttgactgaaatgtccccttcccggcaaagccgtgtggaccacccgggctaaagcagccacctggtgctggcctgtgtggcccaattccagttctccagggtgctcatcactctgtggcagtttgtcttctggtttgtgagagaagaataaatctgagggacccaaaatcactaaagggaaaagtcaagctgggaactgcttagtgccaacctgcctccccttctattcaaagtcacccctctgctcaatgaaataaatgcatatctgattgcctcctttggagaggctcatcacaaactcaaaagaatgcaaccatttgccttttatctacctatgacctggaagccacctcccgcttcgagttgtcccgcctttccggactgaaccaatggcatggctttctgacatgagcctctgttgcacacgcttgtgtactctttattctgcatctgaagtggcttgtgcagggccatgtgtgattaaggggtttgtctgcttccccaccagactccttgctggtcccgcttaccagccagttgccggggcctgtactgccccggggccgtgtattccaggcttggcttcatgccatgccctctccacctctctcctcctgcgaggtgcagccagtgttgcatggggacttcccatcgtggctcaggcttgctcctctgacctctcctggcacttggtcctccaaaggagctcccctttctgctggccatctgcgtttgctcacctggacttgctgagggagctcgggtgccctgtgtgtgcttatctgtgtgtcccggcgcccggcacaggcagggcccagagtgggtgcctgctcgaggccaggggatgggtgagttcagcagttagctgtggggtgtctgcttaggcccagcccttgggggcctctaggaggggtccccctgctctcctgccctcctgccctctctgcaggagaggctccagtgaagcagacacagctcgatgttaagtgagacaagtcggtgctgttgataaataaaaatattaataaaccacaaatgtaccttccaaagtcaatagttttatgtttgaatggaaagtactatctcccatcttaacctacccctgcttctaagagcttgacaatgtttgttaaatgccacacaccagtgtcctttctaagtcatgttttatttcaacaatagattgaaattttaccatgatgttttatatttcatcctaag

SEQ ID NO: 459927 - DNA, 1398 bp, Homo sapiens
catcttccaccatgattgtgaagcctccccagccgtgtggaactgtgactccattgaacttctttcctttataattacccagtctcagaacactagaagtccctgggagactctgactagtgaagctcatacaactaactgtgatggtggagatgaggatagtcttaaaggtaacacggttgcaacagactcatctatgcgaatataaagactcttccttctgcagcaagtagaaggcatgactgaagcaactcaagtctacatcatcccagcttcgcaatctcccaagagaacaagagccccagttggccaacatctgaacataaattctcatcagtccaccttcataagcagacggggagggtctccagggataacaggaatttaaccaacttcagcaatgagcctggtttacagcctcctgccctgcagcctgttcttccacaaaccctgggtaaaatgcagtcaccttgttggtttaaaccagctcttgacagacccccggcaacatacagatgaacgcaagtgaactttctcatgaccacgctaaagtctccaccctgggcaacctgtagcttcattaccatgacatgcaacctatgcgctgacgtaatgactcactgcatctgtgcaactagacctctcctcgtcatgcaatgatgctccctgtctcctctccattgcgccataaaaccctcctgtcactttccctcggaaagacactgctttggagaatacccccagtgtcacccttacttgagttaaataaaactcctattgatcaaagacagtgttcttgtggagagtcctttgttattcatgagccagcccctggtcaattggggaaactctgggaaatagaacaaggccctaatgaaaatccatcagtattcctaaagatactacgagaatggctccaggattacaccctttggaaaccagaggaccctgaaaagctgagtagtgcttggttcccaattcatctctcagagtaccctagatattcagaggaaactccaaaactggtgataaatccaggcactctcccttcccaactgatagacattgccttcaagatcaacaaaaatagagatgtggcatctgacaaaagggaggacaagaagatggagagacaggctcattttctggcagtagccctacagactacttcaggtgaaccaggaggaaggaagaagaaagcatggataagtaagcagagaccccgccatgggactcagagggtgcctaagctgggacccacacaatgtgcttactgcaagcaggagggacactggaaaaggaagtgtccagatcctccccggagggggaagaaagaggacaaacccaagcaccagttccctgtaaatggagagaaaactgactaacagggtcctgggg

SEQ ID NO: 459928 - DNA, 1178 bp, Homo sapiens
caagggacaattactgctgccaatgataatttttaagccttcaagccagaattaaaagtttagaaaatgttagagacagggtttcaccatgttggccaggctggtctcaaactcctgatctcaggtgatccgctcctctcagcctcccaaagtgctgagattacaggcgtgagccaccatgcccatctgtttaaaacatttctgagaacagtacctgatctaccaggcaatctgggtcaccaaaatcctaatatagttttggtattacctaaggtgccagacactggctttacccacagacattctgatttaattgatgatatagccaactctggaaaaacaggctggcgctgggtggttaggagtcttctgggaccacgtttggactttgggaatttggagtttattctctaggcaatgaagtacaatgaaaagtctttaaaaggggaagtgacatcaaagtttcagaaagtggtttaccgtggtgtgctctttccaccacgcggatagcataggctgacatgtatgataagcaaccttgagagcaaagggaatgcattgcaccatgaatatggagagtgagctttaaaatagtatgaaagacaaatgtttaaaggtatacatttctttcagagaactttttctctctctttctctctctgacagtgtgtgtgtatctcctgtgtctctctttccctctctcacatgcacacataagtgcacacacacacttctcttggaaactgaaggaggcaagaatatgatgccattaacaaatgctctttggtggacagcaataataacaactgctaactttcactgaggactacttatgtgccagataccatgtgaagcgctttgcttgtattagatcatcgaaacctcagaaaaactctataaagtgggtgctaatattttctagatttttcagatacaatactgaggatcagggagattgaataagttgtccagtgtcacccctggtagctgagagagctggtttggatgcctagggctgtttgtctccaaacctgtgccttgcacccttagctctggttcctcccctctcatgtcatgtaatcagcacaaatttcctgaagtaaggctgcatgcatataacaagaataaaggaataaaaatagaggatgccgtggaatgggagaaagtggactacttac

SEQ ID NO: 459929 - DNA, 1500 bp, Homo sapiens
ggacctttggcaggagacacatcccttctcctgtgatgtgtcagttagtgtagagaagcaagctggcatggacttgagagccggggagatgaaagcatggaaataaaaaagcaaattacagggatgagaagattgctgaacgacagcactgggcggatctatcagcgagttggcaaagaaggagagaaactaaaagaagagccccaggacctggatttagtctggcctccacgtttgaactcctctgctgaggccccgcaaagcctccacccgtcttcacgtggtgtgtggaatgagctaccgccccagagtggacagttttcagggcagtatggcacccgttctagaaccttccaaagccagccccaccctaccacgagctccaatggagaacttccagtggtgaattcatcagctggatcaaactgctgtacttgtaactgccagtcaacgttgcaggccattctacaagaactcaagaccatgaggaaattaatgcaaattcaagcagttggaactcaaaacagacaacaacctccaatttcccttatatgctcccagcgaactgctgtctcacgaaagagaaataaaaagaaaaaagtgcccccaaagactgtggaacctcttactgtgaaacagaagcccagtgggtcagagatggagaaaaagtcggtggtggcctctgagctatctgctctccaggcagccgagcacacctccccggaggagagccgcgttctaggattcggcattgttctggaatcaccttcctcagatccagaagtacaacttgctgaaggctttgacgtgtttatgcctaaatctcagctggactctatattgtcaaactacactcgctcaggaagccttctgtttagaaaactggtgtgtgcgttttttgatgacaagactttggctaactccttacccaatgggaagaggaaaagaggactcaatgacaaccggaaaggactagaccaaaatattgtgggtgcaataaaagtcttcacagaaaagtactgtacagctaaccatgtggataagcttcctggcccaagagattgggtacagattctacaggatcaaattaaactggccagaagaaggttaaaaagaggctcagagatcgcggacagtgatgaaagactggacggcattgctctaccaccaacaggactctactgacttccctccaaaggatatctgaagattctctgcccacaaaacccaggaaaaaaagcctgaggcccagaaacattaagtggctttcccacggcctcacagctggttgacggcctggccggaacccaggtccctcgactcccagccatgataccatatagctttctcatacctaagccaaagccagcttttctctgcatgtttcttaaagatcctaagagatgatggatgtgctaatccctttaggagtcctcttcactgtctcagtcttcacaattaaaatgttcgtcgtcagtcggcccggttcactgcagctga

SEQ ID NO: 459930 - DNA, 1539 bp, Homo sapiens
ggacctttggcaggagacacatcccttctcctgtgatgtgtcagttagtgtagagaagcaagctggcatggacttgagagccggggagatgaaagcatggaaataaaaaagcaaattacagggatgagaagattgctgaacgacagcactgggcggatctatcagcgagttggcaaagaaggagagaaactaaaagaagagccccaggacctggatttagtctggcctccacgtttgaactcctctgctgaggccccgcaaagcctccacccgtcttcacgtggtgtgtggaatgagctaccgccccagagtggacagttttcagggcagtatggcacccgttctagaaccttccaaagccagccccaccctaccacgagctccaatggtatggttgtcaacaaacattcagaaggctctcatgggggagaacttccagtggtgaattcatcagctggatcaaactgctgtacttgtaactgccagtcaacgttgcaggccattctacaagaactcaagaccatgaggaaattaatgcaaattcaagcagttggaactcaaaacagacaacaacctccaatttcccttatatgctcccagcgaactgctgtctcacgaaagagaaataaaaagaaaaaagtgcccccaaagactgtggaacctcttactgtgaaacagaagcccagtgggtcagagatggagaaaaagtcggtggtggcctctgagctatctgctctccaggcagccgagcacacctccccggaggagagccgcgttctaggattcggcattgttctggaatcaccttcctcagatccagaagtacaacttgctgaaggctttgacgtgtttatgcctaaatctcagctggactctatattgtcaaactacactcgctcaggaagccttctgtttagaaaactggtgtgtgcgttttttgatgacaagactttggctaactccttacccaatgggaagaggaaaagaggactcaatgacaaccggaaaggactagaccaaaatattgtgggtgcaataaaagtcttcacagaaaagtactgtacagctaaccatgtggataagcttcctggcccaagagattgggtacagattctacaggatcaaattaaactggccagaagaaggttaaaaagaggctcagagatcgcggacagtgatgaaagactggacggcattgctctaccaccaacaggactctactgacttccctccaaaggatatctgaagattctctgcccacaaaacccaggaaaaaaagcctgaggcccagaaacattaagtggctttcccacggcctcacagctggttgacggcctggccggaacccaggtccctcgactcccagccatgataccatatagctttctcatacctaagccaaagccagcttttctctgcatgtttcttaaagatcctaagagatgatggatgtgctaatccctttaggagtcctcttcactgtctcagtcttcacaattaaaatgttcgtcgtcagtcggcccggttcactgcagctga

SEQ ID NO: 459931 - DNA, 1153 bp, Homo sapiens
tggtttgtttggagtatgtcattcttttctttcatgctcaggagaacttccagtggtgaattcatcagctggatcaaactgctgtacttgtaactgccagtcaacgttgcaggccattctacaagaactcaagaccatgaggaaattaatgcaaattcaagcagttggaactcaaaacagacaacaacctccaatttcccttatatgctcccagcgaactgctgtctcacgaaagagaaataaaaagaaaaaagtgcccccaaagactgtggaacctcttactgtgaaacagaagcccagtgggtcagagatggagaaaaagtcggtggtggcctctgagctatctgctctccaggcagccgagcacacctccccggaggagagccgcgttctaggattcggcattgttctggaatcaccttcctcagatccagaagtacaacttgctgaaggctttgacgtgtttatgcctaaatctcagctggactctatattgtcaaactacactcgctcaggaagccttctgtttagaaaactggtgtgtgcgttttttgatgacaagactttggctaactccttacccaatgggaagaggaaaagaggactcaatgacaaccggaaaggactagaccaaaatattgtgggtgcaataaaagtcttcacagaaaagtactgtacagctaaccatgtggataagcttcctggcccaagagattgggtacagattctacaggatcaaattaaactggccagaagaaggttaaaaagaggctcagagatcgcggacagtgatgaaagactggacggcattgctctaccaccaacaggactctactgacttccctccaaaggatatctgaagattctctgcccacaaaacccaggaaaaaaagcctgaggcccagaaacattaagtggctttcccacggcctcacagctggttgacggcctggccggaacccaggtccctcgactcccagccatgataccatatagctttctcatacctaagccaaagccagcttttctctgcatgtttcttaaagatcctaagagatgatggatgtgctaatccctttaggagtcctcttcactgtctcagtcttcacaattaaaatgttcgtcgtcagtcggcccggttcactgcagctga

SEQ ID NO: 459932 - DNA, 437 bp, Homo sapiens
cactgtatctatcctagcattatatctacagagcagaggcaggacctttggcaggagacacatcccttctcctgtgatgtgtcagttagtgtagagaagcaagctggcatggacttgagagccggggtgggtatctgccccatgtggcctggctatggctgctctgttcagggagcctggggtcaggggtggcggccaccaacctgtgccagagaaggctagtctctgcatggacttcagtgcaggcatacccggcctgatggggagggctgtgggtggaaaccacacagaaaagatgcctcctcttgcttgaattgtggtgttaactagccgggaacgtatgtgtctggttgctgaaattaataccgcatttgcctgtgggcttatctttcaggattcctttgggacctcttccagacacaccctgttccgtagcc

SEQ ID NO: 459933 - DNA, 1560 bp, Homo sapiens
aatggggctgtgaaagcattgatcattgttaaatatcaaagagaaacctccacggtatgccacatggaaagtgtaatttactctttcatgaaccatacattcatacctgcctattatgtgccagcagtgaatggaagacgtgatctctgcccttgctttgagcttgcagtcttgatgaacactggacattgttattttaaaaaatcactggttaacgaactcagagtaatggagttggtgtgtatctttcccattcattcttactttgccacttgtgttcccgtcaatcctattcattattgttttgtgtcctgcttacagatctgtggccacagcatcacacgctcagccatcactttatctgaaagctttccccgctacccactcccacccaataatggttctgtttgcacacagtaggtgcatcatgctactcgcattgtgacattttagcatcgctggctcttgctaaaccccttgtttcttcatctcctgccattctcaggaggacaggagagggcccggctcatcactcgacacatctgcggcttggctccccttaggtcaagggtgcatcatcttgcagccaagctgtggcttagagggcactgggacaaagcagtcctgcccatttgggcagcaggggcgagaagtgggcagtttcctgtgaacatcctgatctttctccacgttcacagtcaaccttctgtttggttggtcccccatttctagccccttgaccccaacaagtaaagtactgggtcatgacatcaaatgttccagatacagaaagagaatccttcacctctgcattgcatattacttagttgtcattctagttgatgtatcaaccaagtattgtgtgtagggttgggtttaggtctgaattttttctgagtggtctgctaaaatcagatttctgagcctgcatgctgagaacccattccaagactagaacaattgcaccaagatgtggaggaccatcaggccctgcctgaacaaccagccttgattctagctctttcccaccctctcgtagtgttttacatgccacagtcttcacagaaaagtactgtacagctaaccatgtggataagcttcctggcccaagagattgggtacagattctacaggatcaaattaaactggccagaagaaggttaaaaagaggctcagagatcgcggacagtgatgaaagactggacggcattgctctaccaccaacaggtaaataaaacgcatttacattttcatcacctcctggaaaatacagcccacaaaactatttgcattgaaaacgattttaacattagacatgcagacacttgagcaaactgcttctgcagtggaccaggccccgtcattggagcttctcaaggccccgtactcagagatgtttttcatactgaatagaaaaacgtttttctcacactcttattttcataaaaatctcagaagagcaaatcctaagaactaagtatcataacattttgcctccccaaacctttggacattacaaaatatttttaacgtgaaatgagatttcaccttaaaacgggg

SEQ ID NO: 459934 - DNA, 1443 bp, Homo sapiens
ggacctttggcaggagacacatcccttctcctgtgatgtgtcagttagtgtagagaagcaagctggcatggacttgagagccggggagatgaaagcatggaaataaaaaagcaaattacagggatgagaagattgctgaacgacagcactgggcggatctatcagcgagttggcaaagaaggagagaaactaaaagaagagccccaggacctggatttagtctggcctccacgtttgaactcctctgctgaggccccgcaaagcctccacccgtcttcacgtggtgtgtggaatgagctaccgccccagagtggacagttttcagggcagtatggcacccgttctagaaccttccaaagccagccccaccctaccacgagctccaatggagaacttccagtggtgaattcatcagctggatcaaactgctgtacttgtaactgccagtcaacgttgcaggccattctacaagaactcaagaccatgaggaaattaatgcaaattcaagcagttggaactcaaaacagacaacaacctccaatttcccttatatgctcccagcgaactgctgtctcacgaaagagaaataaaaagaaaaaagtgcccccaaagactgtggaacctcttactgtgaaacagaagcccagtgggtcagagatggagaaaaagtcggtggtggcctctgagctatctgctctccaggcagccgagcacacctccccggaggagagccgcgttctaggattcggcattgttctggaatcaccttcctcagatccagaagtacaacttgctgaaggctttgacgtgtttatgcctaaatctcagctggactctatattgtcaaactacactcgctcaggaagccttctgtttagaaaactggtgtgtgcgttttttgatgacaagactttggctaactccttacccaatgggaagaggaaaagaggactcaatgacaaccggaaaggactagaccaaaatattgtgggtgcaataaaagtcttcacagaaaagtactgtacagctaaccatgtggataagcttcctggcccaagagattgggtacagattctacaggatcaaattaaactggccagaagaaggttaaaaagaggctcagagatcgcggacagtgatgaaagactggacggcattgctctaccaccaacaggaaaaaaagcctgaggcccagaaacattaagtggctttcccacggcctcacagctggttgacggcctggccggaacccaggtccctcgactcccagccatgataccatatagctttctcatacctaagccaaagccagcttttctctgcatgtttcttaaagatcctaagagatgatggatgtgctaatccctttaggagtcctcttcactgtctcagtcttcacaattaaaatgttcgtcgtcagtcggcccggttcactgcagctga

SEQ ID NO: 459935 - DNA, 1283 bp, Homo sapiens
aatggggctgtgaaagcattgatcattgttaaatatcaaagagaaacctccacggtatgccacatggaaagtgtaatttactctttcatgaaccatacattcatacctgcctattatgtgccagcagtgaatggaagacgtgatctctgcccttgctttgagcttgcagtcttgatgaacactggacattgttattttaaaaaatcactggttaacgaactcagagtaatggagttggtgtgtatctttcccattcattcttactttgccacttgtgttcccgtcaatcctattcattattgttttgtgtcctgcttacagatctgtggccacagcatcacacgctcagccatcactttatctgaaagctttccccgctacccactcccacccaataatggttctgtttgcacacagtaggtgcatcatgctactcgcattgtgacattttagcatcgctggctcttgctaaaccccttgtttcttcatctcctgccattctcaggaggacaggagagggcccggctcatcactcgacacatctgcggcttggctccccttaggtcaagggtgcatcatcttgcagccaagctgtggcttagagggcactgggacaaagcagtcctgcccatttgggcagcaggggcgagaagtgggcagtttcctgtgaacatcctgatctttctccacgttcacagtcaaccttctgtttggttggtcccccatttctagccccttgaccccaacaagtaaagtactgggtcatgacatcaaatgttccagatacagaaagagaatccttcacctctgcattgcatattacttagttgtcattctagttgatgtatcaaccaagtattgtgtgtagggttgggtttaggtctgaattttttctgagtggtctgctaaaatcagatttctgagcctgcatgctgagaacccattccaagactagaacaattgcaccaagatgtggaggaccatcaggccctgcctgaacaaccagccttgattctagctctttcccaccctctcgtagtgttttacatgccacagtcttcacagaaaagtactgtacagctaaccatgtggataagcttcctggcccaagagattgggtacagattctacaggatcaaattaaactggccagaagaaggttaaaaagaggctcagagatcgcggacagtgatgaaagactggacggcattgctctaccaccaacaggtgcttgtggtgggccctgcactgttctgccgggtgggagtgcagcggtgacccta

SEQ ID NO: 459936 - DNA, 2896 bp, Homo sapiens
aggtccaggagaaaatggagcggagtccctgcaggaactgcctcagactgcccctgagggggcctggcttgggaccctccctgtgctaccaggctgctgttggggccaggagggcagagagagcagccacctgtacggcatcaagtaacactatcactcagcacacccaacatccacacaacagccacagccctctaccctgagggggcagggaagctcttggtttactgtgtcacccaagcgactgggagccacgtgctgctctgggactgagcctttggagccgaccgatgactgcactgggctgaccgcaacaagctgaccacacacactcctcactcccctggccctgatgggcggcagacaccatggtgcagacggatgtgctcctaccagagccagcaccgcagacagtgtcaccctgcgagctgccctgcaaagagtatgacgtggcccgcaacatgggcaactgctatgctcgctaccaccaggccttcgccgactgcaaccagtcggagcgggagctgcaggggcgcgagagccagcagctggccgcagagacccaggcgctggcacagccgacacagcaagactccacgtgcagggtgggcgagcgactgcaagacacgcacagctggaagtcagagctgcagcacgaggtggaggtgctggctgcagagaccgacctgctgctggcccagaagcaacggctggagcgtgccctggatgccatggaggtgcccttctccatcgccactgacaacatgcagtgcagccagcgccaccagcacgccaaccttgtgcgtgactatgtggagacggagctgctgaaggcctatccccctgcaccctctcagtgcctcaagaactgctgcagctcccgcaaaccttctgcctgcaacaagggtgcctgtgaagtgatggagacactgacagtgcaggaagaggcaaacccagggacagaggggtgcaggactcgggccctggcacacaaggaggaagctgagcccatccggaacattcaggagctgctgaagagagccatcgtgcaagcagtgagccagatccacctgcagcatggagggtccccagtggggccctccctggccacacaccaaggccctgccccacctcgccccagactgaaccgagagcacacggagatctgcgagatggactggttggacaaggtggaggcctacaacctcgacgagacttgcgggcgccaccacagccagagcaccgaggtgcaggctcatccggcactccaccaccttccaagagaggggggccccagctctgcccccgtgcttgccctggctgtggtctcgcctccctctgcttgggggccccagcggcgttccttcccccagcctggcccagatgccttcccccccgatggcttttgggcaatccccgcagcgcctccaccccagagacccggaccaagttcacacaggacaatctgtgccgtgcccagcgcaagcgcctggactcggccaacctgtgggttcttgtggactgcatccttcgcgacacctccgaggacctgggactccagtgtgacgccatgaacctggccttcgggcgccgctgtgaggaactggaggacgcgcggcacaagctgcagcaccacctgcacaagatgctgcgggaaatcacagatcaggaacacaacgtggtggcactgaaggaggccatcaaggacaaggaggaacctctgcacatagcccagacccggctgtacctgccctcacaccggcccaacatgcagctgtgccgcgaagcagcccagttcagccccagctcacaccccccaacacccccaagctggtgagtgaggtggaggagctgtacaagtccatcacagtgccgcgggagaagcttctacaagcagagcagtccctgtgcaacctcgaggacatccacatgagcctggagaaggacatcaccgccatgaccaacagtctcttcatcgaccgccagaagtgcatggcccatcgtacttgctaccccaccatcctgcagctggctggctaccagtgagcagcggcacggtgcttccccccaatcccccaaataaacagtgcgttagctttctgcacagtgtgtgtgtgtgcccggtgggacctccagttgctgtccatctgaactggcctttgggtcccctgtgaggctagctctgcctatggactcgtcatcccaacagttggagatgaggggtcagaactgaggggttccctcatctgcccccttgtacagtggttcctagagatcactctcacaggcattagatgcatggctgaaggactgctggcatcagggagcattgagggaagcacatggagagggggactggggttccccatgactgtgccccagcagacccccacacctttccccacaggggatgctcccagacacttctgagctgccataggtgcccatttcacaggtagggaaaccaaggctcagatccagggagctgcagtatgtgtgcatccacctgtctttctccacaagccccaggagctcagggacaacaatggggagcccccgccctggttgcccctaccctgccacaggcccacagtctccccctggggatgtggctgcccacctgcaaagctgtgtcctcatcacccaggtctcagccgtgcagagctggttccaatggctgcaggcaccacagtcacagagctggaagaaacaagcatcctccccaagagtctgcagagggagcgcatttctgcccacaccttgattttagacttgtggcctccagaactgtgagagaataaattcctgatgtcgtaagccatcactacagcagctcccggacactaatattgctcaatccgtccaggctcctctctctgtttgttgctgttctagg

SEQ ID NO: 459937 - DNA, 1740 bp, Homo sapiens
cacgcaagcacgccttaaacacacagatatagacatgacactgggcaggtcatgggtcgggggcctcccagtgccagggacctgtgcccacgtggtctcaccccaccctgtgctacctcatcttcccgggaggaagctccttcagacaaggtgagctcctggaggccacggggccagagaggccagagagggccattccctgctgccctgagggtgttgtccccacctctggtggaaagtatgacctacgcctgggctacaggcatagatgggccgtccttttgtttcccttgttaacggatgcctggtggccccttctgagcctaagtacctttcttccttccctgcccctcagttccttcaaggaactgggtgcctccttccgtcaaatatcaggaatgaaaagaactgagcctggtcggctgaggccagtcctgtcctgtcagggtcgagattgcacgcgggtcactcattcccactcaggcccgcgctccctgggaggaccctcgtaatttatgctctgccctagagccgctttcctggtgggatcctttcatggcgtcttcccaggacctcctgccagctcccattgggagttttgggtcccctccaccccagtaggtgcatacttcttccctccccagccccagctcacaccccccaacacccccaagctggtgagtgaggtggaggagctgtacaagtccatcacagtgccgcgggagaagcttctacaagcagagcagtccctgtgcaacctcgaggacatccacatgagcctggagaaggacatcaccgccatgaccaacagtctcttcatcgaccgccagaagtgcatggcccatcgtacttgctaccccaccatcctgcagctggctggctaccagtgagcagcggcacggtgcttccccccaatcccccaaataaacagtgcgttagctttctgcacagtgtgtgtgtgtgcccggtgggacctccagttgctgtccatctgaactggcctttgggtcccctgtgaggctagctctgcctatggactcgtcatcccaacagttggagatgaggggtcagaactgaggggttccctcatctgcccccttgtacagtggttcctagagatcactctcacaggcattagatgcatggctgaaggactgctggcatcagggagcattgagggaagcacatggagagggggactggggttccccatgactgtgccccagcagacccccacacctttccccacaggggatgctcccagacacttctgagctgccataggtgcccatttcacaggtagggaaaccaaggctcagatccagggagctgcagtatgtgtgcatccacctgtctttctccacaagccccaggagctcagggacaacaatggggagcccccgccctggttgcccctaccctgccacaggcccacagtctccccctggggatgtggctgcccacctgcaaagctgtgtcctcatcacccaggtctcagccgtgcagagctggttccaatggctgcaggcaccacagtcacagagctggaagaaacaagcatcctccccaagagtctgcagagggagcgcatttctgcccacaccttgattttagacttgtggcctccagaactgtgagagaataaattcctgatgtcgtaagccatcactacagcagctcccggacactaatattgctcaatccgtccaggctcctctctctgtttgttgctgttctagg

SEQ ID NO: 459938 - DNA, 967 bp, Homo sapiens
agccactggtcaggaccaccctctggacacagccccaggagctgggtaggaccagactggtctccacattccatatgcccgggcatgggggcactggcccaaggggcactgtcctgtctgcagatgctgcgggaaatcacagatcaggaacacaacgtggtggcactgaaggaggccatcaaggacaaggaggaacctctgcacatagcccagacccggctgtacctgccctcacaccggcccaacatgcagctgtgccgcgaagcagcccagttcaggtactgcctgggcctctgaagcagtcccaggtgcccccatccacctcctcgctgttaccctctccaataaacactccaatctccacacacacatcccccacaggtgctgagaggggagggagactttgcggccacacacaacacgcaagcacgccttaaacacacagatatagacatgacactgggcaggtcatgggtcgggggcctcccagtgccagggacctgtgcccacgtggtctcaccccaccctgtgctacctcatcttcccgggaggaagctccttcagacaaggtgagctcctggaggccacggggccagagaggccagagagggccattccctgctgccctgagggtgttgtccccacctctggtggaaagtatgacctacgcctgggctacaggcatagatgggccgtccttttgtttcccttgttaacggatgcctggtggccccttctgagcctaagtacctttcttccttccctgcccctcagttccttcaaggaactgggtgcctccttccgtcaaatatcaggaatgaaaagaactgagcctggtcggctgaggccagtcctgtcctgtcagggtcgagattgcacgcgggtcactcattcccactcaggcccgcgctccctgggaggaccctcgtaatttatgctctgccctagagccgctttcctggtggga

SEQ ID NO: 459939 - DNA, 1595 bp, Homo sapiens
ccagcgcggtcgtgtagctgagcagccctggggtgtggttctatgtccctgtggctatgtttccagtgtcctctgggtgtttccaagagcaacaagaaacgaataaatctctgccccgcagcgcctccaccccagagacccggaccaagttcacacaggacaatctgtgccgtgcccagcgcaagcgcctggactcggccaacctgtgggttcttgtggactgcatccttcgcgacacctccgaggacctgggactccagtgtgacgccatgaacctggccttcgggcgccgctgtgaggaactggaggacgcgcggcacaagctgcagcaccacctgcacaagatgctgcgggaaatcacagatcaggaacacaacgtggtggcactgaaggaggccatcaaggacaaggaggaacctctgcacatagcccagacccggctgtacctgccctcacaccggcccaacatgcagctgtgccgcgaagcagcccagttcagccccagctcacaccccccaacacccccaagctggtgagtgaggtggaggagctgtacaagtccatcacagtgccgcgggagaagcttctacaagcagagcagtccctgtgcaacctcgaggacatccacatgagcctggagaaggacatcaccgccatgaccaacagtctcttcatcgaccgccagaagtgcatggcccatcgtacttgctaccccaccatcctgcagctggctggctaccagtgagcagcggcacggtgcttccccccaatcccccaaataaacagtgcgttagctttctgcacagtgtgtgtgtgtgcccggtgggacctccagttgctgtccatctgaactggcctttgggtcccctgtgaggctagctctgcctatggactcgtcatcccaacagttggagatgaggggtcagaactgaggggttccctcatctgcccccttgtacagtggttcctagagatcactctcacaggcattagatgcatggctgaaggactgctggcatcagggagcattgagggaagcacatggagagggggactggggttccccatgactgtgccccagcagacccccacacctttccccacaggggatgctcccagacacttctgagctgccataggtgcccatttcacaggtagggaaaccaaggctcagatccagggagctgcagtatgtgtgcatccacctgtctttctccacaagccccaggagctcagggacaacaatggggagcccccgccctggttgcccctaccctgccacaggcccacagtctccccctggggatgtggctgcccacctgcaaagctgtgtcctcatcacccaggtctcagccgtgcagagctggttccaatggctgcaggcaccacagtcacagagctggaagaaacaagcatcctccccaagagtctgcagagggagcgcatttctgcccacaccttgattttagacttgtggcctccagaactgtgagagaataaattcctgatgtcgtaagccatcactacagcagctcccggacactaatattgctcaatccgtccaggctcctctctctgtttgttgctgttctagg

SEQ ID NO: 459940 - DNA, 1440 bp, Homo sapiens
ccagcgcggtcgtgtagctgagcagccctggggtgtggttctatgtccctgtggctatgtttccagtgtcctctgggtgtttccaagagcaacaagaaacgaataaatctctgccccgcagcgcctccaccccagagacccggaccaagttcacacaggacaatctgtgccgtgcccagcgcaagcgcctggactcggccaacctgtgggttcttgtggactgcatccttcgcgacacctccgaggacctgggactccagtgtgacgccatgaacctggccttcgggcgccgctgtgaggaactggaggacgcgcggcacaagctgcagcaccacctgcacaagccccagctcacaccccccaacacccccaagctggtgagtgaggtggaggagctgtacaagtccatcacagtgccgcgggagaagcttctacaagcagagcagtccctgtgcaacctcgaggacatccacatgagcctggagaaggacatcaccgccatgaccaacagtctcttcatcgaccgccagaagtgcatggcccatcgtacttgctaccccaccatcctgcagctggctggctaccagtgagcagcggcacggtgcttccccccaatcccccaaataaacagtgcgttagctttctgcacagtgtgtgtgtgtgcccggtgggacctccagttgctgtccatctgaactggcctttgggtcccctgtgaggctagctctgcctatggactcgtcatcccaacagttggagatgaggggtcagaactgaggggttccctcatctgcccccttgtacagtggttcctagagatcactctcacaggcattagatgcatggctgaaggactgctggcatcagggagcattgagggaagcacatggagagggggactggggttccccatgactgtgccccagcagacccccacacctttccccacaggggatgctcccagacacttctgagctgccataggtgcccatttcacaggtagggaaaccaaggctcagatccagggagctgcagtatgtgtgcatccacctgtctttctccacaagccccaggagctcagggacaacaatggggagcccccgccctggttgcccctaccctgccacaggcccacagtctccccctggggatgtggctgcccacctgcaaagctgtgtcctcatcacccaggtctcagccgtgcagagctggttccaatggctgcaggcaccacagtcacagagctggaagaaacaagcatcctccccaagagtctgcagagggagcgcatttctgcccacaccttgattttagacttgtggcctccagaactgtgagagaataaattcctgatgtcgtaagccatcactacagcagctcccggacactaatattgctcaatccgtccaggctcctctctctgtttgttgctgttctagg

SEQ ID NO: 459941 - DNA, 2847 bp, Homo sapiens
ttgtttgtttcagaaacgggtatgcaggagattagaagccagtgggcatgagcgtggctgccaccaggtgaatgcctgtgccctggcgtcctggggcccagaggaccgggagcttccatcaagaggctgcctcccagcaccaaggccagagagtggccaggggaggctaagtacagggatttctcagaatggtggaaggagctcagcccagccttgcccaagatgtattgcaggggaatctatggagttttgctctcgttgcccacgctggagtgcaatggcatgatctcagctcactgcaacctccgcttcccaggttcaagcgattctcctgcctcagccacccaagtagttgggattacagggacattttagccataccaagaatcattagaagatgcaagctggaaaaaagaaggtcccagttttggttttgaacccttcatgttgcagcaaatgtgaatctcctacagatgggtttggggacttacctgttcaaatagcagcccggtgtcctctgtgggtggggggaggtttgtctgtcctttcattctagtaaatccaccatcctctgcacgagagccaggagaatccacatcacttcaaaagagcccccaaatccttactacgtactacagcctcctttcgaatgttcctggttgagagggagatcaattgcattatttacaagtcaaaaaattttgtatcaaacttcctatgagcttgggcactcatggcctatggaggcccacccagacgcagccccgccatcatgctttttcgttgttttgtggatgtacccagggctatttacacactctttcattaaaaggcttatttttatatttaaaatgttctaatcttggagtgaattttactaaatgctagtgtccaatctgttccccaactgaagttatcagagacagaatcccttttatattcaagtggaaattactcattttctcttgggttttcaatgtatcgtctgactgtgaggctggcattattttctctgggtttgaaagcttcctgagatgtcctgtttgtaagctcctgtccgcatcacgttatctgcagggaatgtgctccctccagggagtgtcctcggcactgatgtgggaagagccccctctataagtcatcatggcattcggtcatgggagagttccatacgggaaagatggagcagaggaagacaaggtgttgaaaccagtacagcaccacctgggatatggatgatccagaattacaggacacgtcttcattaagcctgggtaagatcccagagctatgactcgatcaaaaaatgccagttcgtgccaaacaaccaaagccgggaaagagggagaaggtattggcgtttgtagccttacgaaagatctttatgaagagctttagtttgttcttctcttttccaaaatgagatacacgtctaatttttacgggaaaaaaagaaaactcttagatggacagcatgttcttttttgtgtgtaaactcttccttctcaccctcgttcatggagagagcaggtgtccacccggtgtcaggtgggtgttttgtagctgacgtggcacgcgtccctccagctgttcatacgaagctggcttttgtagagaacagtccccgggcatcctcctgccccaaggaaaatgcccccgcttcagagtcagacagacgtgagttcccatctcatctccaccgaccatctccacctgaccttgatgagtccttagacttcttggagcctctggttcccatctgtgtggtggggaggttgcccttggggtttgcccttagcccacagtgtgactcctcagtgtcagtgccctccctcctggtacacagcccctccaccccaaagcaggccttcggttctggaaaagcaaagctcacaaaacctgatgacccaggtgacaaggacgaaagggatgaggtgtaactggccagaatgtgggtgtattagggttctctagagggacagaataggataagtgtatatgtgaaggggagtttattaaggagtattgacttgcatgatcacaaggtgaggtcccacaataggccgtctgcaagctgaggagcaaggaaggcagcctgagtcccaaaacctcaaaagtagagaagtcgatagtgcatccttcagtctgtggctgaaggcccaacagcccttgcaaaccactggtgtaagtccaagagtccaaaagctgaagaacttggagttcgatgttcaagggcaggaagcatccagcacgggagaaagaggaagcctggaagactcagccagtctagtctttccacattctcctgcttgcattattctggccaagctggcagctgattagatggtacccacccagattgagggtgagtccgcctctcccagtccactgactcaactgtgaatctcctttggcaacaccctcacagacacacccaggatcaatacttggcatccttcaatcaagttgacacttgatattaaccaccacagtggagaaccagcagctttatccaggtgctggattttccagactgtgaagggaatggaggagcttgtgactgggtacctaaaaagggggatggcaacattttcttggtgttttcagccattttagtacaggccatgaaatagaaggctcagaaattccagattttcctaggtgtggtccacacctcagtcccatcctactctggcctcgtgtgaacagaggtcctgcccgtggccttgttgtcccctggcagccgccctccacccaccccctgacttgctgtcacagctgccctggcatccatcctggccttcagccccacctccctggctccagagtcatccctggccacaggac

SEQ ID NO: 459942 - DNA, 849 bp, Homo sapiens
ttgtttgtttcagaaacgggtatgcaggagattagaagccagtgggcatgagcgtggctgccaccaggtgaatgcctgtgccctggcgtcctggggcccagaggaccgggagcttccatcaagaggctgcctcccagcaccaaggccagagagtggccaggggaggctaagtacagggatttctcagaatggtggaaggagctcagcccagccttgcccaagatgtattgcaggggaatctatggagttttgctctcgttgcccacgctggagtgcaatggcatgatctcagctcactgcaacctccgcttcccaggttcaagcgattctcctgcctcagccacccaagtagttgggattacagggacattttagccataccaagaatcattagaagatgcaagctggaaaaaagaaggtcccagttttggttttgaacccttcatgttgcagcaaatgtgaatctcctacagatgggtttggggacttacctgttcaaatagcagcccggtgtcctctgtgggtggggggaggtttgtctgtcctttcattctagtaaatccaccatcctctgcacgagagccaggagaatccacatcacttcaaaagagcccccaaatccttactacgtactacagcctcctttcgaatgttcctggttgagagggagatcaattgcattatttacaagtcaaaaaattttgtatcaaacttcctatgagcttgggcactcatggcctatggaggcccacccagacgcagccccgccatcatgctttttcgttgttttgtggatgtacccagggctatttacacactctttcattaaaaggcttatttttatattta

SEQ ID NO: 459943 - DNA, 526 bp, Homo sapiens
gttctttgaccatatttaaaatggctgaggtgaagtctctgggacattttagccataccaagaatcattagaagatgcaagctggaaaaaagaaggtcccagttttggttttgaacccttcatgttgcagcaaatgtgaatctcctacagatgggtttggggacttacctgttcaaatagcagcccggtgtcctctgtgggtggggggaggtttgtctgtcctttcattctagtaaatccaccatcctctgcacgagagccaggagaatccacatcacttcaaaagagcccccaaatccttactacgtactacagcctcctttcgaatgttcctggttgagagggagatcaattgcattatttacaagtcaaaaaattttgtatcaaacttcctatgagcttgggcactcatggcctatggaggcccacccagacgcagccccgccatcatgctttttcgttgttttgtggatgtacccagggctatttacacactctttcattaaaaggcttatttttatattta

SEQ ID NO: 459944 - DNA, 376 bp, Homo sapiens
ttgtttgtttcagaaacgggtatgcaggagattagaagccagtgggcatgagcgtggctgccaccaggtgaatgcctgtgccctggcgtcctggggcccagaggaccgggagcttccatcaagaggctgcctcccagcaccaaggccagagagtggccaggggaggctaagtacagggatttctcagaatggtggaaggagctcagcccagccttgcccaagatgtattgcaggggaatctgtaagtgcattaaccttcttgctgtgacataaaagatagacttcttcttaaatattagatccataaaacaaagttaataaaaactgcaattatgtttctgaagaatgaggaacataaataaaaaggtgaaaattg

SEQ ID NO: 459945 - DNA, 865 bp, Homo sapiens
gtattttcattctcttgctattcctcaaagtactataggaaagaagggaagtaacatttattgaaagtcttctgtgtaccagtcactactggaaatgctttaaatatcttaattataatgtaatatatattaatatatctataaacagatacctcaggaattaagttatcacttacaagtagtcattttaaatgtagtgctttgtgttggcaaatgtatatatagccaaggtgtattaatttggccaaggtaaattaattcccgcaatgtgctgttttatctttgtagggacattttagccataccaagaatcattagaagatgcaagctggaaaaaagaaggtcccagttttggttttgaacccttcatgttgcagcaaatgtgaatctcctacagatgggtttggggacttacctgttcaaatagcagcccggtgtcctctgtgggtggggggaggtttgtctgtcctttcattctagtaaatccaccatcctctgcacgagagccaggagaatccacatcacttcaaaagagcccccaaatccttactacgtactacagcctcctttcgaatgttcctggttgagagggagatcaattgcattatttacaagtcaaaaaattttgtatcaaacttcctatgagcttgggcactcatggcctatggaggcccacccagacgcagccccgccatcatgctttttcgttgttttgtggatgtacccagggctatttacacactctttcattaaaaggcttatttttatatttaaaatgttctaatcttggagtgaattttactaaatgctagtgtccaatctgttccccaactgaagttatcagagacagaatcccttttatatt

SEQ ID NO: 459946 - DNA, 2017 bp, Homo sapiens
accatcttcttccactttctttattttcaattagtttggatacaagttatggggcaggtcaagtatatcaggggtcaccaaacactgggccacagaccagtccatgacctgttagcaactcggccacacagcaggagactattcaaagcaagaaatgaaaatggtcctcaaacatgtgaaaaaatatattcatccttactcataataatacaaatgagcattaaaattatacctcgcatttatcaaaaacctaaaaatttgacaacaagctcagttgtatggaaacaggaatatccatgcattgcttatggaaatgcaacaagctttaacgcttatggtgaagaacacagcaatatctggaaaaactttagggaatttattactctcacccaattggccacttgcaggagtctatcccaaatatatactagcaaacttataaaattacttaggcacaaaattattatttatggttatatttgtaatgccacatgattggaaacaaatatctctcaatttgggactgattggtaatctataaaatatgaggaccttttgcaaaaattcttttggtcacttaacagaatttatttgcttctactgtttgtgcattataatgtatgaaatagcttatgtttacatacactgaaaattatgcttatgtgtctaggtgtctttgaaggtgccttctttgatcgtacatgaactgtagagtcagagctgccttgcccacaccggcactgcccaccgtgatgactttgtgtaaggccaaattattctgacccttgggcttatttgcggccatcttgtgttgtagttctcaccaacagatgctgaacaattcatgaactacttgctgaaattcaataagcaattcatgaatacttgaattaagagtttttttaagtcagaaactggtaaataccatcaatgacaaatattattccatcaaattcaatctggttatgaaatatctcagtttttaaactcatcctgaatacactcagcagtgaaaaagatgaggtgtgactacaaggtatccatgtactgcatgtctaggttatccatcaataactacgcattgcatatgcagctattcatagagaaaattttagttccatcccctcatttgtgtgcaatttcacatctgataatgaattttaacatgtctaccaccacttagatatattaaatatgtgagaaggacttgattcaatccatcatcactgtgaaacactgctcaaagtgaatacatttgggagagttatgaggacaaaatgcatttacgaacaaagtgactaaaatacatagatggatcctggacttctgtgaaatcttccactcaagaattctacccaggaggattagagatggctttatctctgttatgtatgtagagattcctattgttgggtaaattttctagtctgttttatgccagatccttgtctctcaatttaccactctaatagtattttctcattcagcatacatttaagaggaaaatgatgtatatttgcatatattaaattactgtcatcctttcttagatttatatctctaagtgttttcattttaaaaacaagtaatttaggcctttcaaatagcatccaaaacaaattaaggattgcaaaacttgaatttcaacgtaagccttgaaaaaatgtgaggttcaatagttatctggttttaatatgtctttttggtttctctgttgactgatatattcctgcctaaaattttgatccaaatttaatatctcttgttacacaagatttatgtaaaaagtaaattcagttgctttcaaattcattttgtgtctcagtgaaaacagaatttactaattgcaaatcttctggaaagcattgttttttcctgcctctaattgtacctttaaaacttcagtccataatttattcttttaaagaaaagtacaatttatagtatagttgttaagattgtttagtaaagcaaatatgttggtaaaataagcaactttttaaaaatctgaaattat

SEQ ID NO: 459947 - DNA, 1114 bp, Homo sapiens
ctcgatataccaggtccataaaaacaatataagtttcaactactgaaatgaaaagacaaaatcaaagctgtgtggttgaattcatcctcctgggcttttctaactttcctgagctccaggtgcagctctttggggttttcctagttatttatgtggtgaccctgatgggaaatgccatcattacagtcatcatctccttaaaccagagcctccacgttcccatgtacctgttcctcctgaacctatctgtggtggaggtgagtttcagtgcagtcattacgcctgaaatgctggtggtgctctctactgagaaaactatgatttcttttgtgggctgttttgcacagatgtatttcatccttctttttggtgggactgaatgttttctcctgggagcgatggcttatgaccgatttgctgcaatttgccatcctctgaactacccagtgattatgaacagaggggtttttatgaaattagtaatattctcatggatctcagggatcatggtggctactgtgcagaccacttgggtatttagttttccattttgtggccccaatgaaattaatcatctcttctgtgagactcccccggtactagagcttgtgtgtgcagacaccttcttatttgaaatctatgccttcacaggcaccattttgattgttatggttcctttcttgttgatcctcttgtcttacattcgagttctgtttgccatcctgaagatgccatcaactactgggagacaaaaggccttttccacctgtgcctctcacctcacatctgtgaccctgttctatggcacagccaatatgacttatttacaacccaaatctggctactcacccgaaaccaagaaactgatctcattggcttacacgttgcttacccctctgctcaatccgctcatctatagcttacgaaacagtgagatgaagaggactttgataaaactatggcgaagaaaagtgattttacacacattctgattgtgttgagaagctgagtaagatttggccactgcctgagtgaactctatttaaatttaataaagggtgaaaacagactgcattttttgtatgactatatcaggtcaataaactttcactta

SEQ ID NO: 459948 - DNA, 3248 bp, Homo sapiens
acactaatttaggttcctattcagcaaaggttggtctggaacacttcacgctggtgcacagctgagtggcaagtggaagactgcagaacatgcagccatctcgggctggggaaggtctggctggcatccagcatggttcaggagggagacctggaggaagagaagtctgacattgtgtgtcctggctgccactgcagaccccctgattatgagaagggagttttgattttgcttctattttgccttctgaggggcatcattgtcatgtacaactcttgggagagctgggtctgcacagcagcagaggaatgcgggtatgggtcctggctgtgcccaaagctgaaggctcacagctggccagacacagtgcctgtagtgtcagaagaagagggaagaaaagaagcaggttccaagaagaaggctccagacatgctgctgttagcaaagaaattcagcttccctgatactctggagcctgcagagctgttgggaagatacagcgtgtgcccccacccctcacctgaatggaggagtcctggtgtccagagggagccatgtgctgagggctggtgccagatcgccagccgtctgtggcagcatttccctgtgtctggcccagtgtccaggatgagggcttcgtgggaggagctgctcagctctgctgagggccgtggggaaggggctgaggctcggcactgcctagagaacagtggacagtggccagagatggctctggccattaggagctgtgtgacattggtcaagtgtgataactcctccaagctttggtttcctttcctgcaaagtggggttaatagcagcacacaggaggcctgttgcgttgtcatctccctgggttctggggcagatgagcccacctcccccaagaggccgaagagcatctctgagccacagcacagtgatgcggaaggggacgctgcctctcccctgccctccgagtggacctcagtgaggatcagccctggggaggaagcagctggacaggatgtgctggctgtgcgtgtcctggtcaccagcgaagacagcagctctgacacagagtctgactatggtggcagcgagggctcccacacagaaccctgtgaagagaaaccctggcggccaggatccccgcatctaccgcacacgtccctaggggaggccctgagcagggcagtctctccacagtgccctgaggagcccagagctgtgcacgcagctctgcaacgggccaatagcttccagtctccaaccccaagcaaataccagaactggaggagagaattctggtggagtgagtcactagctctctgggggtgggaggctggggctgggcagaagatctctggttaattctcaggggcagccgttctcattccttacatggtatctctctggcatggcctcctggttgtcagaggcaagaaataaaatataagcttgactttatttccactgctgactagagggagccttttccaagggactcaagatcttcccatccccctccaccccacccctggctcaggaattatggagccttaggattctacagtttcacccagacagggccttagccatcattgcctctaagctttttgaaatacagatgaaggcattactgccccatcacagctggttctggccccaagccccaggtgggagggccggaggggatatgtggctgccctgggcaccctccccagctgatcatgctgccagatgacctctaggatctacgagaaaggttgctgctgccagagggcccagagaggaggcttgaaccttctaatcgtgggctgcgatgggggtgcggtagtgggaggcaggccagccgcctccccagcagctccttcctgccgccctcagatcagatctgttcccagaattaccttttccctccaaagctttctgcgaggcctccctctgggagcttgctgaccgtgtgcgtgtggtgccatctgttcagagcccacggctgggacacacagtcgcacatgagcttggcatgggcccactccatatccttccaatgatttgatactcactgtaacctccctctcttgtgtgctcttaaaatctcaaacgactcttcctgtctgagagcctcttggcacacatatgagaagaaagagcccatctcattagtcgtggatgtctatcctgtctgtgcccatggctaaaggtctagcatcttgtgggaagaaagctcaggtggtttattgactgagtgatttaacacagcccagctcccaaccacaatggttttaggatgctctttggaggcagatgagcatttctaagaaatgttctggaaatgccctgatacacctctcaagagcatcatcgcatgagtctgaaacacaatggttattagacttctcaccctgggacttcctttgccccacgggaccctgccactgctctacccattcctctgagtcccacgccttgggcaccaggaacctctgagtcaggctctgacatcttcctctttctgactgtttatagaattggagcttcacttaaagcctcctcttttcttgataaaataataacacctttgtaatgaagagtgtgttctttccttggtaggtttgacgccagtgaacaaaagaactatgtcacctcctaaggacccttctccttctcttcctcttccttcatcgtcttcccattcatcttccccaccatcttcttcttcaaccagtgtttctgggaatgctccagatggttcctccccgcctcaggtgagtgtccctgagggtcctgcccaggtgtcaggaagctaacctacctgtactcttcccaccttccacacttatctctggattccacgtgctcataggtcaacctaagtgcaaagccagcgccagaagatactctgtcaagggtctaccccagctgccttcatgtatacctttcacaaaagctcctgctgttccttcacagccatccctgaggacacagtcattccctcagcaaactttacagggtttagactccatgccaggtctccatgagatacagagctgctaggacacctttcccttgagaacttgcaaagggcattgaggaatttgcagctgtaggatggcaggcacagaagtgagggtccctttggtagggtccaagaaccttggaagcaacatctcccttgaatataaaatgtcatcattggtatgcaggctggactctttccttctgtatgtatttatcaagcctctgttacctgccaggcctgttct

SEQ ID NO: 459949 - DNA, 1947 bp, Homo sapiens
acactaatttaggttcctattcagcaaaggttggtctggaacacttcacgctggtgcacagctgagtggcaagtggaagactgcagaacatgcagccatctcgggctggggaaggtctggctggcatccagcatggttcaggagggagacctggaggaagagaagtctgacattgtgtgtcctggctgccactgcagaccccctgattatgagaagggagttttgattttgcttctattttgccttctgaggggcatcattgtcatgtacaactcttgggagagctgggtctgcacagcagcagaggaatgcgggtatgggtcctggctgtgcccaaagctgaaggctcacagctggccagacacagtgcctgtagtgtcagaagaagagggaagaaaagaagcaggttccaagaagaaggctccagacatgctgctgttagcaaagaaattcagcttccctgatactctggagcctgcagagctgttgggaagatacagcgtgtgcccccacccctcacctgaatggaggagtcctggtgtccagagggagccatgtgctgagggctggtgccagatcgccagccgtctgtggcagcatttccctgtgtctggcccagtgtccaggatgagggcttcgtgggaggagctgctcagctctgctgagggccgtggggaaggggctgaggctcggcactgcctagagaacagtggacagtggccagagatggctctggccattaggagctgtgtgacattggtcaagtgtgataactcctccaagctttggtttcctttcctgcaaagtggggttaatagcagcacacaggaggcctgttgcgttgtcatctccctgggttctggggcagatgagcccacctcccccaagaggccgaagagcatctctgagccacagcacagtgatgcggaaggggacgctgcctctcccctgccctccgagtggacctcagtgaggatcagccctggggaggaagcagctggacaggatgtgctggctgtgcgtgtcctggtcaccagcgaagacagcagctctgacacagagtctgactatggtggcagcgagggctcccacacagaaccctgtgaagagaaaccctggcggccaggatccccgcatctaccgcacacgtccctaggggaggccctgagcagggcagtctctccacagtgccctgaggagcccagagctgtgcacgcagctctgcaacgggccaatagcttccagtctccaaccccaagcaaataccagaactggaggagagaattctggtggagtttgacgccagtgaacaaaagaactatgtcacctcctaaggacccttctccttctcttcctcttccttcatcgtcttcccattcatcttccccaccatcttcttcttcaaccagtgtttctgggaatgctccagatggttcctccccgcctcaggtgagtgtccctgagggtcctgcccaggtgtcaggaagctaacctacctgtactcttcccaccttccacacttatctctggattccacgtgctcataggtcaacctaagtgcaaagccagcgccagaagatactctgtcaagggtctaccccagctgccttcatgtatacctttcacaaaagctcctgctgttccttcacagccatccctgaggacacagtcattccctcagcaaactttacagggtttagactccatgccaggtctccatgagatacagagctgctaggacacctttcccttgagaacttgcaaagggcattgaggaatttgcagctgtaggatggcaggcacagaagtgagggtccctttggtagggtccaagaaccttggaagcaacatctcccttgaatataaaatgtcatcattggtatgcaggctggactctttccttctgtatgtatttatcaagcctctgttacctgccaggcctgttct

SEQ ID NO: 459950 - DNA, 1035 bp, Homo sapiens
aatttaatcctgtcagcaaactataatgtagaaatgcaaattctgaagacccattggggcctagtgaatcagaaactctgcagcaaaggggtcctgagacaccagccctgcaccagcaccctgctgcagcacgagagggaaccttgcttaggagtggaaggaagctctggaagtgccacttacttttgttacaccgaggtccgtatttattgggatcagagcagaactgacactgggagccttggaagccctcctcacaaatgcatccctggcaaggtcatatgtgtgctgattgacatcagtgttgggtgtgggccctttctaacccctggccgcagtcatttgtactggcctctccctattctccttgtccacatggtgtccccactcatggctgatactttccccttgaaaaagccacgttttagaggcgggcttattaaatgcacagatgtataatttccctgtatgaaccacagctacttttgcctccaagctagatgagttaagttgcccttttctttggcagttgatggcatggctagtgctcagtcatctggtcaccacaactctactgagcccctcccctgggtgctggactggctctaacactgtgcgaacagacagaggaaggctcatgcttgtggagccaacgttctaagttggggaagagtcaatgtatgaattttaaaaacagtaaaacaagatcatttcagagaacggaagacaacagcaagcacgggccacctgtgaccacgtggaccctaggacccaagagcatggccctggagctgcctggccctactggcctagactgggcctcggccacgcgctcctcaccttcacagtggcattgcagtaccgggcacagccgctcttcaggctcccaaacctgccactgtagacacatctgtgtgtgaagagtgcctggagaaagccaaggagggaaagcatggcagtcagcatgtttaggtcctccaggcactgcacaccctctgcagacacttgccattgtacttccatttcaccactgac

SEQ ID NO: 459951 - DNA, 1323 bp, Homo sapiens
tggagtccggagctgtgcagggccctcctgggctcgctcctgttccctgcagggcatctgccagcaggggcagggatgttgtatggggaagccttcccttccatgaccagcttctctgtctgtctgtccctaggtgcccaggagctggtgcggatggacagctcaagacaggctttggggatgttcgatcctaatgccatcaactctattgaccaaagagaaacttgtccccaaattcctgaggctgaagttctagaagtgtctgtgatttttggcttcctggctgtgcccggggttgatggccccggagacgtcttcttcccatccctggaatttggctgccagaccccaggcctggctgctgctgtgtggagagggaggcggcccgcagcagaacagccaccgcacttcctcctcagcttcctctggtgcggccctgccctctcttctctggacccttttacaactgaacgcatctgggcttcgtgaatacttggtgctttccaacacactttcacatgtgttgtaacttgtttgatccacccccttccctgaaaatcctgggaggttttattgctgccatttaacacagagggcaatagaggttctgaaaggtctgtgtcttgtcaaaacaagtaaacggtggaactacgactaaaccctgggtctcctgcttcctcctcactgaatggattggtattatgggccagggcctggcttggccttcaccttggacttgcttagagcacatacaagggctctgggagatgaacttgtgcccacaggtccagggctccactgtactgcacaccagaaacgttcctatctgtgctctgcctgccctggcctgggccttcttctgggtccagaagacgctgctgctgatgggtaggctccttccatatcagctcctgccactcccttttctgcctgccaactgtggagctagaggactcctgataggcacagtggcccatgcacccctcttgcttgcattaggggatggggaagggagaaaccctcagcagctgagccccagggtctcttggaggaacttagccagttgtatgtggagcatctgggcagctgtggaacatccctcaagaagccaggccaagggaagggtctggatgtacttgtgctgggtcagggaaggccagccttcttggtgccacagagggtgagggccaggctgggaccttctgatctcaagccaggggaagcagagttcacaatagcagggtccaagtctaataaacagaaggggcctctgctctaaagacatgaggtgtactgccaagagcagtgtccccagctcataga

SEQ ID NO: 459952 - DNA, 1231 bp, Homo sapiens
  misc_feature (14)..(14): n is a, c, g, or t
ggctgcatggaatngggcacgagattctgaggcagccagagcggctcctgttcatcctggatggctttgatgagctgcagaggccctttgaagaaaagttgaagaagaggggtttgagtcccaaggagagcctgctgcaccttctaattaggagacatacactccccacgtgctcccttctcatcaccacccggcccctggctttgaggaatctggagcccttgctgaaacaagcacgtcatgtccatatcctaggcttctctgaggaggagagggcgaggtacttcagctcctatttcacggatgagaagcaagctgaccgtgccttcgacattgtacagaaaaatgacattctctacaaagcgtgtcaggttccaggcatttgctgggtggtctgctcctggctgcaggggcagatggagagaggcaaagttgtcttagagacacctagaaacagcactgacatcttcatggcttacgtctccacctttctgccgcccgatgatgatgggggctgctccgagctttcccggcacagggtcctgaggagtctgtgctccctagcagctgaagggattcagcaccagaggttcctatttgaagaagctgagctcaggaaacataatttagatggccccaggcttgccgctttcctgagtagtaacgactaccaattgggacttgccatcaagaagttctacagcttccgccacatcagcttccaggacttttttcatgccatgtcttacctggtgaaagaggaccaaagccggctggggaaggagtcccgcagagaagtgcaaaggctgctggaggtaaaggagcaggaagggaatgatgagatgaccctcactatgcagtttttactggacatctcgaaaaaagacagcttctcgaacttggagctcaagttctgcttcagaatttctccctgtttagcgcaggatctgaagcattttaaagaacagatggaatctatgaagcacaacaggacctgggatttggaattctccctgtatgaagctaaaataaagaatctggtaaaagaaccattaaagaggagtatgcaggaaactgagtgctatgactttcagtgtcaggagtaaggccttttcagtgattttacttctctcctagcaacagatttcttttgcttattatttggtgtttcttagactgattgggggtgggaaaaagagcttttttggtcgttcttatgcatattagtctt

SEQ ID NO: 459953 - DNA, 1378 bp, Homo sapiens
caactctcgccagaaaaatggtgttggactgggccaccggtactctgtacccaggccggtttgattatgtcttttatgtaagctgcaaagaagtggtcctgctgctggagagcaaactggagcagctccttttctggtgctgcggggacaatcaagcccctgtcacagagattctgaggcagccagagcggctcctgttcatcctggatggctttgatgagctgcagaggccctttgaagaaaagttgaagaagaggggtttgagtcccaaggagagcctgctgcaccttctaattaggagacatacactccccacgtgctcccttctcatcaccacccggcccctggctttgaggaatctggagcccttgctgaaacaagcacgtcatgtccatatcctaggcttctctgaggaggagagggcgaggtacttcagctcctatttcacggatgagaagcaagctgaccgtgccttcgacattgtacagaaaaatgacattctctacaaagcgtgtcaggttccaggcatttgctgggtggtctgctcctggctgcaggggcagatggagagaggcaaagttgtcttagagacacctagaaacagcactgacatcttcatggcttacgtctccacctttctgccgcccgatgatgatgggggctgctccgagctttcccggcacagggtcctgaggagtctgtgctccctagcagctgaagggattcagcaccagaggttcctatttgaagaagctgagctcaggaaacataatttagatggccccaggcttgccgctttcctgagtagtaacgactaccaattgggacttgccatcaagaagttctacagcttccgccacatcagcttccaggacttttttcatgccatgtcttacctggtgaaagaggaccaaagccggctggggaaggagtcccgcagagaagtgcaaaggctgctggaggtaaaggagcaggaagggaatgatgagatgaccctcactatgcagtttttactggacatctcgaaaaaagacagcttctcgaacttggagctcaagttctgcttcagaatttctccctgtttagcgcaggatctgaagcattttaaagaacagatggaatctatgaagcacaacaggacctgggatttggaattctccctgtatgaagctaaaataaagaatctggtaaaagaaccattaaagaggagtatgcaggaaactgagtgctatgactttcagtgtcaggagtaaggccttttcagtgattttacttctctcctagcaacagatttcttttgcttattatttggtgtttcttagactgattgggggtgggaaaaagagcttttttggtcgttcttatgcatattagtctt

SEQ ID NO: 459954 - DNA, 2087 bp, Homo sapiens
  misc_feature (2074)..(2074): n is a, c, g, or t
  misc_feature (2076)..(2076): n is a, c, g, or t
  misc_feature (2078)..(2078): n is a, c, g, or t
catctgtaggcacacatacacactctctttacagtcagccttctgcttgccacagtcatagtgggcagtcagtgaatcttccccaagtgctgacaattaatacctggtttagcggcaaagattcagagaggcgtgagcagcccctctggccttcagacaaaaatctacgtaccatcagaaactatgtctctgcagatggtaacagtcagtaataacatagccttaattcagccaggcttctcactgatgaattttgatggacaagttttcttctttggacaaaaaggctggcccaaaagatcctgccccactggagttttccatctggatgtaaagcataaccatgtcaaactgaagcctacaattttctctaaggattcctgctacctccctcctcttcgctacccagccacttgcacattcaaaggcagcttggagtctgaaaagcatcaatacatcatccatggagggaaaacaccaaacaatgaggtttcagataagatttatgtcatgtctattgtttgcaagaacaacaaaaaggttacttttcgctgcacagagaaagacttggtaggagatgttcctgaagccagatatggtcattccattaatgtggtgtacagccgagggaaaagtatgggtgttctctttggaggacgctcatacatgccttctacccacagaaccacagaaaaatggaatagtgtagctgactgcctgccctgtgttttcctggtggattttgaatttgggtgtgctacatcatacattcttccagaacttcaggatgggctatcttttcatgtctctattgccaaaaatgacaccatctatattttaggaggacattcacttgccaataatatccggcctgccaacctgtacagaataagggttgatcttcccctgggtagcccagctgtgaattgcacagtcttgccaggaggaatctctgtctccagtgcaatcctgactcaaactaacaatgatgaatttgttattgttggtggctatcagcttgaaaatcaaaaaagaatgatctgcaacatcatctctttagaggacaacaagatagaaattcgtgagatggagaccccagattggaccccagacattaagcacagcaagatatggtttggaagcaacatgggaaatggaactgtttttcttggcataccaggagacaataaacaagttgtttcagaaggattctatttctatatgttgaaatgtgctgaagatgatactaatgaagagcagacaacattcacaaacagtcaaacatcaacagaagatccaggggattccactccctttgaagactctgaagaattttgtttcagtgcagaagcaaatagttttgatggtgatgatgaatttgacacctataatgaagatgatgaagaagatgagtctgagacaggctactggattacatgctgccctacttgtgatgtggatatcaacacttgggtaccattctattcaactgagctcaacaaacccgccatgatctactgctctcatggggatgggcactgggtccatgctcagtgcatggatctggcagaacgcacactcatccatctgtcagcaggaagcaacaagtattactgcaatgagcatgtggagatagcaagagctctacacactccccaaagagtcctacccttaaaaaagcctccaatgaaatccctccgtaaaaaaggttctggaaaaatcttgactcctgccaagaaatcctttcttagaaggttgtttgattagttttgcaaaagcctttcagattcaggtgtatggaatttttgaatctatttttaaaatcataacattgattttaaaaatacatttttgtttatttaaaatgcctatgttttcttttagttacatgaattaagggccagaaaaaagtgtttataatgcaatgataaataaagtcattctagaccctatacattttgaaaatattttacccaaatactcaatttactaatttattcttcactgaggatttctgatctgattttttattcaacaaaccttaaacacccagaagcagtaataatcatcgagntntnttttattta

SEQ ID NO: 459955 - DNA, 328 bp, Homo sapiens
catctgtaggcacacatacacactctctttacagtcagccttctgcttgccacagtcatagtgggcagtcagtgaatcttccccaagtgctgacaattaatacctggtttagcggcaaagattcagagaggcgtgagcagcccctctggccttcagaatgaagatgaaaagaagatgtgtttaggaaccttctctgcttccctaaaagaaccctaaaaacaggagtaaaaacagtgaagaaaacaaaggaccttcaaagtgcactcgttaaaacctaataactgtatttctattactaaatgtagaagtggtaaacatctttaacagg

SEQ ID NO: 459956 - DNA, 706 bp, Homo sapiens
cactctctttacagtcagccttctgcttgccacagtcatagtgggcagtcagtgaatcttccccaagtgctgacaattaatacctggtttagcggcaaagattcagagaggcgtgagcagcccctctggccttcaggtaggtctgataccttcatttctaccaaagctaaaaaatgggagcctatgttagtaaactttaagggaatgaagatgccacattttggcagtgtgttagtcacaagtggatttggtgtctagatagggaagggatgagtagaatttggaaaatgtggggctttctgttctctggctgcttcagggatttaattattaggcctttagagcactattattaatcttcgtacataaatcgttctctggcctaagacaggaaggaagacctaatcctggttttactgccagcagaaataaaataatatatgcctcaaacctgattaacagtgcaagatactgttattcacacattaaatgcctgaagttacttacatgaggttacttgctactctggagcaatcaagaaaacatggccagcacggatcagcaagatttaatgtttcacagtacagtatctttctttggaaaagaaaaagtcagttcagatattaggaactataaacccagacctcatactatgagtcctttcattatactcaactatgccctagcatcagagagaataaatgaa

SEQ ID NO: 459957 - DNA, 975 bp, Homo sapiens
agctgcttgtcaggccaggaagacagcagccctgatgatcagttcttcctaaagccatccggctcctggggagaggcaggacagccccccagggcagggagagcactcggaggggccagcaggaggcgtccggctcaaggtcttcaacgccaccttttatgatgaaagtgtccttgaatgagagagtggtgggcagtgacgcacggctttgtgaatagcctgtcaagcaccgagctgcaaactttaacatggagaattttacggcatgtgaattacttctccattaaaaaaccttttttttttttttgaaaatcacctttttaatgagtgaagactttcctggctacaagatccaccatcttggcccgacccctgacgttccctgtccttcttcacagcatctttcttctcctcagtggctatcatgggacgtgccatatacaggcctcctcctctagcacgcagcctccataaggggcagggcctgcgggctgccctccttctttctgccttccctcctctgcctgctggctttcatcctcatgtggttcacctcacagtcacaagttggctgctgccattcaacatcacgtccaagttcacagaccgatgggcaacccttaactcccaagacacgttcaggggagcgagcaaagggtgcaccccctcttcttcagagcagaaaacaaaggtgtacaaaaaggggcagagatcgggcagggactcagctgtggggcccaggggcccatttgctcttggagcctttcacagcctttctggttgtgtgcaggggaacaaacctcacccacatgtgagtcagaagacctggtttttagtgtgcaccctgaaaccgatctcctgtgcaaccttggccttttcgctcttaattttgtcatctacatacaagagagttgggtgagaggatcaccggagacagtgcatgtgagctcatgatgttctacacaaatgtgagac

SEQ ID NO: 459958 - DNA, 3393 bp, Homo sapiens
gaagtgcacggcagggccaggacgggtcgctgtgggtggggactggtctccacacccgcagacggaactggtactgaagggcagtgataactggccggttcctcccatgaatcacctcctgtctgctcttcctttaggaggtgttactgaagcgggcggcggacctggtggaagccttatacggaatgcctcacaacaaccaggagatcatcttgaagcgagcggcggacatcgccgaggcgctgtacagcgttccccgcaatcacaaccagatccccaccctgggcaacaaccctgcacacacgggcatgatgggcgtcaactccttcagcagccagctagccgtcaacgtgtcagagacgtcacaagccaacgaccaagtcggctacagtcgcaatacaagcagcgtgtccccgcgaggctacgtccccagcagtactccccagcagtccaattacaacacagtcagcactagcatgaatggatatggaagtggcgccatggccagtctaggggtccctggctcgcctggatttcttaatggctcctccgctaactctccctacggcatagtgccgtccagccccaccatggcagcctcttcggtcaccctcccttcaaactgtagcagcacacacggcattttctcattctcacctgccaatgtcatctccgcagtgaaacagaagagcgccttcgcgcccgtggtccggccccaagcctctcctcctccttcctgcaccagcgccaacgggaatggactgcaaggctctctgctgggtgctgaggacgtagccgcggagaagacaaactggcccttttgtgaagtcggtggcatatttcactttgatgaactaatgctcaaaaaaggaactggaaagctatgtctgggctggtagtcccgccaatgtgagggacttctgtttaccttccgcagcacccagcatcaaaggacggacttcaggggacacgtttagtatattaagacatgctgatggaaacagtatcttcaaaaaaatcagcagcaattgaaatgctacaaaagactttgtttaaagattttatttaaactattaagaatcaacatgcaaacagcctacttcttcatgaacaattccattttattgactgaacttttctcatattttcacatttctcagtcctgaagaataaggaaaacaaagcgacgcctattttgtataaagtttccgactccgtcttggccatgtctagtaattgctatgtgttgggagaaactttgtgaatgcaccattttgatgatcatgaaacgctgatgaaaaatgcctccaaacatttttctgtactcatacttagattcacaatggttgtgtatctctataatgtgaaatatttttttgtggtgataaaaagagggccaaggaggtatgagccatcagactggaaaaaaggatgactatatgatgaggagaaactggggtggcagggagggagggagggtttatcactgcttaacttcatcttcatgaaatgaaactttgtaacttattgtagttagaaattgtaactttgatattgaattctcttgccttcaacaagcacactgacagagaaaaaatgctactgtctgttggttccaatattctcccactgctagagcttcctgttaagcaagtgtgatctgcaacattttttcaacttttgctagcactgtatactattgcattcttaggctactgtgaggtctatgtttcttgtaccagaaattgtccttttgacttctagatccttcttccctaatgtgttttgtatgtggttataaaattgtagacttttgtgattttgccaaagttgtagctaaatatttatacacttgtcttgaatttttttcagatccacttaaaatatttagaaaaacaagttttattccttatgtgtcttataaggaataaaatggtcttcatttgacacttactttcccatgaacacttgcagttgctaagggactttattttgtaacatatcaattataaatattgtatttatctttgaaattttgtacattgcttttcccaccttttcctttttcttctttcttgtctgtattggtttttgatcacggcctggtgttgtgatactgggaagagcattagccaagaacttgtctctttgatctgtttcgttaagctgaaccagtgtctttacatttcatttgtacttcaaaaaatatgctattgtttagactttccatccttttttttttttattttgaggaaaagtcaaattcattgtttatttttatattatttttaagttatctgaacaaatacttttgaaaaaaaagtttgttgtatagtcaaaacaaatcggtgccacccggccgtgacaaatcctagtagattctgtgcatgtggagcggccgcgaagaggtgacaccgtttggggctgtgtccttattttattttatttttttgtagaatgtaaaaagtcattttagatgccacccattgactttgccacatagctgaactgtgtttactggaaaaattcagaggcctaaagtttaaaataaaatttacttctgatgttttaattaaaatgtttgccacattaacttttctgatgccttaaaagtgaacttctttaaagaacctttgtgctattttatcacaggcttacactacaattgttaataaatacttcatttggagatgtatggtgtaaaacacacaaacacacacaaaaaagcacaagcccgctgcatgacccgtctctcctttctgggactatttctgctgcgtcctgcaccctcctgggcccacctccgattcacagaggtttcagggggacccaaatcactgctggttttcaatttttttttaacaatacatttttgtggtcagttccaacagcactgtccgtacttttaaaactggaatgacctccttcagatatcgtgcctcttagtgccaaacccacagtgagaccaaaagtgtcaggtgtttttttttttttctttctcctttgcactaagtgctttgcagacacggcacagcaaacattttgcaaactgcagcagaaatcgaatttaaaacaaaaaggagggactttaaaataccttcttgacaaaaatcaacaatgcacaacttacaaagtgttcattctagggacaaaattaaataaacagaatgtccccaggagtcagcaggtcacagtctggctttgtgatggttgacaaggtctagctacatgggaaagcctgagaagtcactttggaactaaattgcctccattttattttgtacgagtaagggtttgatctacaaaagagctcacatggacgcactgagaacgcctgccagcttccccatgccctcacctgtgggggaaggggggatcctctaatcacccatg

SEQ ID NO: 459959 - DNA, 1763 bp, Homo sapiens
ccgagggcacagctgtccacagatgaggccacacggggtgggcaccctgtgcctgcccagcgcctggcccatctgagctgtgcaggctgcacgtggcctgtgatgtgtgtgacgggcagagccacatgggtgcccccaggcctcatgaacttgcgagtggccctttgtgaggtgctgaggcccgcaggcacttaaattaagtggccgtcatctggcctctttcagacaccacctttggtatatgctcctcccagtgactcaaatccagttactcctttagaaacaagaacttgtctctttgatctgtttcgttaagctgaaccagtgtctttacatttcatttgtacttcaaaaaatatgctattgtttagactttccatccttttttttttttattttgaggaaaagtcaaattcattgtttatttttatattatttttaagttatctgaacaaatacttttgaaaaaaaagtttgttgtatagtcaaaacaaatcggtgccacccggccgtgacaaatcctagtagattctgtgcatgtggagcggccgcgaagaggtgacaccgtttggggctgtgtccttattttattttatttttttgtagaatgtaaaaagtcattttagatgccacccattgactttgccacatagctgaactgtgtttactggaaaaattcagaggcctaaagtttaaaataaaatttacttctgatgttttaattaaaatgtttgccacattaacttttctgatgccttaaaagtgaacttctttaaagaacctttgtgctattttatcacaggcttacactacaattgttaataaatacttcatttggagatgtatggtgtaaaacacacaaacacacacaaaaaagcacaagcccgctgcatgacccgtctctcctttctgggactatttctgctgcgtcctgcaccctcctgggcccacctccgattcacagaggtttcagggggacccaaatcactgctggttttcaatttttttttaacaatacatttttgtggtcagttccaacagcactgtccgtacttttaaaactggaatgacctccttcagatatcgtgcctcttagtgccaaacccacagtgagaccaaaagtgtcaggtgtttttttttttttctttctcctttgcactaagtgctttgcagacacggcacagcaaacattttgcaaactgcagcagaaatcgaatttaaaacaaaaaggagggactttaaaataccttcttgacaaaaatcaacaatgcacaacttacaaagtgttcattctagggacaaaattaaataaacagaatgtccccaggagtcagcaggtcacagtctggctttgtgatggttgacaaggtctagctacatgggaaagcctgagaagtcactttggaactaaattgcctccattttattttgtacgagtaagggtttgatctacaaaagagctcacatggacgcactgagaacgcctgccagcttccccatgccctcacttggtttgtgttttaggttaagtagtcaatgcccacatcacttcactgtctcaagactgagcacttcactaaatggtagattttactgttaaagaccctacaataagattgttttatctgtacattttttcagatatttaactgtataaaaatgttcattttacacaatatttaattaaagtatttcttgtctgtgaatttcacttttggtaattttctctgtttttgattattaaaatgactaaacactaacat

SEQ ID NO: 459960 - DNA, 3613 bp, Homo sapiens
gaagtgcacggcagggccaggacgggtcgctgtgggtggggactggtctccacacccgcagacggaactggtactgaagggcagtgataactggccggttcctcccatgaatcacctcctgtctgctcttcctttaggaggtgttactgaagcgggcggcggacctggtggaagccttatacggaatgcctcacaacaaccaggagatcatcttgaagcgagcggcggacatcgccgaggcgctgtacagcgttccccgcaatcacaaccagatccccaccctgggcaacaaccctgcacacacgggcatgatgggcgtcaactccttcagcagccagctagccgtcaacgtgtcagagacgtcacaagccaacgaccaagtcggctacagtcgcaatacaagcagcgtgtccccgcgaggctacgtccccagcagtactccccagcagtccaattacaacacagtcagcactagcatgaatggatatggaagtggcgccatggccagtctaggggtccctggctcgcctggatttcttaatggctcctccgctaactctccctacggcatagtgccgtccagccccaccatggcagcctcttcggtcaccctcccttcaaactgtagcagcacacacggcattttctcattctcacctgccaatgtcatctccgcagtgaaacagaagagcgccttcgcgcccgtggtccggccccaagcctctcctcctccttcctgcaccagcgccaacgggaatggactgcaaggctctctgctgggtgctgaggacgtagccgcggagaagacaaactggcccttttgtgaagtcggtggcatatttcactttgatgaactaatgctcaaaaaaggaactggaaagctatgtctgggctggtagtcccgccaatgtgagggacttctgtttaccttccgcagcacccagcatcaaaggacggacttcaggggacacgtttagtatattaagacatgctgatggaaacagtatcttcaaaaaaatcagcagcaattgaaatgctacaaaagactttgtttaaagattttatttaaactattaagaatcaacatgcaaacagcctacttcttcatgaacaattccattttattgactgaacttttctcatattttcacatttctcagtcctgaagaataaggaaaacaaagcgacgcctattttgtataaagtttccgactccgtcttggccatgtctagtaattgctatgtgttgggagaaactttgtgaatgcaccattttgatgatcatgaaacgctgatgaaaaatgcctccaaacatttttctgtactcatacttagattcacaatggttgtgtatctctataatgtgaaatatttttttgtggtgataaaaagagggccaaggaggtatgagccatcagactggaaaaaaggatgactatatgatgaggagaaactggggtggcagggagggagggagggtttatcactgcttaacttcatcttcatgaaatgaaactttgtaacttattgtagttagaaattgtaactttgatattgaattctcttgccttcaacaagcacactgacagagaaaaaatgctactgtctgttggttccaatattctcccactgctagagcttcctgttaagcaagtgtgatctgcaacattttttcaacttttgctagcactgtatactattgcattcttaggctactgtgaggtctatgtttcttgtaccagaaattgtccttttgacttctagatccttcttccctaatgtgttttgtatgtggttataaaattgtagacttttgtgattttgccaaagttgtagctaaatatttatacacttgtcttgaatttttttcagatccacttaaaatatttagaaaaacaagttttattccttatgtgtcttataaggaataaaatggtcttcatttgacacttactttcccatgaacacttgcagttgctaagggactttattttgtaacatatcaattataaatattgtatttatctttgaaattttgtacattgcttttcccaccttttcctttttcttctttcttgtctgtattggtttttgatcacggcctggtgttgtgatactgggaagagcattagccaagaacttgtctctttgatctgtttcgttaagctgaaccagtgtctttacatttcatttgtacttcaaaaaatatgctattgtttagactttccatccttttttttttttattttgaggaaaagtcaaattcattgtttatttttatattatttttaagttatctgaacaaatacttttgaaaaaaaagtttgttgtatagtcaaaacaaatcggtgccacccggccgtgacaaatcctagtagattctgtgcatgtggagcggccgcgaagaggtgacaccgtttggggctgtgtccttattttattttatttttttgtagaatgtaaaaagtcattttagatgccacccattgactttgccacatagctgaactgtgtttactggaaaaattcagaggcctaaagtttaaaataaaatttacttctgatgttttaattaaaatgtttgccacattaacttttctgatgccttaaaagtgaacttctttaaagaacctttgtgctattttatcacaggcttacactacaattgttaataaatacttcatttggagatgtatggtgtaaaacacacaaacacacacaaaaaagcacaagcccgctgcatgacccgtctctcctttctgggactatttctgctgcgtcctgcaccctcctgggcccacctccgattcacagaggtttcagggggacccaaatcactgctggttttcaatttttttttaacaatacatttttgtggtcagttccaacagcactgtccgtacttttaaaactggaatgacctccttcagatatcgtgcctcttagtgccaaacccacagtgagaccaaaagtgtcaggtgtttttttttttttctttctcctttgcactaagtgctttgcagacacggcacagcaaacattttgcaaactgcagcagaaatcgaatttaaaacaaaaaggagggactttaaaataccttcttgacaaaaatcaacaatgcacaacttacaaagtgttcattctagggacaaaattaaataaacagaatgtccccaggagtcagcaggtcacagtctggctttgtgatggttgacaaggtctagctacatgggaaagcctgagaagtcactttggaactaaattgcctccattttattttgtacgagtaagggtttgatctacaaaagagctcacatggacgcactgagaacgcctgccagcttccccatgccctcacttggtttgtgttttaggttaagtagtcaatgcccacatcacttcactgtctcaagactgagcacttcactaaatggtagattttactgttaaagaccctacaataagattgttttatctgtacattttttcagatatttaactgtataaaaatgttcattttacacaatatttaattaaagtatttcttgtctgtgaatttcacttttggtaattttctctgtttttgattattaaaatgactaaacactaacat

SEQ ID NO: 459961 - DNA, 1044 bp, Homo sapiens
gaagtgcacggcagggccaggacgggtcgctgtgggtggggactggtctccacacccgcagacggaactggtactgaagggcagtgataactggccggttcctcccatgaatcacctcctgtctgctcttcctttaggaggtgttactgaagcgggcggcggacctggtggaagccttatacggaatgcctcacaacaaccaggagatcatcttgaagcgagcggcggacatcgccgaggcgctgtacagcgttccccgcaatcacaaccagatccccaccctgggcaacaaccctgcacacacgggcatgatgggcgtcaactccttcagcagccagctagccgtcaacgtgtcagagacgtcacaagccaacgaccaagtcggctacagtcgcaatacaagcagcgtgtccccgcgaggctacgtccccagcagtactccccagcagtccaattacaacacagtcagcactagcatgaatggatatggaagtggcgccatggccagtctaggggtccctggctcgcctggatttcttaatggctcctccgctaactctccctacggcatagtgccgtccagccccaccatggcagcctcttcggtcaccctcccttcaaactgtagcagcacacacggcattttctcattctcacctgccaatgtcatctccgcagtgaaacagaagagcgccttcgcgcccgtggtccggccccaagcctctcctcctccttcctgcaccagcgccaacgggaatggactgcaaggtgagggtggtgcggggccgtgggccagtgctgggtcctctccaggggtggggatgggagtgggggtgggggctcggcctttctcctggcacctctgtgactgctgcatgttctcccgtggcccaccttgatgcgtgccacctctgcctggtgttcacagcgaggacccctgtgcactgagccccagaaaggaccagattcctcctcttggtttttgtccagctcacccttccgacggcacctagtgtacttacggtggagcaccctgtgccccta

SEQ ID NO: 459962 - DNA, 795 bp, Homo sapiens
  misc_feature (4)..(4): n is a, c, g, or t
  misc_feature (6)..(6): n is a, c, g, or t
  misc_feature (414)..(414): n is a, c, g, or t
atgncntacgaccgctacgtggccatctgcaaccccctgatttacacagctattatgacgcagcgggtctgcagggagttagtgataggggtctatacctatggcttccgaaactctgtgatacagacagctctgacgtttcagctgtctttctgcaactccgacgtcatccaccacttctactgtgctgacccccctctcctggccctctcctgctctgacacccacaacaaagaaaagcagctcatgatcttctctgcagtaaatctcactgggtccctccttaccatcttcatctcctacatttgcatcctcttttccattataaaaatccagtcttccgagggcaagtgcagagcattttccacccgtgcctcccacctcactgtcgtcaccatcttttatggcacactntttttcatgtacctgcagcaaccaaaagcggggaattcatggaagccaaacaaagtagtctctgtgttttatagtcttgtaattcccatgcttaaccctcttatctatcgcctgagaaacacagaagtaaaggatgccctgaaaaaaatgctagagggcaaagagttatagtgagtgagttaatggaacgcagcatactgaaagtttgatatattgacaagcctcgattctaatacttctttcaaaataattcttaaggcaaacaaatctgccataaaaatgtttattttcctcctattttcaaaagtgattactgttaagtaatttttaatggtttgtaacatatactaccaattaattacaagtaagtttaaaattaat

SEQ ID NO: 459963 - DNA, 1675 bp, Homo sapiens
catagatcaaagtagctccagactgacactttagggaggcttttaaaaaggactgattcctggaccctggttcgcgtctactaaagaagtctggtattcaggaaaaacatgacttaagaagtaaatatggctgagaatgatattatacaaaataaaaagttagccgaattgcttttgatccaaatatgccagggctacgggattccactggctgtagcacctcatcgcctgctcttgcgtcgctgctcctgtctccgtgtaactcacaataaagagattttggcatcaaccgtgagcttaggggtagaagggtatatgttaggaggtgggagcagaatcaattcttcaaatcttaatgatggtgaagaagagtgctcaccagattcccttctggtctggaaaaagaaatcccttcttttgtggatgtcatctctaccatctctcggtgaaaaatatttcaagagaatcctaagatggagagagcattggaagtcatccggcccaattcccttgtgcaattcaaagcttctttgtaagaaaaatgcccccagaagtttgtttgcatcatgaagatcagattttgaggatccagtctggctcttccctgtacaaaacattcctcacaaacagaatatggacaattgttaaatgtcaaaggtaaagttattgtgggaactccttcaaaaagttcaagtgagagcccattctatgaatgaccatttacatctaatttttttctgtgctatgttacttattctgaagtggttgatccaattcctaaaagggaatatttcattaccttttatttcctatagcatccattctgaccccttttcggtttaattattccctgattccagtcttcattcactcatttatttgaggaatatttattgaccaacaactatgccaggtcccattctatgtgtagggactataaagttgaacaagacagaggaggtactggcctcagaatttacattctagtagatgagaaagtaaaaataaacacatgaaaacatgaatgaaccggatattgtagactgtgataggtgtagtttgggtaaagcacagagtgcagtagtaaagataaactgcactcagagtggggctattttagatggaatggagatctctgaggaaatgaaatttgagctgagacctaaaaggtcacccaaggactcatgggaaaactcagttgtttctatcaaaatttagcttcatgaactccaggcccttgcaaatgatggttaccaggtgagaaatgtctcactggcaacagaggttggcagacccagctccagttccatcccagccaacataccaatgtcattaaaataaggccattcatcaaggtggagactattactagaaacaagcattctaaagtgccatttgagtgccaggctctcaacactgggcgtagcactgctccatgaggcttttgagagcatatactgaggcatgaccaaaaaaattaagtcccatgtaagtgatgcaactgctccccaattactgtggaagtatctgcagactaactattgtgcgtgtgtgtttgtttgctttaatgaataaattcagtcaaccaaccatctagctattgactaaatccattctttttcttccaaaatgtctattggctgaagtttactggtttttatttctattcgcatac

SEQ ID NO: 459964 - DNA, 1469 bp, Homo sapiens
cgtggtcaggtccggagtccttgggatcttgcgtcgctgctcctgtctccgtgtaactcacaataaagagattttggcatcaaccgtgagcttaggggtagaagggtatatgttaggaggtgggagcagaatcaattcttcaaatcttaatgatggtgaagaagagtgctcaccagattcccttctggtctggaaaaagaaatcccttcttttgtggatgtcatctctaccatctctcggtgaaaaatatttcaagagaatcctaagatggagagagcattggaagtcatccggcccaattcccttgtgcaattcaaagcttctttgtaagaaaaatgcccccagaagtttgtttgcatcatgaagatcagattttgaggatccagtctggctcttccctgtacaaaacattcctcacaaacagaatatggacaattgttaaatgtcaaaggtaaagttattgtgggaactccttcaaaaagttcaagtgagagcccattctatgaatgaccatttacatctaatttttttctgtgctatgttacttattctgaagtggttgatccaattcctaaaagggaatatttcattaccttttatttcctatagcatccattctgaccccttttcggtttaattattccctgattccagtcttcattcactcatttatttgaggaatatttattgaccaacaactatgccaggtcccattctatgtgtagggactataaagttgaacaagacagaggaggtactggcctcagaatttacattctagtagatgagaaagtaaaaataaacacatgaaaacatgaatgaaccggatattgtagactgtgataggtgtagtttgggtaaagcacagagtgcagtagtaaagataaactgcactcagagtggggctattttagatggaatggagatctctgaggaaatgaaatttgagctgagacctaaaaggtcacccaaggactcatgggaaaactcagttgtttctatcaaaatttagcttcatgaactccaggcccttgcaaatgatggttaccaggtgagaaatgtctcactggcaacagaggttggcagacccagctccagttccatcccagccaacataccaatgtcattaaaataaggccattcatcaaggtggagactattactagaaacaagcattctaaagtgccatttgagtgccaggctctcaacactgggcgtagcactgctccatgaggcttttgagagcatatactgaggcatgaccaaaaaaattaagtcccatgtaagtgatgcaactgctccccaattactgtggaagtatctgcagactaactattgtgcgtgtgtgtttgtttgctttaatgaataaattcagtcaaccaaccatctagctattgactaaatccattctttttcttccaaaatgtctattggctgaagtttactggtttttatttctattcgcatac

SEQ ID NO: 459965 - DNA, 1577 bp, Homo sapiens
gaactctctaagggaaaattagcagtatcagggctgggatgacgtatgatggactacccaatttcagggttggacagtaacataggggggtcgcctaataaatttaaggcccgaaaccaaatacctactgggtttgagtcagcactcttctggtggtcaactattaagattgtgaattggattaactacatctattgtaatcaacaaagattcatcagttatacttggaatgcactcaaagggatggtgtatgtttcatgtggagaactctggatcaatcctgacctgtccattgctcagcaaaagaaacaaatattcctgaggaacctagaatcagacattgccaaaattcaaatcttctgcagcacacataaaatagaagaagtccaaagtgacattgtatctggaagcaagcttgctgtgcataaacctgtagcaatttttggagaagagaagcaagttacagaaccggaagaaaagcaaatgcaagaagatcctctaacaacggaaaatgcttccagtgaaattctgtatgcctggcaggaaacttcacatgactttgatgaggatgacagtcttccaaagaaaacggaaaaagggctctttgaaaatgtggaaccacagaagaaacacagctgttcaccaaagcatagtaaattgcacaagcattgtcatcagcagttcgaatacagagatgggcagattataagccatgctgctcctcagctagtcttgggggttcaaggtcccaatctccgatcaggcatggaggtggttttggtggagaagaaatctgatggtagtcatcagcgctggatacaccaggaagacagcagtaaccctgaccttgtgctggcagtgtctatgaccaagactagaaatgaagtttgtggctatccagttattgttcagaaatataagccgtacaacaatggagctgccaatcaaaagtggcattacatgaaaaatataaaagcacttgtggcctttcatagcactgccttggataaggaaattacatcagcaaattatgctggtgtctgtacatcatctgtgattaaagaagaaaacattgatcaaccaggatactgttatctctcacctgatggaaagagaaaaactatgctctgcttggcttgtggacaatccatgagaacagagaaaggactgaaacaattgcttccaggggttccattcctctgtatttcaggcaccaagactcagaagcccttcttacaagggcccttcaaggtcatcagtgtggctgaggtatgtaatgatctgagctctgctaatgcatgtatggcaacaatttggaaactttgatgcattcattatctgccttgcactcaagttcatctccactcatccaattcatcttcctcagatgcacctttaccattctacctgcattgatttccttttccccattgtaatttaaaatgcattgtctattaatagttcaatagactctttgaagttaattgggcacttctgcagctttaatcatttactgacatatttcactgttctcagtgttgcttttaggtgaggaagtaactgcaaatctttacttc

SEQ ID NO: 459966 - DNA, 1307 bp, Homo sapiens
ggtggagcgccgcgggggcccccctgagccggggcgggtcgggggcgggaccagggtccggccggggcgtgcccgaggggagggactccccggcttgcgacccggcgttgtccgcggtgctcagcgcccgcccgggcgcgccatggggaaccgcagcaccgcggacgcggacgggctgctggctgggcgcgggccggccgcgggggcatctgcgggggcatctgcggggctggctgggcagggcgcggcggcgctggtggggggcgtgctgctcatcggcgcggtgctcgcggggaactcgctcgtgtgcgtgagcgtggccaccgagcgcgccctgcagacgcccaccaactccttcatcgtgagcctggcggccgccgacctcctcctcgctctcctggtgctgccgctcttcgtctactccgaggtgagccgcgtccggccgcacgagcatcctcacctgctcctcggttccccgtccctgtccctacggaggacccggcgcgacccggcccctttctggtgcggagcttccagctggggcggcggcaggggcgctgcgccttgtccctcggcgatacacccaccgccgccacctcgcgaccttccacccgctgcgctgtctgtcccccgaccctcgttcctcttctccttccccgtctgtcttggcgtctgttatccaggagatgcccgtccttctatccagggaccccggaaacaggcgactttgtcaagcccagtcccctccgtagctggatttcacctccagggcagccagctggacagacaggcagatgcaggctcagccccctggctgccgtgggacacacacacacacacactgccacagccactgcccaccacacacacctagtgcagatgctggcacacccccagaaggaggctcacagctcgcaggggagacctgggctggacaaaacccaggggaggggagggtgtgtggggaccaggcccctgctgagaaccctggggggaagcctgagggggaattgggggatggagcccacactccacaccaggtctggccctcgagtgggtcggccttggtgccagcccctctgcggccagagaaaagcagcttagggctgagctggagacgcggtgtccccgactgtgggggagggggactcgaggtttccccttgatggacacagtgaatccaggcggctggggcagagaccagcagcacgggacacgcgtgacctgtgctcctttcgagccgcagacgtcacagtgacgacgtttaagctcctaatctccccaaatcggcgggaaggattagaggg

SEQ ID NO: 459967 - DNA, 1756 bp, Homo sapiens
ggtggagcgccgcgggggcccccctgagccggggcgggtcgggggcgggaccagggtccggccggggcgtgcccgaggggagggactccccggcttgcgacccggcgttgtccgcggtgctcagcgcccgcccgggcgcgccatggggaaccgcagcaccgcggacgcggacgggctgctggctgggcgcgggccggccgcgggggcatctgcgggggcatctgcggggctggctgggcagggcgcggcggcgctggtggggggcgtgctgctcatcggcgcggtgctcgcggggaactcgctcgtgtgcgtgagcgtggccaccgagcgcgccctgcagacgcccaccaactccttcatcgtgagcctggcggccgccgacctcctcctcgctctcctggtgctgccgctcttcgtctactccgaggtccagggtggcgcgtggctgctgagcccccgcctgtgcgacgccctcatggccatggacgtcatgctgtgcaccgcctccatcttcaacctgtgcgccatcagcgtggacaggtgcgccgccctccccgcccgcgccccggcgcccccgcgccccgcccgccgccctcaccgcggcctgtgcgctgtccggcgccccctcggcgctccccgcaggttcgtggccgtggccgtgccgctgcgctacaaccggcagggtgggagccgccggcagctgctgctcatcggcgccacgtggctgctgtccgcggcggtggcggcgcccgtactgtgcggcctcaacgacgtgcgcggccgcgaccccgccgtgtgccgcctggaggaccgcgactacgtggtctactcgtccgtgtgctccttcttcctaccctgcccgctcatgctgctgctctactgggccacgttccgcggcctgcagcgctgggaggtggcacgtcgcgccaagctgcacggccgcgcgccccgttttcccagcggccctggcccgccttcccccacgccacccgcgccccgcctcccccaggacccctgcggccccgactgtgcgccccccgcgcccggccttccccggggtccctgcggccccgactgtgcgcccgccgcgcccagcctcccccaggacccctgcggccccgactgtgcgccccccgcgcccggcctccccccggacccctgcggctccaactgtgctccccccgacgccgtcagagccgccgcgctcccaccccagactccaccgcagacccgcaggaggcggcgtgccaagatcaccggccgggagcgcaaggccatgagggtcctgccggtggtggtcggggccttcctgctgtgctggacgcccttcttcgtggtgcacatcacgcaggcgctgtgtcctgcctgctccgtgcccccgcggctggtcagcgccgtcacctggctgggctacgtcaacagcgccctcaaccccgtcatctacactgtcttcaacgccgagttccgcaacgtcttccgcaaggccctgcgtgcctgctgctgagccgggcacccccggacgccccccggcctgatggccaggcctcagggaccaaggagatggggagggcgcttttgtacgttaattaaacaaattccttcccaaactcagctgtgaaggctcctgggggctgatggggagtggggaagaggggtttctgcctcagtggccccaggccccccagccagttaacctctttctccccgccaaggaagcccacagagcagaccccaccaagccggccgcctgctcagg

SEQ ID NO: 459968 - DNA, 1661 bp, Homo sapiens
acaaatcagccgggggtggtggcgcgcggctgtaatcccagctactctggagactgaggtgggaggatcgcttgagctcaggaattccaggctacagtgagccatgatggagccacagcactccagccgcggtgacacagcgagaccctaactcaaaacaaagggagatctgcgtggggaaggggtgtttccctgcccggtcctctggcctctggctcacagccgggcccccttctccgtattcagccctggaactacccataagagtgggggggggtcacaagggcccgcggtggctgggaaacctcagggcctgtggtgtcgccgcgcaggtccagggtggcgcgtggctgctgagcccccgcctgtgcgacgccctcatggccatggacgtcatgctgtgcaccgcctccatcttcaacctgtgcgccatcagcgtggacaggtgcgccgccctccccgcccgcgccccggcgcccccgcgccccgcccgccgccctcaccgcggcctgtgcgctgtccggcgccccctcggcgctccccgcaggttcgtggccgtggccgtgccgctgcgctacaaccggcagggtgggagccgccggcagctgctgctcatcggcgccacgtggctgctgtccgcggcggtggcggcgcccgtactgtgcggcctcaacgacgtgcgcggccgcgaccccgccgtgtgccgcctggaggaccgcgactacgtggtctactcgtccgtgtgctccttcttcctaccctgcccgctcatgctgctgctctactgggccacgttccgcggcctgcagcgctgggaggtggcacgtcgcgccaagctgcacggccgcgcgccccgttttcccagcggccctggcccgccttcccccacgccacccgcgccccgcctcccccaggacccctgcggccccgactgtgcgccccccgcgcccggccttccccggggtccctgcggccccgactgtgcgcccgccgcgcccagcctcccccaggacccctgcggccccgactgtgcgccccccgcgcccggcctccccccggacccctgcggctccaactgtgctccccccgacgccgtcagagccgccgcgctcccaccccagactccaccgcagacccgcaggaggcggcgtgccaagatcaccggccgggagcgcaaggccatgagggtcctgccggtggtggtcggggccttcctgctgtgctggacgcccttcttcgtggtgcacatcacgcaggcgctgtgtcctgcctgctccgtgcccccgcggctggtcagcgccgtcacctggctgggctacgtcaacagcgccctcaaccccgtcatctacactgtcttcaacgccgagttccgcaacgtcttccgcaaggccctgcgtgcctgctgctgagccgggcacccccggacgccccccggcctgatggccaggcctcagggaccaaggagatggggagggcgcttttgtacgttaattaaacaaattccttcccaaactcagctgtgaaggctcctgggggctgatggggagtggggaagaggggtttctgcctcagtggccccaggccccccagccagttaacctctttctccccgccaaggaagcccacagagcagaccccaccaagccggccgcctgctcagg

SEQ ID NO: 459969 - DNA, 688 bp, Homo sapiens
aactacggtagcatgaagccaaacgagggttccacagaagtctccaatcttcaaatcttcagtgtatgaaagcacagattcctgaaagaatggcctcaaatgaccaggagtaggagctctctatatccctgctcctgaaaaacaagctaactggagtctccatcacctgccaccagctatacacactaccaactacccaactgaactccatgactgatttgccagctaatcatgcccctgacccagcccacatggacatgggaaggacatcagtgaactgtgaaaagagaggctggagtgcaatggcacaatttcggctatccacaatctctgtctcccagattcaagctattctcctgcctctgtctcccgaggagctgggattacagatgaaagcaccattatcaagtcagaagagcacaagtcaaaccactgtaagttgaggattctctgtactttcttaaatgtttgatagaattcacctaagaaagcatgtagcctataattatagaaatatttttaaattaaaaaaattcttcaatacatagagaagctattactttttctatttcattttgcatccgttttaggaattagttttacaaataatttcccatgttattttaattgtcaaatgtattggcctaaagttttcataattatattgatgtctgtaggttctgtagtt

SEQ ID NO: 459970 - DNA, 1295 bp, Homo sapiens
cccaggaggggagacaatggtattactcacagtatcaaagaggttgtacagcccccctgtgatagtttctaatatccaggggatgtataccacccttgtgatattgtttctaatatgtagggggaaggacaatgatattactgtccgtatcacagggggtgtacaacaagccccccgggatatcattcctaatatccatgggaagaaagaatattataatatcacagaagttgtaaaccccctctgtgatattgttcctaatatcaaagacagaaggtactataaatatcgcaaggggtgtacaccccttctgatattgttactaatatccgtggggggagtcgatgatattacttccaatatcacagggcatgtacaccccacttgtgatattgttcctaatatcctgggaggagactacgatattactggcaatatcgcagggtgtgtgcattcccgtgatattgttcctaatgtccagcaagggagaaaatattactcccaatatggcgggggtgtacacttcccatgcgatatcgttcctaatatccatgggggaaaaggatgatattactctaaatggcgcaggaggtgtaaaccgcccctgtgatattgttctcaatatccatagggggagagaatgatattactcccaatatcacaggtggtgtacacccctccttttatattattcctaatatcctaggttgggagagaataatattacaggtaaaatagcagggggtgtacactctgcctgtgatattgttcctaatatcccagggaagagtggacaatattactctcaatatcgcaggatgtgtacaccccctttgtgatattgttcctaatatccataggcggagagggtgataccactcccaatagtgcagaaaaggctggagtgcaatggcacaatttcggctatccacaatctctgtctcccagattcaagctattctcctgcctctgtctcccgaggagctgggattacagatgaaagcaccattatcaagtcagaagagcacaagtcaaaccactgtaagttgaggattctctgtactttcttaaatgtttgatagaattcacctaagaaagcatgtagcctataattatagaaatatttttaaattaaaaaaattcttcaatacatagagaagctattactttttctatttcattttgcatccgttttaggaattagttttacaaataatttcccatgttattttaattgtcaaatgtattggcctaaagttttcataattatattgatgtctgtaggttctgtagtt

SEQ ID NO: 459971 - DNA, 1794 bp, Homo sapiens
ctgttccctttgccatgcaaaagctgtttagtttaattaagtcccagctatttatctttgtttttattgcatttgcatttgggttcttggtcatgaaatccttgcgtatttctaggaggtttctagaggagtccatagggttttctaaacaaaagattatatcatcagcaacaagtgacagtttgacttcctctttaccgatttggatttcctctatttccttcttttgtctgattgctctggctaggacttccagtactatgttgaagaagagtggtgagagtgggctcctcgtcttgttccagttctcaaagggaatgctttcaccgtttccccattcagtattatgttggctgtgggtttgtatagatggcttttattacattaagggatcatggcacaagttgcagtttccaccctgcccatggaagatgaggagtccatggaagatgaggagtccattgaagatgaggagtctgttgaagatgattccgtggagagcaggatggtggtgacatttctcatatcagctcccgagtccacggtgagaccttctgttctaacatgatataattgggtagaactgggtggtagataaggttgatttgtttttgtagaacttataattttatgatttgtagttctaatgagtagatctttttctggaatagtagttatggtcaaacacttctaaccaaatgtgccatgttgtccagtctggtctcaaaatatggggctcaagagacctgcccaccttggcctcccaaaatactgggattacaggtgtaagccgctgaatctggccagatatttttctttttatggctgaataatactctgtgtatgtatatattacattttctttatctattcacctactgatgggcattaggtttgggctaccttttggccactgtgaataatgctgctgttaatcgggtgtacaaatacctgtttgagtccctgctctcagttcttttgggtatatatgcttaaagggtgtggatggatcatataattctatgcttcatatttttaaggagctgctaaaccattttccacagtgggctgtaccattttacattccaaaaagcaatgcatacagcttccaatttctctatagcattgctgacagttaatattttctgtttatgtattgtatttttatagtgtttgaaattaatctgaggctttttgctgataccaaaatattaggaaaggttttccaaaaataatactgcttattataaaggattttacgtgttacttgatgccctgtgatctgttttctaagtaagaagaggaacttcttggctgggcacagcagctcatgcctgtaatcctagcacttttggaggccgagctgaaaatagttaattttatgtatattccaagtcagaatacatcctatttttgaatatttgatgactttaggatactatattaactcttaattgaattaatacaagtttaggtgtaaagatgatgtttatgttgacaaaaatgattaatgttttacatatatgaaagtaacaatatcatatatttttcatacttgtagaatactttgaaatctattattagctaatattttatattcattttgggttttcacattattgttagatccagagaaaagtaatattttgtgaatactcaaatcataaacattttgctggatgcattcatagatactttatttaaaaagtacactaattgaagttttacaccattttatgattcatcaaacacagcaactgaatactggcgtatatcaacattacagatgatgtt

SEQ ID NO: 459972 - DNA, 1490 bp, Homo sapiens
gcgcctgcgccggcgctgtgcgactttgcgagggcggagctgcgttcttcccagcacagacaaggagagcatcgccagggcggagggatcatggcacaagttgcagtttccaccctgcccatggaagatgaggagtccatggaagatgaggagtccattgaagatgaggagtctgttgaagatgattccgtggagagcaggatggtggtgacatttctcatatcagctcccgagtccacggtgagaccttctgttctaacatgatataattgggtagaactgggtggtagataaggttgatttgtttttgtagaacttataattttatgatttgtagttctaatgagtagatctttttctggaatagtagttatggtcaaacacttctaaccaaatgtgccatgttgtccagtctggtctcaaaatatggggctcaagagacctgcccaccttggcctcccaaaatactgggattacaggtgtaagccgctgaatctggccagatatttttctttttatggctgaataatactctgtgtatgtatatattacattttctttatctattcacctactgatgggcattaggtttgggctaccttttggccactgtgaataatgctgctgttaatcgggtgtacaaatacctgtttgagtccctgctctcagttcttttgggtatatatgcttaaagggtgtggatggatcatataattctatgcttcatatttttaaggagctgctaaaccattttccacagtgggctgtaccattttacattccaaaaagcaatgcatacagcttccaatttctctatagcattgctgacagttaatattttctgtttatgtattgtatttttatagtgtttgaaattaatctgaggctttttgctgataccaaaatattaggaaaggttttccaaaaataatactgcttattataaaggattttacgtgttacttgatgccctgtgatctgttttctaagtaagaagaggaacttcttggctgggcacagcagctcatgcctgtaatcctagcacttttggaggccgagctgaaaatagttaattttatgtatattccaagtcagaatacatcctatttttgaatatttgatgactttaggatactatattaactcttaattgaattaatacaagtttaggtgtaaagatgatgtttatgttgacaaaaatgattaatgttttacatatatgaaagtaacaatatcatatatttttcatacttgtagaatactttgaaatctattattagctaatattttatattcattttgggttttcacattattgttagatccagagaaaagtaatattttgtgaatactcaaatcataaacattttgctggatgcattcatagatactttatttaaaaagtacactaattgaagttttacaccattttatgattcatcaaacacagcaactgaatactggcgtatatcaacattacagatgatgtt

SEQ ID NO: 459973 - DNA, 1420 bp, Homo sapiens
gcaggccaaagcatggctggccccatagacccttgtaataagcttcttagggtttcttggatgctaaaaattgcatgtcaggtcccttccctgctcctttcccagcaaagcaccaactccagtctagaggaaattaactgtcatggtttttctcttgcagcctatcactgggacacctctgattggatgccaggggcccgcctgtcggacatagaggaagtgcccaactatgagaaccaggatggagggtctgcacaccaggggagcacacgggagctggagagcgattactacctgggtggttatgacattgacagtgaatacccaccccctcatgaagaggagttcttgagtcaggaccagctgcctcctcctctcccggaggacttcccagaccaatatgaggccctgccaccctcccagcctgtctccctggccagcacactgagcccagactgcaggagaaggccccagtttcatcctagccagtatctccctcctcacccattccccaacgaaacggatttggtgggcccgcctgccagctgtgaatttagtacttttgctgtgagcatgaaccagggcacagagcccacaggcccagcagacagcgtgtctctgtccttgcacaattccagaggcacctcatcctcggatgtgtctgccaactgcggctttgacgattccgaagtagccatgagtgactacgagagcgtgggagagctcagcctcgccagccttcacattccctttgtggagactcagcatcagactcaagtgtagacatcacatcttgggtacttcaccctgtttgttacagaaaagtggaagcagattggctgggcttctgtcccagtggagcattgtctgtggaatgagaagggaatactgtatttttccactagaaacttcttcacaagtcatactgtcccaacaagcaagcttgattccagttgggtgaaaatgaaaggctcagaaattgtttttgagaggtgactggtaatccttgattttctgatgacatatggcattggtgtgtaaattgtactgtccctagtctgtgcattattcactcagacatatttttagttatttcaattgcgtttaatccacttcttttttatgagtcagtgtttctgaatgtttatgcaaaaaaaaaaatcctttttcattcccaaactttctaagtaagtggatacactacacttcacaagttttccagcctttctcttcctgtctcttggtcagacctactcatggaggtattatccacactgtgatcttgaaataaatgaatttcactaaggctgctttcgagaacaaagtctttggtatttttcttatgtaagaagcacatttgcaagaatcatggaaaaaaatgacaaactaatggcctagaatagagtgactgctacacttt

SEQ ID NO: 459974 - DNA, 2123 bp, Homo sapiens
tttgggcatctgcagagggcgaggaactggtcacggcgccgggtgggcttgcagctgtgacgcttatgtggacacctcagtgtcgctggtggttcacctcggcttcccagtttatttattgacgtcaacaaataaatgttgaataaggaagaagagttagaattgcttgaagccctctggagttttagcactagtcccgcccactcccttctacttccaggtcgggggggggcgggtccaatagaaaggcggaagccagtgtcccaggcgttctcacgcccgcaacaattcctgagtagggccttgcttgagttcttcggaaagtctcatccacccccacatcgcctctttaggaagtcacttaatgttgggcttcattattcccacatccctttccttactacttgcctgcacttcttgagaaaaagactgcagaaaggagaggtggggctttcagtagaaacaagcaaaccgcaggtccctgtggggggactctccaggaagattccgcaagaaccgtgggcgacagttatggagaagcgtctgcaggaggctcagctgtacaaggaggaagggaaccagcgctaccgggaagggaagtaccgagatgctcttgtctccttcagatggagcccgtgaactacgaacgagtgagagaatatagtcagaaagtcctggaacgacagcctgataatgccaaggccttgtatcgggccggagtggcctttttccatctgcaggactatgaccaggcccgccactacctcctggctgccgtgaataggcagcctaaagaaaagcagtattattagtttcatgtgtagggggttgatgcttaatcagacatacacaatatatatgttggtatgtctgtttcatatatgtatgtatgcctattctaatatataaatatatgtatatcaacgtgcttttatttataaatatacagtgtatatatttatacatatacatgaatatatatataaaataggcaggccagtaaataaataaaataaataaataaataaataaataaaaattagcagccgggacagagattgttttttttcaattccaaatgttattaattaatgagatttactattgcatagaatggttgcgatatattcagatcttggagagattttaaaatgggagcatgttaacattctctcctgccacaaggtatgattatggtcttaactgactctaactgtttctaattgcttctccatcatcttccaagatgccaacgtccggcggtacctccagctgacacagtcagaactcagcagctaccatagaaaagagaagcagctctacctgggcatgtttggttaacaaagaagaaagatgctcctccagttgaacttaggtggaccattaaacatgcatgaaggagaaatctgagcctcagcaagagaaattaaccctatacctctgacccagttccaggatccatgtgcaggatatgcaggtttgttacatagggaaacgtgtgcctcggtggtttgctgcacctatcaacacatcacctcggtattaagtccagcatgtattagctatttttcctcatgttctcccaccccccgccacagcccctgttaaattaatttcttattctccttaatattccatacacattcagattccttctcccctacaaaaatatttgctattttgtccttgctatttctcatacttagatcattcatacactatatttattttttcattaaactattttaaaacctttggagtaaagcatttaagtatttatttaataaacccttcagacctcatgctaaagaaaacacctaagtgaacattttaaattttaataggtgcttatctatagtatcctcatttctcttaaaaaaaaaaaaaaaaaaaaaaaaaaagaccatcctggctaacacggtgaaactccgtctctactaaaaatacaaaaaaaaaaaattagctgggcttggtagcgtgtgcctgtagtcccagctactcgggaggctgaggcaggagaatggcgtgaactcaggaggtggagcttgcagtgagccgagatcacgccactgcactccagcctgggtgacagagagagactccatctcaaaaaaaagaaaaga

SEQ ID NO: 459975 - DNA, 900 bp, Homo sapiens
cagctgggattacaggcatgtgccaccacgcccggctaatttttttgtatttcctttttagtagagacatggttttgccatgttggccagggtgctcttgaactcctggcctcaagtgatccacccactcgggctcccaaagtgctgggattacaggtgtgagccgactatgcctggccaaaagtaaccattttgtttaattttttctttttcttttaattttaagttccaggatccatgtgcaggatatgcaggtttgttacatagggaaacgtgtgcctcggtggtttgctgcacctatcaacacatcacctcggtattaagtccagcatgtattagctatttttcctcatgttctcccaccccccgccacagcccctgttaaattaatttcttattctccttaatattccatacacattcagattccttctcccctacaaaaatatttgctattttgtccttgctatttctcatacttagatcattcatacactatatttattttttcattaaactattttaaaacctttggagtaaagcatttaagtatttatttaataaacccttcagacctcatgctaaagaaaacacctaagtgaacattttaaattttaataggtgcttatctatagtatcctcatttctcttaaaaaaaaaaaaaaaaaaaaaaaaaaagaccatcctggctaacacggtgaaactccgtctctactaaaaatacaaaaaaaaaaaattagctgggcttggtagcgtgtgcctgtagtcccagctactcgggaggctgaggcaggagaatggcgtgaactcaggaggtggagcttgcagtgagccgagatcacgccactgcactccagcctgggtgacagagagagactccatctcaaaaaaaagaaaaga

SEQ ID NO: 459976 - DNA, 887 bp, Homo sapiens
tttgggcatctgcagagggcgaggaactggtcacggcgccgggtgggcttgcagctgtgacgcttatgtggacacctcagtgtcgctggtggttcacctcggcttcccagtttatttattgacgtcaacaaataaatgttgaataaggaagaagagttagaattgcttgaagccctctggagttttagcactagtcccgcccactcccttctacttccaggtcgggggggggcgggtccaatagaaaggcggaagccagtgtcccaggcgttctcacgcccgcaacaattcctgagtagggccttgcttgagttcttcggaaagtctcatccacccccacatcgcctctttaggaagtcacttaatgttgggcttcattattcccacatccctttccttactacttgcctgcacttcttgagaaaaagactgcagaaaggagaggtggggctttcagtagaaacaagcaaaccgcaggtccctgtggggggactctccaggaagagctcccaaccccagagcttcacttgctccttcacttcccagttccgcaagaaccgtgggcgacagttatggagaagcgtctgcaggaggctcagctgtacaaggaggaagggaaccagcgctaccgggaagggaagtaccgagatgctgtgagtaggtaccatcgagctctgcttcagctgcggggtctggatccgagtctgccctctccgttacctaatctcggacctcagggcccggccctcacgcctgaacaagaaaacatattgcataccacccagacagactgctataacaatctagctggtaagaacggggctaaagggtggctagagagcattaagacaggaacatgaacatctgtgaacattgggggaaaaaac

SEQ ID NO: 459977 - DNA, 1483 bp, Homo sapiens
aggctggtactggcccggaaggtagggatcggaaagtctcatccacccccacatcgcctctttaggaagtcacttaatgttgggcttcattattcccacatccctttccttactacttgcctgcacttcttgagaaaaagactgcagaaaggagaggtggggctttcagtagaaacaagcaaaccgcaggtccctgtggggggactctccaggaagaagggtaatttcctgcctccttaaattggctgctactgtcagttattttgctcccaaccccagagcttcacttgctccttcacttcccagttccgcaagaaccgtgggcgacagttatggagaagcgtctgcaggaggctcagctgtacaaggaggaagggaaccagcgctaccgggaagggaagtaccgagatgctgtgagtaggtaccatcgagctctgcttcagctgcggggtctggatccgagtctgccctctccgttacctaatctcggacctcagggcccggccctcacgcctgaacaagaaaacatattgcataccacccagacagactgctataacaatctagctgcttgtctccttcagatggagcccgtgaactacgaacgagtgagagaatatagtcagaaagtcctggaacgacagcctgataatgccaaggccttgtatcgggccggagtggcctttttccatctgcaggactatgaccaggcccgccactacctcctggctgccgtgaataggcagcctaaagatgccaacgtccggcggtacctccagctgacacagtcagaactcagcagctaccatagaaaagagaagcagctctacctgggcatgtttggttaacaaagaagaaagatgctcctccagttgaacttaggtggaccattaaacatgcatgaaggagaaatctgagcctcagcaagagaaattaaccctatacctctgacccaggtggatttttgtttctagttctgcacaaacttcactacttagacagtctgagtctttttctgtctatccatctgtttatttctatacctttcaatacatgttattgttgcagatatttggcttgagaaatataatcagaaaacataaaaaaaaaatgggtggaattaatcatatctctggtatagatttttcatgacagtgttgttagatgtacttatatacagaggcgacagcttgcagaggacgacatagtaaggataggcagaaagaattgtcttcctttattttttcagaagcccaaaccaaagtgggaaatatggccgggcgctctagctcatgcctgtaatcccagcacattgggaggctgaggcaggagaatggcatgaacccgggaggtggagcttgcagtgagcagagatcacgccactgcactccagcctgggcaacagagcgagactccgtctcaaaaaaaaaaaaaaatgcaaagattagctgggccaggtgttcacctgtagtcccagctattc

SEQ ID NO: 459978 - DNA, 1342 bp, Homo sapiens
cgctgaggaggcggggtcgtttctgcgggattatttttccggagcctcttctgattgggtggtgtggcgcaatgcgcgcgaccctcaagataccaaactgtacgcatctctgaccctttcctctccttgctcctgctggtaaaccgaagcccaggagacttccagttccgcaagaaccgtgggcgacagttatggagaagcgtctgcaggaggctcagctgtacaaggaggaagggaaccagcgctaccgggaagggaagtaccgagatgctgtgagtaggtaccatcgagctctgcttcagctgcggggtctggatccgagtctgccctctccgttacctaatctcggacctcagggcccggccctcacgcctgaacaagaaaacatattgcataccacccagacagactgctataacaatctagctgcttgtctccttcagatggagcccgtgaactacgaacgagtgagagaatatagtcagaaagtcctggaacgacagcctgataatgccaaggccttgtatcgggccggagtggcctttttccatctgcaggactatgaccaggcccgccactacctcctggctgccgtgaataggcagcctaaagatgccaacgtccggcggtacctccagctgacacagtcagaactcagcagctaccatagaaaagagaagcagctctacctgggcatgtttggttaacaaagaagaaagatgctcctccagttgaacttaggtggaccattaaacatgcatgaaggagaaatctgagcctcagcaagagaaattaaccctatacctctgacccaggtggatttttgtttctagttctgcacaaacttcactacttagacagtctgagtctttttctgtctatccatctgtttatttctatacctttcaatacatgttattgttgcagatatttggcttgagaaatataatcagaaaacataaaaaaaaaatgggtggaattaatcatatctctggtatagatttttcatgacagtgttgttagatgtacttatatacagaggcgacagcttgcagaggacgacatagtaaggataggcagaaagaattgtcttcctttattttttcagaagcccaaaccaaagtgggaaatatggccgggcgctctagctcatgcctgtaatcccagcacattgggaggctgaggcaggagaatggcatgaacccgggaggtggagcttgcagtgagcagagatcacgccactgcactccagcctgggcaacagagcgagactccgtctcaaaaaaaaaaaaaaatgcaaagattagctgggccaggtgttcacctgtagtcccagctattc

SEQ ID NO: 459979 - DNA, 1723 bp, Homo sapiens
tttgggcatctgcagagggcgaggaactggtcacggcgccgggtgggcttgcagctgtgacgcttatgtggacacctcagtgtcgctggtggttcacctcggcttcccagtttatttattgacgtcaacaaataaatgttgaataaggaagaagagttagaattgcttgaagccctctggagttttagcactagtcccgcccactcccttctacttccaggtcgggggggggcgggtccaatagaaaggcggaagccagtgtcccaggcgttctcacgcccgcaacaattcctgagtagggccttgcttgagttcttcggaaagtctcatccacccccacatcgcctctttaggaagtcacttaatgttgggcttcattattcccacatccctttccttactacttgcctgcacttcttgagaaaaagactgcagaaaggagaggtggggctttcagtagaaacaagcaaaccgcaggtccctgtggggggactctccaggaagaagggtaatttcctgcctccttaaattggctgctactgtcagttattttgctcccaaccccagagcttcacttgctccttcacttcccagttccgcaagaaccgtgggcgacagttatggagaagcgtctgcaggaggctcagctgtacaaggaggaagggaaccagcgctaccgggaagggaagtaccgagatgctgtgagtaggtaccatcgagctctgcttcagctgcggggtctggatccgagtctgccctctccgttacctaatctcggacctcagggcccggccctcacgcctgaacaagcttgtctccttcagatggagcccgtgaactacgaacgagtgagagaatatagtcagaaagtcctggaacgacagcctgataatgccaaggccttgtatcgggccggagtggcctttttccatctgcaggactatgaccaggcccgccactacctcctggctgccgtgaataggcagcctaaagatgccaacgtccggcggtacctccagctgacacagtcagaactcagcagctaccatagaaaagagaagcagctctacctgggcatgtttggttaacaaagaagaaagatgctcctccagttgaacttaggtggaccattaaacatgcatgaaggagaaatctgagcctcagcaagagaaattaaccctatacctctgacccaggtggatttttgtttctagttctgcacaaacttcactacttagacagtctgagtctttttctgtctatccatctgtttatttctatacctttcaatacatgttattgttgcagatatttggcttgagaaatataatcagaaaacataaaaaaaaaatgggtggaattaatcatatctctggtatagatttttcatgacagtgttgttagatgtacttatatacagaggcgacagcttgcagaggacgacatagtaaggataggcagaaagaattgtcttcctttattttttcagaagcccaaaccaaagtgggaaatatggccgggcgctctagctcatgcctgtaatcccagcacattgggaggctgaggcaggagaatggcatgaacccgggaggtggagcttgcagtgagcagagatcacgccactgcactccagcctgggcaacagagcgagactccgtctcaaaaaaaaaaaaaaatgcaaagattagctgggccaggtgttcacctgtagtcccagctattc

SEQ ID NO: 459980 - DNA, 1754 bp, Homo sapiens
tttgggcatctgcagagggcgaggaactggtcacggcgccgggtgggcttgcagctgtgacgcttatgtggacacctcagtgtcgctggtggttcacctcggcttcccagtttatttattgacgtcaacaaataaatgttgaataaggaagaagagttagaattgcttgaagccctctggagttttagcactagtcccgcccactcccttctacttccaggtcgggggggggcgggtccaatagaaaggcggaagccagtgtcccaggcgttctcacgcccgcaacaattcctgagtagggccttgcttgagttcttcggaaagtctcatccacccccacatcgcctctttaggaagtcacttaatgttgggcttcattattcccacatccctttccttactacttgcctgcacttcttgagaaaaagactgcagaaaggagaggtggggctttcagtagaaacaagcaaaccgcaggtccctgtggggggactctccaggaagaagggtaatttcctgcctccttaaattggctgctactgtcagttattttgctcccaaccccagagcttcacttgctccttcacttcccagttccgcaagaaccgtgggcgacagttatggagaagcgtctgcaggaggctcagctgtacaaggaggaagggaaccagcgctaccgggaagggaagtaccgagatgctgtgagtaggtaccatcgagctctgcttcagctgcggggtctggatccgagtctgccctctccgttacctaatctcggacctcagggcccggccctcacgcctgaacaagaaaacatattgcataccacccagacagactgctataacaatctagctgcttgtctccttcagatggagcccgtgaactacgaacgagtgagagaatatagtcagaaagtcctggaacgacagcctgataatgccaaggccttgtatcgggccggagtggcctttttccatctgcaggactatgaccaggcccgccactacctcctggctgccgtgaataggcagcctaaagatgccaacgtccggcggtacctccagctgacacagtcagaactcagcagctaccatagaaaagagaagcagctctacctgggcatgtttggttaacaaagaagaaagatgctcctccagttgaacttaggtggaccattaaacatgcatgaaggagaaatctgagcctcagcaagagaaattaaccctatacctctgacccaggtggatttttgtttctagttctgcacaaacttcactacttagacagtctgagtctttttctgtctatccatctgtttatttctatacctttcaatacatgttattgttgcagatatttggcttgagaaaatttatattcgagaaaatataacaggaaaaaaaaaaaaaaaaaaaaaaaaaaaaaatttgggggcggcttgggccccgggaaaaggttcctaaaaccattcgcgttgtgggccggcgggtgccccaagtagggtatacggtgaacactgggcgccataagcgcgtgtccccaaggggaaacctccggggacaaggaacaacagggcgtgggtttccccacccaaataagaaaaaaccccgggggggaacacccggaaggtgttccgagacacaatacccgagaaagggagaccccggagggcaaaacaagggggacctctccacaaggaggagactccaaagggagaaccccgaataccgagataaccccggcccgcggga

SEQ ID NO: 459981 - DNA, 780 bp, Homo sapiens
tactactactaaattcgcggccgcgtcgaccgtgaataggcagcctaaagatgccaacgtccggcggtacctccagctgacacagtcagaactcagcagctaccatagaaaagagaagcagctctacctgggcatgtttggttaacaaagaagaaagatgctcctccagttgaacttaggtggaccattaaacatgcatgaaggagaaatctgagcctcagcaagagaaattaaccctatacctctgacccaggtggatttttgtttctagttctgcacaaacttcactacttagacagtctgagtctttttctgtctatccatctgtttatttctatacctttcaatacatgttattgttgcagatatttggcttgagaaatataatcagaaaacataaaaaaaaaatgggtggaattaatcatatctctggtatagatttttcatgacagtgttgttagatgtacttatatacagaggcgacagcttgcagaggacgacatagtaaggataggcagaaagaattgtcttcctttattttttcagaagcccaaaccaaagtgggaaatatggccgggcgctctagctcatgcctgtaatcccagcacattgggaggctgaggcaggagaatggcatgaacccgggaggtggagcttgcagtgagcagagatcacgccactgcactccagcctgggcaacagagcgagactccgtctcaaaaaaaaaaaaaaatgcaaagattagctgggccaggtgttcacctgtagtcccagctattc

SEQ ID NO: 459982 - DNA, 279 bp, Homo sapiens
ttttttttttttttgaccacttggtggggatgttgtagaagggatacagacatcagcacaggccctttaatgtgctcatcactgctgattcttgatctttctcagcaccatgatttaataatactatgtttaattcccacagttgtgaaatagggagtgtttcccttcttaatcataaaaaggcagaacattgacctgaattgcctgaattgactcctctgcaggtttgtatttcaaggtcccattaagtcatccaagagaatagtgaagttatatgct

SEQ ID NO: 459983 - DNA, 513 bp, Homo sapiens
ggacgacatagtaaggataggcagaaagaattgtcttcctttattttttcagaagcccaaaccaaagtgggaaatatggccgggcgctctagctcatgcctgtaatcccagcacattgggaggctgaggccagcggatcacctgaggtcaggagttcaagaccagcctgaccaacagggtaaaaccctgtctctactaaaaatacaaaaattagcctggcaagatgacacacgcctgtggtctcaggtactggaaactagacaattataaatgagccaggctgggcatggtggctcacgcctgtaatcccagcactttggaaggcagaggtagacagatagatagcttgagtccaggagttcaagaccagcctggggaacacagtgaaaccctgtctctataaaagatgcaaagatggccgggcacggtgggtcaggcctgtaatcccagcactttgggaggccgaggcaggtagatcatgaggtcaggagattgagaccatcctggctaaca

SEQ ID NO: 459984 - DNA, 1771 bp, Homo sapiens
tttgggcatctgcagagggcgaggaactggtcacggcgccgggtgggcttgcagctgtgacgcttatgtggacacctcagtgtcgctggtggttcacctcggcttcccagtttatttattgacgtcaacaaataaatgttgaataaggaagaagagttagaattgcttgaagccctctggagttttagcactagtcccgcccactcccttctacttccaggtcgggggggggcgggtccaatagaaaggcggaagccagtgtcccaggcgttctcacgcccgcaacaattcctgagtagggccttgcttgagttcttcggaaagtctcatccacccccacatcgcctctttaggaagtcacttaatgttgggcttcattattcccacatccctttccttactacttgcctgcacttcttgagaaaaagactgcagaaaggagaggtggggctttcagtagaaacaagcaaaccgcaggtccctgtggggggactctccaggaagaagggtaatttcctgcctccttaaattggctgctactgtcagttattttgctcccaaccccagagcttcacttgctccttcacttcccagttccgcaagaaccgtgggcgacagttatggagaagcgtctgcaggaggctcagctgtacaaggaggaagggaaccagcgctaccgggaagggaagtaccgagatgctgtgagtaggtaccatcgagctctgcttcagctgcggggtctggatccgagtctgccctctccgttacctaatctcggacctcagggcccggccctcacgcctgaacaagaaaacatattgcataccacccagacagactgctataacaatctagctgcttgtctccttcagatggagcccgtgaactacgaacgagtgagagaatatagtcagaaagtcctggaacgacagcctgataatgccaaggccttgtatcgggccggagtggcctttttccatctgcaggactatgaccaggcccgccactacctcctggctgccgtgaataggcagcctaaagatgccaacgtccggcggtacctccagctgacacagtcagaactcagcagctaccatagaaaagagaagcagctctacctgggcatgtttggttaacaaagaagaaagatgctcctccagttgaacttaggtggaccattaaacatgcatgaaggagaaatctgagcctcagcaagagaaattaaccctatacctctgacccaggtggatttttgtttctagttctgcacaaacttcactacttagacagtctgagtctttttctgtctatccatctgtttatttctatacctttcaatacatgttattgttgcagatatttggcttgagaaatataatcagaaaacataaaaaaaaaatgggtggaattaatcatatctctggtatagatttttcatgacagtgttgttagatgtacttatatacagaggcgacagcttgcagaggacgacatagtaaggataggcagaaagaattgtcttcctttattttttcagaagcccaaaccaaagtgggaaatatggccgggcgctctagctcatgcctgtaatcccagcacattgggaggctgaggcaggagaatggcatgaacccgggaggtggagcttgcagtgagcagagatcacgccactgcactccagcctgggcaacagagcgagactccgtctcaaaaaaaaaaaaaaatgcaaagattagctgggccaggtgttcacctgtagtcccagctattc

SEQ ID NO: 459985 - DNA, 1682 bp, Homo sapiens
tttgggcatctgcagagggcgaggaactggtcacggcgccgggtgggcttgcagctgtgacgcttatgtggacacctcagtgtcgctggtggttcacctcggcttcccagtttatttattgacgtcaacaaataaatgttgaataaggaagaagagttagaattgcttgaagccctctggagttttagcactagtcccgcccactcccttctacttccaggtcgggggggggcgggtccaatagaaaggcggaagccagtgtcccaggcgttctcacgcccgcaacaattcctgagtagggccttgcttgagttcttcggaaagtctcatccacccccacatcgcctctttaggaagtcacttaatgttgggcttcattattcccacatccctttccttactacttgcctgcacttcttgagaaaaagactgcagaaaggagaggtggggctttcagtagaaacaagcaaaccgcaggtccctgtggggggactctccaggaagattccgcaagaaccgtgggcgacagttatggagaagcgtctgcaggaggctcagctgtacaaggaggaagggaaccagcgctaccgggaagggaagtaccgagatgctgtgagtaggtaccatcgagctctgcttcagctgcggggtctggatccgagtctgccctctccgttacctaatctcggacctcagggcccggccctcacgcctgaacaagaaaacatattgcataccacccagacagactgctataacaatctagctgcttgtctccttcagatggagcccgtgaactacgaacgagtgagagaatatagtcagaaagtcctggaacgacagcctgataatgccaaggccttgtatcgggccggagtggcctttttccatctgcaggactatgaccaggcccgccactacctcctggctgccgtgaataggcagcctaaagatgccaacgtccggcggtacctccagctgacacagtcagaactcagcagctaccatagaaaagagaagcagctctacctgggcatgtttggttaacaaagaagaaagatgctcctccagttgaacttaggtggaccattaaacatgcatgaaggagaaatctgagcctcagcaagagaaattaaccctatacctctgacccaggtggatttttgtttctagttctgcacaaacttcactacttagacagtctgagtctttttctgtctatccatctgtttatttctatacctttcaatacatgttattgttgcagatatttggcttgagaaatataatcagaaaacataaaaaaaaaatgggtggaattaatcatatctctggtatagatttttcatgacagtgttgttagatgtacttatatacagaggcgacagcttgcagaggacgacatagtaaggataggcagaaagaattgtcttcctttattttttcagaagcccaaaccaaagtgggaaatatggccgggcgctctagctcatgcctgtaatcccagcacattgggaggctgaggcaggagaatggcatgaacccgggaggtggagcttgcagtgagcagagatcacgccactgcactccagcctgggcaacagagcgagactccgtctcaaaaaaaaaaaaaaatgcaaagattagctgggccaggtgttcacctgtagtcccagctattc

SEQ ID NO: 459986 - DNA, 1853 bp, Homo sapiens
tttgggcatctgcagagggcgaggaactggtcacggcgccgggtgggcttgcagctgtgacgcttatgtggacacctcagtgtcgctggtggttcacctcggcttcccagtttatttattgacgtcaacaaataaatgttgaataaggaagaagagttagaattgcttgaagccctctggagttttagcactagtcccgcccactcccttctacttccaggtcgggggggggcgggtccaatagaaaggcggaagccagtgtcccaggcgttctcacgcccgcaacaattcctgagtagggccttgcttgagttcttcggaaagtctcatccacccccacatcgcctctttaggaagtcacttaatgttgggcttcattattcccacatccctttccttactacttgcctgcacttcttgagaaaaagactgcagaaaggagaggtggggctttcagtagaaacaagcaaaccgcaggtccctgtggggggactctccaggaagaagggtaatttcctgcctccttaaattggctgctactgtcagttattttgctcccaaccccagagcttcacttgctccttcacttcccagttccgcaagaaccgtgggcgacagttatggagaagcgtctgcaggaggctcagctgtacaaggaggaagggaaccagcgctaccgggaagggaagtaccgagatgctgtgagtaggtaccatcgagctctgcttcagctgcggggtctggatccgagtctgccctctccgttacctaatctcggacctcagggcccggccctcacgcctgaacaagaaaacatattgcataccacccagacagactgctataacaatctagctgttgtgaaatagggagtgtttcccttcttaatcataaaaaggcagaacattgacctgaattgcctgaattgactcctctgcagcttgtctccttcagatggagcccgtgaactacgaacgagtgagagaatatagtcagaaagtcctggaacgacagcctgataatgccaaggccttgtatcgggccggagtggcctttttccatctgcaggactatgaccaggcccgccactacctcctggctgccgtgaataggcagcctaaagatgccaacgtccggcggtacctccagctgacacagtcagaactcagcagctaccatagaaaagagaagcagctctacctgggcatgtttggttaacaaagaagaaagatgctcctccagttgaacttaggtggaccattaaacatgcatgaaggagaaatctgagcctcagcaagagaaattaaccctatacctctgacccaggtggatttttgtttctagttctgcacaaacttcactacttagacagtctgagtctttttctgtctatccatctgtttatttctatacctttcaatacatgttattgttgcagatatttggcttgagaaatataatcagaaaacataaaaaaaaaatgggtggaattaatcatatctctggtatagatttttcatgacagtgttgttagatgtacttatatacagaggcgacagcttgcagaggacgacatagtaaggataggcagaaagaattgtcttcctttattttttcagaagcccaaaccaaagtgggaaatatggccgggcgctctagctcatgcctgtaatcccagcacattgggaggctgaggcaggagaatggcatgaacccgggaggtggagcttgcagtgagcagagatcacgccactgcactccagcctgggcaacagagcgagactccgtctcaaaaaaaaaaaaaaatgcaaagattagctgggccaggtgttcacctgtagtcccagctattc

SEQ ID NO: 459987 - DNA, 1918 bp, Homo sapiens
tttgggcatctgcagagggcgaggaactggtcacggcgccgggtgggcttgcagctgtgacgcttatgtggacacctcagtgtcgctggtggttcacctcggcttcccagtttatttattgacgtcaacaaataaatgttgaataaggaagaagagttagaattgcttgaagccctctggagttttagcactagtcccgcccactcccttctacttccaggtcgggggggggcgggtccaatagaaaggcggaagccagtgtcccaggcgttctcacgcccgcaacaattcctgagtagggccttgcttgagttcttcggaaagtctcatccacccccacatcgcctctttaggaagtcacttaatgttgggcttcattattcccacatccctttccttactacttgcctgcacttcttgagaaaaagactgcagaaaggagaggtggggctttcagtagaaacaagcaaaccgcaggtccctgtggggggactctccaggaagaagggtaatttcctgcctccttaaattggctgctactgtcagttattttgctcccaaccccagagcttcacttgctccttcacttcccagttccgcaagaaccgtgggcgacagttatggagaagcgtctgcaggaggctcagctgtacaaggaggaagggaaccagcgctaccgggaagggaagtaccgagatgctgtgagtaggtaccatcgagctctgcttcagctgcggggtctggatccgagtctgccctctccgttacctaatctcggacctcagggcccggccctcacgcctgaacaagaaaacatattgcataccacccagacagactgctataacaatctagctgcttgtctccttcagatggagcccgtgaactacgaacgagtgagagaatatagtcagaaagtcctggaacgacagcctgataatgccaaggccttgtatcgggccggagtggcctttttccatctgcaggactatgaccaggcccgccactacctcctggctgccgtgaataggcagcctaaagatgccaacgtccggcggtacctccagctgacacagtcagaactcagcagctaccatagaaaagagaagcagctctacctgggcatgtttggttaacaaagaagaaagatgctcctccagttgaacttaggtggaccattaaacatgcatgaaggagaaatctgagcctcagcaagagaaattaaccctatacctctgacccagttccaggatccatgtgcaggatatgcaggtttgttacatagggaaacgtgtgcctcggtggtttgctgcacctatcaacacatcacctcggtattaagtccagcatgtattagctatttttcctcatgttctcccaccccccgccacagcccctgttaaattaatttcttattctccttaatattccatacacattcagattccttctcccctacaaaaatatttgctattttgtccttgctatttctcatacttagatcattcatacactatatttattttttcattaaactattttaaaacctttggagtaaagcatttaagtatttatttaataaacccttcagacctcatgctaaagaaaacacctaagtgaacattttaaattttaataggtgcttatctatagtatcctcatttctcttaaaaaaaaaaaaaaaaaaaaaaaaaaagaccatcctggctaacacggtgaaactccgtctctactaaaaatacaaaaaaaaaaaattagctgggcttggtagcgtgtgcctgtagtcccagctactcgggaggctgaggcaggagaatggcgtgaactcaggaggtggagcttgcagtgagccgagatcacgccactgcactccagcctgggtgacagagagagactccatctcaaaaaaaagaaaaga

SEQ ID NO: 459988 - DNA, 818 bp, Homo sapiens
gacgagtctttcttccagctctaccctgaaagtcctccaggcaccggtcttttttttctgccttttgtttccctcccggcgagtcggcgcgacagtgaatttccgtttcccgcggtgtccaagcggacctgaggagttgcagctgtgagcaggttagagttacttgttattggtaaatagccactatggagactaaggaccagaagaaacaaagaaagaaaaacagtggacccaaagatgaaaagaaaaagaagcggcatctgcaggatctccagctaggagacgaagaagatgcccagaagagaaatcccaaagcttttgcagttcagtctgctgtgtggatggctcgatcctttcacaggactcaggatttgaagacaaaaaagcatcgtattccagtggttgatcgaactccactagagcccccaccaatagtggtagtggtgacggggcctccaaagttggaaagagcactttgatataatgcctcattcagaacttcattggcagaagttgactgagatcagaggccctgtgatgatcgtgtcaggtcaagggctcagaggtttgcagggccctcctgggaagatggggcccccaggaaacacagggacttctggaattccaggacctaggggccaaaaaggagatcgtggggacaattcagttgctgaggctaagctggccaacttagagagaaagctatagagcctgagatcagaactggaccacacgaagaagcagacaggatctccgtatgttgtccaggctggtctttaactcctgacctcaagtgatcctccccaatcagcctccca

SEQ ID NO: 459989 - DNA, 3431 bp, Homo sapiens
tgtttttcaatcaagctgtcagattttatgcagcccgatattctaaaaaaaaaactcactaattcagtgattaccaatttattggccacagattcccaggaccagaagaaacaaagaaagaaaaacagtggacccaaagatgaaaagaaaaagaagcggcatctgcaggatctccagctaggagacgaagaagatgcccagaagagaaatcccaaagcttttgcagttcagtctgctgtgtggatggctcgatcctttcacaggacattttgtaagcacatgaaaccagggaattgcagaaaggaagaagaaggaaaccatggctcctttggcactttagaaagaaatccgagcaatccaggggccaaagctcacacaggcaatgagttctcttcacctttgtctggaccactgtacccagggctcatggataatcctcaagccctgtgggctgtcaagtaggacgtgcctaactgctaagacttgtgctaacaggagctctgggacctcagggagaatgggctcgcgttcatcttgcacctgcctttgttttagcactgatctaactctcacattttttacccaccagtctccctagtagcctgaaagtcattcagagccaggggttgtgatggtcccctctgtgtccactgtccccagcacagggtccagcacaccacagtgggtagcaaatgctatttaaatgagatgggatgaaattcccttccttcactttcttcacctcaaggtaaggaccatgttcctgtttccatcattccctgtccttctcctgtctgtggtgacagcttcctgctccaaaacaaaagcctgtgcagatacccagaagacctgctccatgattacctgtggcatccccgtcaccaatggcaccccaggcagagatgggcgagatagacccaagggggaaaagggagagccaggtctgggacaggtttctgtggcttcctaaatctccacctccggcaggtgttcaagcaaatctgtgcttgagcctgccacacgagggttaaagcacagacttggggaggctcccctttcatcaggacccatgctacactcagaacaacccctgtaaaatgccattgcctccaaaacaaagctgttcgtggactctctgggatcccatatttccacacaggaactgggggtgtgtggttgtcccttcagaggggtgtcctgcctggttggggagctggccttggtgcaggccctccactaggttgcaggagagtctttcttctttgggtcagatcactggctcattggctgtgccgggggtgaacaggaatggagcattgagcttttggggaaaaaaaaaagagtgacagccactgggtcatcttccctttgtcttgcaacaggtcaagggctcagaggtttgcagggccctcctgggaagatggggcccccaggaaacacagggacttctggaattccaggacctaggggccaaaaaggagatcgtggggacaattcagttgctgaggctaagctggccaacttagagagaaagctatagagcctgagatcagaactggaccacacgaagaagctgtaagccttctccttggggaaaatgtctgggaagaagcttttcgtgaccaatggtgagcggatgcctttctccaaagtgaaggctctgtgtgctgggctccaggccacagtggctgcccccaagaatgccgaggagaataaggccatccaggatgtggccaaagacactgccttcctgggcatcacagatgaggcaactgaaggccagttcatgtacttgacgggcgggaggctgacctacagcaactggaagaaggatgagccaaatgaccacggctcaggggaggactgcgttattctcctgaacaacgggctctggaatggcatctcctgcacctcctccttcattgccatctgtgagtttcctgcctgaagaggcacgttcctcagccccctccttgcctccctgctgaactctctgctgctttggaagagaattcaatgttggttttcttctgccctgtgttgagtccttccttcatgtggatgggaggaaaatgaaggggatatatttgattgtggggtgagaacagaagaagaggctggctgtcaggcacaagggttctggttcagcacatggcaaaggacaccaccatcccactaggagcacagcgctgggtcggagtctaccctggaaagggccacatctgaccctctcatttcatggtgaagacactgaagcccaccagaaggaaccagtggggccacacctgggtcagagtaggctgtagatcccagccactgagagatcttattccttttctccatgagttgccactactgaatgcctaaactccttccatggtgagcccagacctctctaggacacaggtattgtttctagttgttcatgagctgcgccagacaacctctcactacctgactgtaacacttggcaatatcctacgtgggcaacagttgttagtcctaggaatcctctcatcctgcccatgtagctgtggccaccctttagtcactagggtgaccttaaggccaaagaacagcttttcctcctgcatcattttaggatgctgactcgatattgaggtgtgtcagctgcgtgtgaggaggcaaattgtcatgcagagtgtacccttctccgcaggcctcgtgagtctcatgagtctcagccccaacccctactccagtcccccacctggccagcagcccctcctttccctgtaacaccctcttcccattatagttcagtgggcccattatcagtacagacaagcggaaaattaccccaaaggtgagcttcataccctacgggttaaattatgcgggcccagctggccaacaaatgccatccactttcggagcaggcttctgatgccattgggacccacagttctgctcatgaccatggctgtttttcagctatctcagggtgggtggctctgagatgacatagagcctgtgcagcaaactaagggaagggaatggattccagacctgccgtatgccattcacacaatgagatgggaaaatatttcataaaaaggctaagggccactttaactctgtgaaaagctttagttaatcttggttttctattttacttctctttgtatctgaactaccaggaaaatcaccacatggttggtgtcactgacatcttttgaacacaggtgtcatttaaatcattatgtgcaataatatgtcaaatcaactaaatatgcatgatctttggcctatatatttacagcctaaatgtatgggctttagggtcaaaatgaccttgctaatgacccagctgtaacactgacacccccttttgtccctgcacaggttcatccctctctgtgccttggttttcatatttggaaaatgacgaggaggatttaactagatta

SEQ ID NO: 459990 - DNA, 1424 bp, Homo sapiens
agtgggataaggatatgaatagacaattctcaaaagaagatataaaagtggccaacaaacataagaaaaaatgctcaacatcactaattatcagggaaatactccttaaagaactaaaagtagaactaccatttgatctggcaatcccactactgggtataccccagaggaaaaggagtcattatatgaaaaagacacttgcacatgcatgtttagagcaatactatttgcaatttccaaaatatggaaccagcctaaatgcctatcaatcatctttgagtttagcacagccttatccaaaacagggaagcaaacactgcccatcaaaaagacagcagagcaagtacctaaatctcttcaattctgtgaagagtgagagaagtaaagaagtttggaagaagttgattccaactcttatggatgactttgagggattcaagatctcagtggaggaggtaattgtagacatggcagaaatagcaaaggaaccagagtttgaattggagcctaaagatgtgactgaattgctctagtctcatgatcacacttgaaggaatgagaagttgcttcttatggatctgcaaagaaagtgtttcttgggatggaatctactcctgatgaagattctgtgagcattgttgaaatgacaacaaagaatttaggctattacacaagttagttaataaagcagcagcagcatttgagaggattgaccccaattttcaaagaagttctactgtggataaaatgctataaaacagcatcgcatgctacagagaaatctttcatgaaagaaagaatccattgatggcaacaagttcattgttgtctcattctaagaacttgccacaactaccccaaccttcagcaactaccaccctggtcactcagcagccctctatattgaggcgagaccctccaccagcaaaaagaatatgactcgttgaagacacagatgattgttagcaatatttagcagcaaagtattttttatttaagacaggaactagatctagtgaaacaaaaacacttgggggatctctgaataggctcctgaactgtttatacatgcatatcactaaatcccagtcgaagcttagatgtaagaagcagttcattgttgctccctaacctgttccagcactatggggaagtcagaagtccttgttggctaccataagtatcatcaaagaaattcttcaccactgatcacttattatacctgaatgcatgttaagaatagctgagaaacctgtgcttctcaaaaggaggtaggtggaccattttcatcagattcacctgaagggcttattaagaagtacagattcctgtatgccatactactcaatcaggatctctgacgggagccctggcgtctgcatttttaataggctttccaaggatatttatatcttctaatgctt

SEQ ID NO: 459991 - DNA, 1807 bp, Homo sapiens
gcctattcccgcggtttggtccggccattggcgggcggtttgaatgacggaagtgacggcggctcggcgatggctctcccgcaggcgcagaaacggctgctgggcagctgatgggcaggagcttaccaggctggcttgctctgagctgcggttactgtgtccaggccccgggttctcagaactgtcatacataaagtacacagaaatgaagagaaaagtcgtgaatactcacaagctgagattgagtcctaatgaggaagccttcattttgaaggaagattatgaaagaaggcgaaaactaagattgctacaggttcgagaacaagaaagagatatcgccttacagataagagaagacataaaacagaggagaaatcaacaatttacacgtttggcagaggagctaagggcagaatgggaagaatcacaaactcagaaaatacagaacttggaaaaactgtatttggcaagtttaagaagtatgggagagggacatcgacaggccaaagaaaatgaacctgatttggatgctttggcacagcgggcagcagaaaggaaaagaaaagcagatttgaggcataaagaagccttgaaagtacagaaaaatcaaaaagaaatattactgaaacaaaaaacctgcctgtggaatcagactagaggatttcttgagcctatgacttacatatttttaaccctgttgtactataatattatcactgagagattaattgatgacatctcttgtttcttaaggcatataaaagctcgaaaggaagcactgcttgtggaaaaagagagatcagccaaaattacaagtctgccacctcctcctccaactctttttgagaacatcgaagtaaaaagaatttctgcagtcaaaaccaatagttctacctaccatcatcttcacacttttgtgaatagagagacagacacaaaacgggtgattgacttattgtttcttcatgccctcgctttattatttctgtgtgcattgaattgaattatatcttagttatatgtatggtgttcccagatttcaaaatttggacaattgataataataatcaaaaccttttaaatgctttgaattttcatgtcaggcatatgatggtttaatatgaattaaagaaactagttggctatttaaatggttattttaaaatagcagattttaaagctttttttatcataaaatattacatgctatttgtggaaaatttggaactgtacatataagtgtaaactattgggaaaacaccaattctgtcaccaaagtggaatatagttaatgttttaataaattcattataacctttatttaaatataaacatatacacacacttttcaaaacatgatttttagtggccacttaatatttcatggtagcatttatttaaccattattttattttttgcttctttttatgaaagtattcccacaaactaaagctttgtgtactgaatgaagatatgatttctctgaatattttcagaaatgggtttattactgaacacatttttattcgaatattttcttttatttgctgctttactgtatcacttaggaaaagtctgtccttaaactttggatttaaaatgtgatgaccaatgtgcttggctttcaagataaaattacctctgaattttcatctgcactcaacttatatcacatgcacaataattttagcatcttccctggaggagtacgatatgatctttacagcagtagctctcaaactgctaaaattaaagtgtgatgagaatctaaacttattttatttggaggaggtgcttattgaaaat

SEQ ID NO: 459992 - DNA, 1512 bp, Homo sapiens
cggtgttctttctggagccgacagtcctccaggcccaggcccggcctctgcgggaggcgacggcagggtggggtcacccgggatggcgggcaggggtcgaggtgggcgcggcggcttgcgggtgtcggcgccgggcccggcctcagggagcgggaagcggtcgatggacaagtcggtgccgtcggcgaagaccctcggggccggagtctcgcggcgtgggatccggtgctcactgaggacctgcggggcgcgtcggtcacccccacaccccagccccggccgccccaccggggacccgcaccgacctcgcccttggggctcaggagcagcgtcgcgcagccgcggatggagaggaggggaacgggctcccggctcgaggacgcgcgcagcggcttcttggcgctgcgggtcgcctcgccccagacctggaggggcgtggagcggcgggtgaggggcggccgggccgggccgtcggggccgggctcccgggccggggcgcaccgtgacgtggtgccgcggggccagcagcgtgcccggcgggaagcggtacaggcgctccgggaagccgcgcaccagctgcttcagcaccatgccgctcaggtcggccgtgctctcctgcgacgggttgaagatgcggacgaacttctcccggcagctcacagccacgatcttcaggcctgtcgggctgggaagagaggagacgctgtgaggagatgcggccggtccacccgcacagctgcgcgccccgcccggaaaccagctccagtccggcgccggaggcttgggtcactcgccccttacctctgcaggagttccgggctccagtggtccgggtctgtgcagggctggggcgacaggaccggctcgccgtgcctggcatgcggcccacccacgaggagcgggccagctgcaggaggcaggacttctgcaagttctgcagctcggcctccatctcctggagcgtgcgggtggtctgcagcagccgctcctccaggtgctccttctcctgctccgagagggcctgtgggccctacccccagcactcacctgaggcccgacctccaagcaggcctgggagggaagggctgtataccgttgccatggataccagcacccagaaggggtggggctgtttgttaccaggagcctccagggagaccccagaccaggcccctagagacagggtcttgctccgctgtccaggctggaatgcttcggtgtgatgacagcgcacgttaacctcgaattcctgggctcaggtgatcctcccacttccgcctcctgacttgctgaaactacaggcacccgcctccaccgccaggcccagcccacagctcctttgacctcagtgacaggcactcacctacctgacccccaaactgaagcctcacttttcccagccgtgtccacaccctctgggctaccccattaccatgacaagtattccctctgctccaggagaaaagccaggtcccagacctgacccattaaaacccaatcattccagctttc

SEQ ID NO: 459993 - DNA, 1719 bp, Homo sapiens
cggtgttctttctggagccgacagtcctccaggcccaggcccggcctctgcgggaggcgacggcagggtggggtcacccgggatggcgggcaggggtcgaggtgggcgcggcggcttgcgggtgtcggcgccgggcccggcctcagggagcgggaagcggtcgatggacaagtcggtgccgtcggcgaagaccctcggggccggagtctcgcggcgtgggatccggtgctcactgaggacctgcggggcgcgtcggtcacccccacaccccagccccggccgccccaccggggacccgcaccgacctcgcccttggggctcaggagcagcgtcgcgcagccgcggatggagaggaggggaacgggctcccggctcgaggacgcgcgcagcggcttcttggcgctgcgggtcgcctcgccccagacctggaggggcgtggagcggcgggtgaggggcggccgggccgggccgtcggggccgggctcccgggccggggcgcaccgtgacgtggtgccgcggggccagcagcgtgcccggcgggaagcggtacaggcgctccgggaagccgcgcaccagctgcttcagcaccatgccgctcaggtcggccgtgctctcctgcgacgggttgaagatgcggacgaacttctcccggcagctcacagccacgatcttcaggcctgtcgggctgggaagagaggagacgctgtgaggagatgcggccggtccacccgcacagctgcgcgccccgcccggaaaccagctccagtccggcgccggaggcttgggtcactcgccccttacctctgcaggagttccgggctccagtggtccgggtctgtgcagggctggggcgacaggaccggctcgccgtgcctggcatgcggcccacccacgaggagcgggccagctgcaggaggcaggacttctgcaagttctgcagctcggcctccatctcctggagcgtgcgggtggtctgcagcagccgctcctccaggtgctccttctcctgctccgagagggcctgtgggccctacccccagcactcacctgaggcccgacctccaagcaggcctgggagggaagggctgtataccgttgccatggataccagcacccagaaggggtggggctgtttgttaccaggagcctccagggagaccccagaccaggcccctaggtgagttctgggccagcccagcctggaggaggtgtgagaggctgagccactgctcagcttagcggggggaccacttagtgaccaacaccctgagggaggccccagcatcccctacctagcctggcagcagcagcgggataaataggggggcactgctgcctgtgagccagcccagcatagccatgggtgtgtgggggaagcagacagagacagggtcttgctccgctgtccaggctggaatgcttcggtgtgatgacagcgcacgttaacctcgaattcctgggctcaggtgatcctcccacttccgcctcctgacttgctgaaactacaggcacccgcctccaccgccaggcccagcccacagctcctttgacctcagtgacaggcactcacctacctgacccccaaactgaagcctcacttttcccagccgtgtccacaccctctgggctaccccattaccatgacaagtattccctctgctccaggagaaaagccaggtcccagacctgacccattaaaacccaatcattccagctttc

SEQ ID NO: 459994 - DNA, 2941 bp, Homo sapiens
ggaagaactcacaccatggtggttgagggccagatgtcagaggccatggaccagccagctgggggtcctggaaacccaaggccaggagagggtgatgatggcagcatggagccaggcacctgccaggagcttctgcaccgactgcgggagctggaggcagagaactcggcacttgcccaggccaacgaaaaccagcgggagacttatgagcgctgtctggacgaggttgccaaccatgtggtacaggcgttgctgaaccagaaggacctgcgagaggagtgcatcaagctgaagaagagagtgtttgacctggaacggcagaaccagatgctgagtgccctgtttcagcagaaactccagctcacgacaggctcgctccctcagcgctggatgccctatccccgttcttcggaagaaggcccagattctggagagcccatcaacggcgagctgtgtggcccgcctcagcctgaaccctcaccctgggcgccctgcctgctgctaggccctggcaacctgggaggcctgctgcactgggagcgcctcttggggggtctgggaggggaagaggacactgggcggccctggggtcctagcaggggacctcctcaggcccagggcaccagctctggcccaaactgtgccccaggcagcagctcctcctcctcttctgatgaggcagaatcgtacccctatgggagcccccaagagaagagtttggacaaggcaggctcggagtctccccatcccggccgcaggaccccaggcaactcatccaagaagcccagccaggggtcaggacggcgacctggggatcctggcagcacacctctgcgggacagactggcggccctggggaagctgaagacacgcgagggggccctgggctcagagaagaatggggtgccagccaggcctggcaccgaaaagacccggggacctgggaagtcaggggagagtgctggagacatggtgccctccatccacaggccactggagcagctagaagccaagggggggatacggggggcagtggccttgggcacaaacagcctgaagcagcaggaacctggacttatgggggatcccggggcccgagtctactcctctcactccatgggggcccgggtggacctggagcctgtctcaccaaggagctgcctcaccaaagtggagctggccaagagccggctggcaggggccctgtgcccccaggtaccccgtacccctgccaaagtgccaacctcagccccaagcctgggcaagcccaataagagccctcacagcagccccaccaagctcccttccaagtcaccaaccaaggtggtgcctcgacctggggctccgctagtcaccaaggagtcccccaagcctgacaaagggaagggccctccctgggcagactgtggtagtaccacggcccagtccacacccctagtacctggccccactgacccaagtcagggccctgagggtggctcacactcagccatcgaggagaaggtgatgaagggcattgaggagaacgtgctgcggctccagggccaggagcgagcccctggcgccgaggtcaagcaccgcaacaccagcagcatcgccagctggttcggccttaagaagagcaagctgccagcgctgaaccgccgcacagaggccaccaagaacaaggagggggctggcgggggctccccgctccggagggaagtcaagatggaagcccggaagctggaggccgagagcctcaacatctccaagctgatggccaaggcggaagacctgcgtcgggcactggaagaggagaaggcctacctaagcagccgggcccgccaacgcctggtggcccagccccagggcccaacacggggctggggcagggtggatggcaaggagctgccatccaagagctggcgggagcccaagcctgagtacggggatttccagccggtgtcttctgaccccaagagcccctggccagcctgtggccccggaatggcctggtggccctcttcagggctgcggaaaacctcctggaaaggtgggcactggagctacacaggaacaaatccttccctgccctcagggtactcgccccacctacaccccttccccaagcccagggcagaccaagccaccgcggctggatcccccacctgggtacccccagctcggcccccaccccttaccaaagtcccccgccgcgcccacacactggagcgggaggtgccaggcatagaggagctgctggtgagtgggcggcaccccagcatgccagccttccctgcactgctacccgctgctccgggccaccggggccatgagacctgtcctgatgatccctgtgaagacccaggccccacccctcctgtccagctggccaagaactggaccttccccaatactagggcagccggcagctcctcggaccctctcatgtgcccaccccgacaactggaggggctgcccaggacccccatggtgagaattgcagcagaggaaagggaaaggactcgggagcaggagggagtgatgtggggagaccagtttctccagtaaggtacggcctgtgtgtcgcacagtctcagtgctgcaccctctgggaggaggacccctgggatgccctgtgagcggccctccccactgccctccttgcacttctctcgtggggaaaggtttctgtccctccccagaaccttgtaggactgttctcagttgtacctccagcctgtttcctctgaagtataccccaccttgggccccctctggagcagccccccatcaggtgcacagacgcccctcagagctcagtgcctctgaggctgggccgaaaggtggagaggagcttcctcccgagctgcccctcctttcccaggccctgcccgtggaccggaagcgaacgcaggagcccagccgcccgtcccctacgccccagggcccacctttc

SEQ ID NO: 459995 - DNA, 776 bp, Homo sapiens
cggagcagcctagagcagcatctttggcctctaagggggtgggtccttggtgaggccctaccttcaggccaggatgggtgtgaaggctggggtctgggctgccagtcccgtgaaccagagtgctcagccagaactgagcagacattgggacgaccagctgcagagaggagctaccaactccagggcctcatctcttctgagagatgcagatgttgggatgcccagctgcagaatggaggtgcccactccaggacatcctctgagttgttctgtcactcaatatagcttctctttgctcaccctcaacttgtctgtatacctcattattcctggagaagagagaagaaaaaaagagctgtggctctatgggaacccagacctgggagctcccgaggccagagctgtgactcccgctattggaccctatggttcctggagtctgcaagcttccaggcatgagccaccacacccggcgactcattcttatacaactacctttgtcagcattcttgccattggactgtctagcccttgatgctgttatatcatggcttgttgatacagaagatgctacatgaactcaagtggaactctgactgccttgagagcaacccaccatccattgctgctgcatcaaggtattaaaaagagagacagaaggaagaggtgagagaagcacaagtttaacagtgtgagggcattttgcttattaataagacatttcattaaaatattagctacttttgttagctagcaactcttaattttgcctaaag

SEQ ID NO: 459996 - DNA, 1075 bp, Homo sapiens
ctcctcaggtgcttctcatctgtagacctggttgaggaccctgctctgtgaatgcttctcggatgctcaccttcatccccatggtgacaacggctgaaataggcacaggcaaagattttatgatgaagatgccaaaatcaattgcaacaaaagcaaaaattgacaaatgggatctaattaaactaaagagcttctgcacagcaaaagaaactatcatcagagtaaacagacaacctatagaaagggagaaaatttttgcaatctatccttctgacaaagaatatgggcaaaagaaacagagattttaccaaagagatgtacaaaaggcaaataaaaacattaaaagacagtcaacattattacccatttgggaaatggaaattaaaactccaatgagatatcaatgcatatctatcagaataactaaaacggtaacaccaaatgttgggcaactgaagaaactacaggccttggcctcttggctggctctccaaagctgtatagctcagaatatgtttggtctagactgtggatttaaaaaaaatccacaacacattctaaagaagtactagaaatagcagtgcctcaaagtgagggcttctagaatttctgatatatattccttggaatagacttcttattttgagggtcataaagaattgagagactagccatggttgcacacactccacattaggtctgagctcatcagtcttgatggttctctctcctgaactctcgtgaaggcaatatctacttgtagttgatggagtatcaggcaaaacaaagtgctgtcttagatttatgaactcctttatcactcaagggaactggaaaaatagactttgatgcagtcctgcaccagaataaatggcaccacgaaagaatgagaagccaccttatgattggatatgaaattatctctaagatatatgattcaggaaaagcagaaggtacagaacgacagtatggaagatactatttgtgtaaataaagtgaacaaaatagaacaaacataaatattttgtaactgtgatggttaattttagatgtcaacttgtctgggttaaggggt

SEQ ID NO: 459997 - DNA, 1145 bp, Homo sapiens
ttgtgcttcaatagatgtacaactaataatggatggagaagtaaatgaagcacaggaaggacaggatgcaaaacctcaagctcgagcaaggaatattctggagctgagctccctgcataaggctaggacccctgaaagacagatgcacctattcatgaaaatgggaacaaaggccctcaacagattgaatgatgcccacctgccctggggagggccatctgctttacttggtccaccagttcaaatgctaatctcttctggaaacatcctcacagacacacccagaaataatgtttcctcagatatctgggcatcctgttgcctagtcaagttgatacataaaattaatcatcacagcaagattgtagacataagttcaaataccgtaagcccttggtttactcatctggaaaaggggaataataatacagggctgttagagtttatgtcatcccaggcaaaagcagttattaaaactactgatgattatttgcagtctcagtttggccccaacagactcgtgcattcagcagcagtatcagaagggtcaggacttcaagattgctccacacatcaaacagcatcagatcacagccatgatgaaatatcagacctagatagctacaaatcaaacagtaaaaacaattcttgttctatatcagcatccaagagaaacagacctgtcagtgctccagtgggtcaactgagggttgcagagttctcttctttaaaatttcagtcagcccggaattggcagaaattgtctcaaagacacaaacttcaaccaagagtgattaaagtaacagcttacaaaaatggatctagaacagtctttgccagagttactgtaccaaccatcaccttgctgctggaggagtgcacagaaaagctgaatctgaacatggccgcaagacgagtgttcttggcagacggcaaggaagccctcgaacctgaagatataccccatgaagccgatgtttatgtttcaacgggagagccctttttaaatccattcaaaaaaattaaaggtaaaaaagatctaaaaaataccctacccccacacatactgaattgcttaaggggtgcaattaaaaaatgattttcatcctgtcttttttgcatggtttaacaaaactaatgtttac

SEQ ID NO: 459998 - DNA, 1394 bp, Homo sapiens
gagtcacgagagaattttgaagatatgttattattagacttctgttttaacagcattttgaggcaggagtacacatttaggaaaggtctcagtggcagccccttgcctcacattcagagttttttatttaatctatgtacggtcagcactgctagtaaagcagccaccccagttgtgcctggcccacagttgccagaggatctgatgcttgtgtctggggccatgtgggtggatgttaaacagcccatatggtatgatgttcatttcctgtattccaagcaaacagcaggtggactgccttcctactgccttttaacaggcaaatcagctagaaaatctagaatgtggtgggcaatgcaagatcacaggaaaacagctgatgtcatagaagtagagaatagaacagtgattaccaaagactggggagaggaaggcagatgggagaatggagaaagattggtcaacagacgctgactgtgatttttctcactaatgacaaaaggaataacctctagtgagaatgaaatgatgaagggtctttgaaattctctactctctgaacacagtgaatgtgaatgaaagatctcaggaagagttttcaaaaagcttattgctcaatcaccagcctttgcgaggagttgtggattgactgctgtctgcaataaagtcaccagaaactgccatagctctcaaggcaagcacatgctgataatgacaagctgctgagactcaaagctatgttttagccccaaccccagcacagactcaccacgaagctctttgatttccagacggaactttcatgaggacacaccacacttaactaaacccttgacctaacagacctatagtgaagatgaaaccccaaaggtagccaagggatttggtattttagtcatgttctttcatgccttagtacctttaaggtaagctcacacagaggtggccatgaaatggttaaatagcaaaatccctgacttctgtagtcagtgagaaacatccgagagtgtgtcatatggtcaaaagcctctttgcgaaaaggaaaacatttcaagtcatagattcattcttttatttctactcattcattcattttcttcaataaacatttaggaagctcctactgtttgccaataactcaacagagctctggagaaacagatgaattcaatgtggccttttgactagggacgatcgcccaccacacttctgataacagacaagcccttcttcagcactacagggttagccaaccacagtattccatccccctggcctcagtcagaacctttgctccagaaattttcctctggaactatcaggaaggacttccagttacccctggggacgccattttggaaacctagtactgtcatggccaaattatctatctc

SEQ ID NO: 459999 - DNA, 2828 bp, Homo sapiens
tccgggcacctgggccgtcgagctgaggcgcgccttccgagcctgctttttagggcggatggcagccatgctgaagtgcgtgatgagcggcagtcagtatttgggaaagcagttcaagctctatcacgaattagtgacgagttctggctagacccatctaaaaaaggtcttgctctaagatgtgtgaattcttctcggtcagcatatggatgtgtcctgttctctcctgtgttttttcagcattatcaatggtcagctttagtgaaaatgagtgaaaatgaacttgacacaacactgcatttaaaatgcaaattgggaatgaagtcaattttgcccatctttagatgtctgaattcccttgaaagaaatatagagaagtgcagaatattcaccagatctgataaatgcaaagtagttattcaattcttctacagacatgcaacgtggatggaactagaggtcactatgttaagtgaaataagccaggcatggaaagtcaagtattgcatgttctcacaatgtggacgctaaaaagttgatctcatggaggtagagagtagaatggtagataccagaggctggtaatggtgtgtgggtattaaaagaactcataatatatgttttcaagaaagtcagcctttgcaagttatttttgacaagaatgtttgtactaatacgctaatgattcaaccaagattgcttgctgatgccattgttctttttacatcaagtcaagaggaagttactcttgctgttactccactgaatttttgcctcaagagttctaatgaggaatcaatggatttgagcaatgctgtacacagtgagatgtttgttggctcagatgagtttgacttctttcaaattggaatggacactgagataacattttgtttcaaagaattgaagggaatactgacattttcagaagctacacatgctcctatatccatttattttgatttccctgggaagtcagatctgattgaaaaaaaggctggcaaaaatgtaactggccaggccctggaatgtatttcaaaaaaagcagcaccaagaaggctttatcctaaggagactctcacaaacatatctgcattggaaaactgtggcagccctgcaatgaaaagagtggatggagatgtcagtgaagtatcagaaagcagtgtcagcaacacagaggaagtgccagggtctctgtgtctcagaaagttttcttgcatgttctttggagcagtttcttctgaccagcaagaacacttcaaccaccctttcgacagtctggcaagagcaagtgacagtgaagaggacatgaataatggcagtttctctatattctaatgcttaatgatggctgagctgggccccagcccagtgactggctcatttgcccctcaagcacgagtttgcatgtttagtgtctaaaagaggttgtccaggacttccttttaatggaggatgggcttttaaaccacatcatcttgtacaacaaccatatctagaaatagctgtttgtcaagtgtatgtaacttgctttaaatccattatgctacttgtgaggcagaagagttttctgtgaaggaaaaaagcccattagagttcttcaattcaatgcacgttcaccctagagcttttaacatctttgctagttttataaaggtatttaaactttattcaacagccatttagagtgccatcaagatggcttgaaatggaattttgtgatttgtagtcaggtatcttttgtatttgattgcaaacatttggattttagttttctcatgtaataccatggccttttttgtgcattgttttttatattttaagactttaagtagaataaaccctggaaaaaagatcaagagtaaaaatatatagtcactttcacttggcttttttagacggagtctcactttgtcactcaggctcaagtgcagtggtgcaatctctgctcactgcaacatctgcctcccaggtccaagcgattctcctgcctcagcctcccgtgcagctgggattgcaggtgcgtgccaccatgcctggctaatttctggtattttgtagagacagggtttcgccatgttggccagggtggtcttgaactcctggcctcaagtgatctgcccacctcggcctcccaaagtgctgggattacagacttgagccactgcgcccaacctggagtgtttttacatattgtaaaattttatttcctaacctcaaattgttctgattttcagatgtgattttttattttgcagtgtgctgcaggaaagaatttaatggaagtgatgccaaatatttctgtattatctgacatagaacagtatcctccactgccaagacagcctgagtttggagtggaataaggtggaagacaaatgtctctgttctttggccctttaagagttagctttttacctgcacaaatggactaaaaaatctggcacaaaacattgttatgtaatgtcttatgatgtgtgcctctccctcccccaaacctgtttacagtcaattataacctgacaaacgagacttttgtaacatattattgttacatctttctgaaaccttcaaaccgtaaggaagtgttaactggcaagcagttgtactttagactttgtgagaaattcataaaggtggctgagtggatttgcatgctttagaactgtgaatagagttctaactgaaaccagaattaatttggctcttgtagcttagtaatgagtcatagctacccacaataacctaataaaaactcaagttcatcccaagatgttccttagtgaatgaaaatgggccttaaccaagctttttgtggtaactggcaa

SEQ ID NO: 460000 - DNA, 2672 bp, Homo sapiens
tccgggcacctgggccgtcgagctgaggcgcgccttccgagcctgctttttagggcggatggcagccatgctgaagtgcgtgatgagcggcagtcagtatttgggaaagcagttcaagctctatcacgaattagtgacgagttctggctagacccatctaaaaaaggtcttgctctaagatgtgtgaattcttctcggtcagcatatggatgtgtcctgttctctcctgtgttttttcagcattatcaatggtcagctttagtgaaaatgagtgaaaatgaacttgacacaacactgcatttaaaatgcaaattgggaatgaagtcaattttgcccatctttagatgtctgaattcccttgaaagaaatatagagaagtgcagaatattcaccagatctgataaatgcaaagtagttattcaattcttctacagacatggtattaaaagaactcataatatatgttttcaagaaagtcagcctttgcaagttatttttgacaagaatgtttgtactaatacgctaatgattcaaccaagattgcttgctgatgccattgttctttttacatcaagtcaagaggaagttactcttgctgttactccactgaatttttgcctcaagagttctaatgaggaatcaatggatttgagcaatgctgtacacagtgagatgtttgttggctcagatgagtttgacttctttcaaattggaatggacactgagataacattttgtttcaaagaattgaagggaatactgacattttcagaagctacacatgctcctatatccatttattttgatttccctgggaagtcagatctgattgaaaaaaaggctggcaaaaatgtaactggccaggccctggaatgtatttcaaaaaaagcagcaccaagaaggctttatcctaaggagactctcacaaacatatctgcattggaaaactgtggcagccctgcaatgaaaagagtggatggagatgtcagtgaagtatcagaaagcagtgtcagcaacacagaggaagtgccagggtctctgtgtctcagaaagttttcttgcatgttctttggagcagtttcttctgaccagcaagaacacttcaaccaccctttcgacagtctggcaagagcaagtgacagtgaagaggacatgaataatggcagtttctctatattctaatgcttaatgatggctgagctgggccccagcccagtgactggctcatttgcccctcaagcacgagtttgcatgtttagtgtctaaaagaggttgtccaggacttccttttaatggaggatgggcttttaaaccacatcatcttgtacaacaaccatatctagaaatagctgtttgtcaagtgtatgtaacttgctttaaatccattatgctacttgtgaggcagaagagttttctgtgaaggaaaaaagcccattagagttcttcaattcaatgcacgttcaccctagagcttttaacatctttgctagttttataaaggtatttaaactttattcaacagccatttagagtgccatcaagatggcttgaaatggaattttgtgatttgtagtcaggtatcttttgtatttgattgcaaacatttggattttagttttctcatgtaataccatggccttttttgtgcattgttttttatattttaagactttaagtagaataaaccctggaaaaaagatcaagagtaaaaatatatagtcactttcacttggcttttttagacggagtctcactttgtcactcaggctcaagtgcagtggtgcaatctctgctcactgcaacatctgcctcccaggtccaagcgattctcctgcctcagcctcccgtgcagctgggattgcaggtgcgtgccaccatgcctggctaatttctggtattttgtagagacagggtttcgccatgttggccagggtggtcttgaactcctggcctcaagtgatctgcccacctcggcctcccaaagtgctgggattacagacttgagccactgcgcccaacctggagtgtttttacatattgtaaaattttatttcctaacctcaaattgttctgattttcagatgtgattttttattttgcagtgtgctgcaggaaagaatttaatggaagtgatgccaaatatttctgtattatctgacatagaacagtatcctccactgccaagacagcctgagtttggagtggaataaggtggaagacaaatgtctctgttctttggccctttaagagttagctttttacctgcacaaatggactaaaaaatctggcacaaaacattgttatgtaatgtcttatgatgtgtgcctctccctcccccaaacctgtttacagtcaattataacctgacaaacgagacttttgtaacatattattgttacatctttctgaaaccttcaaaccgtaaggaagtgttaactggcaagcagttgtactttagactttgtgagaaattcataaaggtggctgagtggatttgcatgctttagaactgtgaatagagttctaactgaaaccagaattaatttggctcttgtagcttagtaatgagtcatagctacccacaataacctaataaaaactcaagttcatcccaagatgttccttagtgaatgaaaatgggccttaaccaagctttttgtggtaactggcaa

SEQ ID NO: 460001 - DNA, 771 bp, Homo sapiens
ttccccagctttacaatgggattcggaacctcccaaagtcagtccgatgccccctcccgcaacccggtgtgtttgtgtatccccgcggtgcaggccgactgcgcggtgctcttcgtggcaggcggctgggcggaggccggcatcttcaagaacccgcagacccacgagctcgcgctgctggccaactggcgggacgtcacgcagctcatcgtgatcttcaacgaaattgactccaccgagcccgcctacagcggctcgcgcctccaggtgatcaccaaggaagtaagcgcctgcatcaagaagatcggctacaactggctgcctggccttcagtccatctcgagctggcacggcgacagcatgctggagcccagcactgacgcgagtgtggcgcgggtcggcagggacagccggggtggaggcgagcggaccacaccccggactcacctcccctcgacatcccgaagatgccctggttcaagtgctggaaggagaactgatgccaaagcctgcattttgttaccttctttggaatcattgggaatatcccaagtttgaagtctgatttgtttctattgctctggtttgggacacatccatggaagcctagaagaggagaggattatccttttaaatttagccattttccaaccttttttttaaatttgctttgttttgttttctttcagcaaatgtgttaaatgcctaccatgtgttaggaatttttacattatgtcatttcaataaattatggttactagtaaatggcaa

SEQ ID NO: 460002 - DNA, 1802 bp, Homo sapiens
gctagagcatggatcctactgtttgaaccaatgaggataagatgagaaaatccttcaatcagcagttagctgatgccatagctgttatcaaaggaatgtaccaggcccacctatggctgcccattgaccaatcagcatgagcttcctcccctctgaagcccataaaaaccctagactcagccagactctggcagaagtggggatgacctgcctgcagagaggagttattcgctgtggggtcttctctcagctaagagctgaacagatatcaggatgacctgcctgcagaaaggagctacccactgtgggtcttctcttagctgggagctgagcagatgctgggatgacctgcttgcagaaaggagctacccacttcagatctcctgcaagctgtactgttgctcaataaagcacctctttgccttactcaccctccagttgtctgcatatctcattcttcctgcgtgtgggacgagaacttgggacccaccaaatggtgggactaaaaaagctgacttggtggagcagcttaattggccagtactagcccatcatccatctccaggaaatataagagagatcttgaatttggaaatggacaaagctggtcaagaggaccattttggggaaagcaggcaacatggagtgctgacctgtaaatgggagagagaaagagagtatttctcctttgagccaagcaagagtggagttttagacctcttggagagcttgacaagcattcctgggtctgaggaatgtgaggactggtatgggacttgccagaaaaatttcacagaagagcaggaggggtgatggggcagaagcctgctgacaaggaccatctggagaggtgacaggatgccagcagaagggcaggtcctaggacagaagccagttaaagttgttactaagttaaaaaaataaagccatggtgtcttcctgaaagtcctaaaaggtgagaactatgagactagaaactagatttgcaggggcagtgtgggaaaatcacactgctttctgctatctcccacagagtccagctcattccataaacactagtgaaacatcagaaacattccaggagatgaagaaaaatgaattcattgtatttggaccttacaaccattttttgaaaagccaaaggttcatccatcttgtcccaaatagcaagatatccttctttttatggctgaaaaatattctattgtattaatatatacattgtacatactaccattgtaaatattccattgtgtgtgtgtgtatgtgagagagagagtgtgtgtgtgtgtgtgtgcgcgtatgtaacgttttcttcattcatctgttgatggatatttaggttgtttctatatcttggctattgtgaataatgctgtaatgaacataggaatgcaaatatctttaagatcatgattttatttcctttgaatatatacccagaagtaggatagctggatcatatggcagttctagttttaattttctgaagaacctccatactattttccataatggctgtaccactttacattcccatcaacagtgcacaagggttgccttttctccataccgttgccaatacttgttatctcttatctttttgaaaatactcattctaatagctcattcttatcataatgaggtaatatctcattgtagttttgatttgcatcttcctgatgattggcgatgtttcatgtaactgttggccatttgtatatcatctttggaaaaatgtttatttaggccttggcccattttttaatcttttctttttaaaaaaattttacagaaggatg

SEQ ID NO: 460003 - DNA, 1813 bp, Homo sapiens
gcatgacaggatcctagaaattgaaaagcattatcaacagaatgaggataagatgagaaaatccttcaatcagcagttagctgatgccatagctgttatcaaaggaatgtaccaggcccacctatggctgcccattgaccaatcagcatgagcttcctcccctctgaagcccataaaaaccctagactcagccagactctggcagaagtggggatgacctgcctgcagagaggagttattcgctgtggggtcttctctcagctaagagctgaacagatatcaggatgacctgcctgcagaaaggagctacccactgtgggtcttctcttagctgggagctgagcagatgctgggatgacctgcttgcagaaaggagctacccacttcagatctcctgcaagctgtactgttgctcaataaagcacctctttgccttactcaccctccagttgtctgcatatctcattcttcctgcgtgtgggacgagaacttgggacccaccaaatggtgggactaaaaaagctgacttggtggagcagcttaattggccagtactagcccatcatccatctccaggaaatataagagagatcttgaatttggaaatggacaaagctggtcaagaggaccattttggggaaagcaggcaacatggagtgctgacctgtaaatgggagagagaaagagagtatttctcctttgagccaagcaagagtggagttttagacctcttggagagcttgacaagcattcctgggtctgaggaatgtgaggactggtatgggacttgccagaaaaatttcacagaagagcaggaggggtgatggggcagaagcctgctgacaaggaccatctggagaggtgacaggatgccagcagaagggcaggtcctaggacagaagccagttaaagttgttactaagttaaaaaaataaagccatggtgtcttcctgaaagtcctaaaaggtgagaactatgagactagaaactagatttgcaggggcagtgtgggaaaatcacactgctttctgctatctcccacagagtccagctcattccataaacactagtgaaacatcagaaacattccaggagatgaagaaaaatgaattcattgtatttggaccttacaaccattttttgaaaagccaaaggttcatccatcttgtcccaaatagcaagatatccttctttttatggctgaaaaatattctattgtattaatatatacattgtacatactaccattgtaaatattccattgtgtgtgtgtgtatgtgagagagagagtgtgtgtgtgtgtgtgtgcgcgtatgtaacgttttcttcattcatctgttgatggatatttaggttgtttctatatcttggctattgtgaataatgctgtaatgaacataggaatgcaaatatctttaagatcatgattttatttcctttgaatatatacccagaagtaggatagctggatcatatggcagttctagttttaattttctgaagaacctccatactattttccataatggctgtaccactttacattcccatcaacagtgcacaagggttgccttttctccataccgttgccaatacttgttatctcttatctttttgaaaatactcattctaatagctcattcttatcataatgaggtaatatctcattgtagttttgatttgcatcttcctgatgattggcgatgtttcatgtaactgttggccatttgtatatcatctttggaaaaatgtttatttaggccttggcccattttttaatcttttctttttaaaaaaattttacagaaggatg

SEQ ID NO: 460004 - DNA, 5684 bp, Homo sapiens
cttcttcttaaacaattattttttaaactttaattttgaaataattatagattcacaggatgttgcaaaaataatatggtgtatgtttcatgtggagaactctggatcaatcctgacctgtccattgctcagcaaaagaaacaaatattcctgaggaacctagaatcagacattgccaaaattcaaatcttctgcagcacacataaaatagaagaagtccaaagtgacattgtatctggaagcaagcttgctgtgcataaacctgtagcaatttttggagaagagaagcaagttacagaaccggaagaaaagcaaatgcaagaagatcctctaacaacggaaaatgcttccagtgaaattcttacggtcagctctgctagcacaggaattgtccctgaagattttggtaatttaataatgcttgtagttacatcaaattatgacaagcaccttggtgatcagtctgtcccagagaactttatttacagctgttcaccaaagcatagtaaattgcacaagcattgtcatcagcagttcgaatacagagatgggcagattataagccatgctgctcctcagctagtcttgggggttcaaggtcccaatctccgatcaggcatggaggtggttttggtggagaagaaatctgatggtagtcatcagcgctggatacaccaggaagacagcaggacctttcaccttgtgagtaaccctgaccttgtgctggcagtgtctatgaccaagactagaaatgaagtttgtggctatccagttattgttcagaaatataagccgtacaacaatggagctgccaatcaaaagtggcattacatgaaaaatataaaagcacttgtggcctttcatagcactgccttggataaggaaattacatcagcaaattatgctggtgtctgtacatcatctgtgattaaagaagaaaacattgatcaaccaggatactgttatctctcacctgatggaaagagaaaaactatgctctgcttggcttgtggacaatccatgagaacagagaaaggactgaaacaattgcttccaggggttccattcctctgtatttcaggcaccaagactcagaagcccttcttacaagggcccttcaaggtcatcagtgtggctgaggttgatttgtcgtgtgacaaggctgaaaaaactctaagttactaccaagcacgtctattgtctttacggatgaagacctgcacgcaagctgcatctcacagtggcatggcagccacacaccagaaggcagtgaaaataattgcatacaaaaatggggatgggtatcgtaatgggaagttaattgtggctggaacattccccatgcttcttacagaatgcacggaacaacttgggcttgccagagcagcctccaaagtatataccaaagatggaaccccaatctttaccttgcgtgatttggttttatgggctctagatgaatcctttctccagagagactctgagaaacaaaagcaagatgcagctcctgttggaaaagaacagataattgttgaaagtatggaagaaaatccaagaatgaaagtgaaaaacagattatttgcaaaatctgtgacatccgatagtttggatggtatagacaagtctttgcttaccctcatcctcagaaatcctattgccatctgggtgtcttgtggtgaaccatttctacctccaaatgctttgcagaaagcagaaaaattagagaaacagaactggctaaaaaaggacagaattttggctgatctagataccatgagacacaaaatgagacagttaaaagggcggcgagtagcggcatgtcagccagccaccatggttcctaccaagagccctgtgcagcccgtggtggttgaaggaggctggaccgaacagactcaacaggaaattaaactcatggaacttataagacatacagaggcacacctttctgaaatccaagaaatggaatccaaaataaattttccaattgcaaccaaacgtatagcagtcaagccgagcaacctgtataagcagcccaacacaaaacgagtgtggatttatctaaatggaggcagacctgaagatggcacttatgcctggggcaaaactatttcagaggtcagcttactttatctgaagacatggatctttatttggagcaggaaagttttcttctattttttgataactgcttaaggttaatgtattctagattcctctccagtaacaccaataatgtataggtttaatatctgatgtcttgacattataaatgtttgacttttctctctcatacactttgtctcttttcctttttctgtatcctgtgagatcttctccacctagtctgccctaataatgatttgaatttctgtaatattgagtcttttttctttcttaccttctctcctcttgtcattcagctctctcttcatcctcacttgaaaccctatttcttctctcactagcagctatacaactttggttattatatttaacctctttgttctccatttttctcatcaacaaaaggtggatactaattatttccacagaacaaaattagattgttcttgagaacttttagaaaaatacccagtccctagaaatgtgtcaatatgttttaatcagtattactgttatcagcagcctcagcatctctcctgtatctgagcaatactcctttcctttaagctgtggttgtctcgtttctgtgtgtatctgtgagtatatttacacacagaagtcatattttttgaatttaggggtaacacaacacagatacttttgaaaatgtactcctgctgtaaatctttttcaaaatcttcaccttgagtacaatgtaccctttttttatgttgtagaatattttcattagctttacattgttgctattgttgatttttctatttatatttccttgtacaaggagagatcttttgataacagacagaataggttagttctctttggtgaccctagacatctacttgggagctgtcagaatcctccctcaatggtaggttgaaggattggtttgtatgcagagtatttaatcaaattgcttctgactggatggtatttggcaggagtagggctgcatttaaccaacatggcacatgtatacatatgtaacaaacctgcacattgtgcacatgtaccctagaacttaaagtatgataaaaaaatatataaaaatagataacattaaaaaaagactactctcctgttggtcctctctgactatcctattctatagaggggaatatatttttggataatttgaattattattaaattcaatccactcatcccttactcaaaatactgggtgaaaagctgcgctttttgaactgcatcgccccatcactcttcttgtcttggctcatattcctgatgcatttgccagatgcaaggtgtcatcacatgcccagccctgacccctgccattctgccttgttgtgagttgtagcatctaaacagatctataaacagaagtattgatggtgatttggagggctgatgtggacttggcacctgcattttgggggaacaggcttttggccctctaataggtgaaagccatacaggcagctgctgcaagactgctcctctcgtctcaaaatgacccacccagctagagcactgtacacccccagtggagagccaattcagtcctgggacgacatagagcgagatatggtcatctgtgtgtctatgggacatggtttcaaaaccccaaaagagttaaaacaactgatggagatcagagcaaattatgccagaatccgaaggcagcagggccctcaagccacagacattgtggtgtcaccatccacgaagctgctgtctctggcacatctccacaattaactcctatcagaaccatcggattttctgctgtatttttctggaaagaaaactttctttacccacttataaacagaagactgtgacaagaaggccaattatttccatcgctgaagactctaaatttggcaaatcttctaaataacaatcctgcatagtttattaaaaaaaattagtcgtaaaatttatccttcaaaaatctgcattttaaataaaccctgacagtgatttctcaagactgtaaagatattagtctgagaatgcaactctaacagactgctctgggcatcttttctctttgccttggccaggcctctcagaattgagtgagcgtgtgactccatttgcacagtgggacagatgagtacaactgaaataaaaagtggaggcctctgcaaaaaataaaaaataaaaaataaatttatccttcaaaataactcagttttttcaatgggcctattttgaagaatgaacattgaaaaatgagacaatatatccataaattcatagtatgacataccataatcgagagcattgttagccatagacattttgtatgccagtgaaatctgtatacattctctaaatttttccagtttatcgtgtggcttattggaaaaaaaaaaagcatatacactgactgcatgttttgtctccccaactaaatgataagtgcctagagggcaggaacacccttggttttatttacttgggacagagctctacccacaagggctcactgataaaactcatcagtcccaccccacagcaacatgatggggacatgaggttcagttcttctactcttggcctgagccgcaaaccaaaattacaacagtacaatgggaatagaggatctgctttatagaatttcctttcagtcagctgctcagaaactacaatcctcagagtgaaattaaatggagttatactgggatagtcctctctgcttttcagaggaaagaaacacttctcgaaattgtgcaaatgaaagaaatgtcatggtataaactagacatcttatatccttaaaatatatctttgatgattatacatattggtttcaaatcccaagtttgaagaaacatccaaaagttatgtgaaattacttatagatgaattgacaacatttgagacttcgacaggcaatcatgaagcagttctcaagttgatttggtttatatagctctttaagaatcttttggaaagccataatctcacaaaatacagatatgcaattttttttttttgagatggagtctcactctgttgcccagtctggagttcagtggcgcgatctcagctcactacaagctccccttcccaggttcaagcaattctcctgtctcagcctcctgagtagctgggactacaggcgcctgccaccacacccagctaacttttgtatttttagtagagatggggtttcaccttgttggtcaagctggtctcaaactcctgacctcaggtgatccactcgcctctgcctcccaaagtgctgggattacaggcgtaagccaccacacccagcccaaaaaatgtttgtgcacagaactgtggatgtttgtcacagaactttccaaataaagaagttctgataaaagagaagatatttctcatttccataatctttaaggtgtgggggatacgtaatctggacttctcaaatggatgatttctaaatacgcgtcagatgaagtgattctaactttctctgtagtaatatcttattttgttttattcaaaaacaataaaccatgtagatttattagcatgtgtgggtgtgatttttgcatctaggaatcttaagtggg

SEQ ID NO: 460005 - DNA, 4811 bp, Homo sapiens
tctgcttggcttgtggacaatcagagcatagtttttctctttccatcaggtgagagataacagtatcctggttgatcaatgttttcttctttaatcacagctgatggaaagagaaaaactatgctctgcttggcttgtggacaatccatgagaacagagaaaggactgaaacaattgcttccaggggttccattcctctgtatttcaggcaccaagactcagaagcccttcttacaagggcccttcaaggtcatcagtgtggctgaggttgatttgtcgtgtgacaaggctgaaaaaactctaagttactaccaagcacgtctattgtctttacggatgaagacctgcacgcaagctgcatctcacagtggcatggcagccacacaccagaaggcagtgaaaataattgcatacaaaaatggggatgggtatcgtaatgggaagttaattgtggctggaacattccccatgcttcttacagaatgcacggaacaacttgggcttgccagagcagcctccaaagtatataccaaagatggaaccccaatctttaccttgcgtgatttggttttatgggctctagatgaatcctttctccagagagactctgagaaacaaaagcaagatgcagctcctgttggaaaagaacagataattgttgaaagtatggaagaaaatccaagaatgaaagtgaaaaacagattatttgcaaaatctgtgacatccgatagtttggatggtatagacaagtctttgcttaccctcatcctcagaaatcctattgccatctgggtgtcttgtggtgaaccatttctacctccaaatgctttgcagaaagcagaaaaattagagaaacagaactggctaaaaaaggacagaattttggctgatctagataccatgagacacaaaatgagacagttaaaagggcggcgagtagcggcatgtcagccagccaccatggttcctaccaagagccctgtgcagcccgtggtggttgaaggaggctggaccgaacagactcaacaggaaattaaactcatggaacttataagacatacagaggcacacctttctgaaatccaagaaatggaatccaaaataaattttccaattgcaaccaaacgtatagcagtcaagccgagcaacctgtataagcagcccaacacaaaacgagtgtggatttatctaaatggaggcagacctgaagatggcacttatgcctggggcaaaactatttcagaggtcagcttactttatctgaagacatggatctttatttggagcaggaaagttttcttctattttttgataactgcttaaggttaatgtattctagattcctctccagtaacaccaataatgtataggtttaatatctgatgtcttgacattataaatgtttgacttttctctctcatacactttgtctcttttcctttttctgtatcctgtgagatcttctccacctagtctgccctaataatgatttgaatttctgtaatattgagtcttttttctttcttaccttctctcctcttgtcattcagctctctcttcatcctcacttgaaaccctatttcttctctcactagcagctatacaactttggttattatatttaacctctttgttctccatttttctcatcaacaaaaggtggatactaattatttccacagaacaaaattagattgttcttgagaacttttagaaaaatacccagtccctagaaatgtgtcaatatgttttaatcagtattactgttatcagcagcctcagcatctctcctgtatctgagcaatactcctttcctttaagctgtggttgtctcgtttctgtgtgtatctgtgagtatatttacacacagaagtcatattttttgaatttaggggtaacacaacacagatacttttgaaaatgtactcctgctgtaaatctttttcaaaatcttcaccttgagtacaatgtaccctttttttatgttgtagaatattttcattagctttacattgttgctattgttgatttttctatttatatttccttgtacaaggagagatcttttgataacagacagaataggttagttctctttggtgaccctagacatctacttgggagctgtcagaatcctccctcaatggtaggttgaaggattggtttgtatgcagagtatttaatcaaattgcttctgactggatggtatttggcaggagtagggctgcatttaaccaacatggcacatgtatacatatgtaacaaacctgcacattgtgcacatgtaccctagaacttaaagtatgataaaaaaatatataaaaatagataacattaaaaaaagactactctcctgttggtcctctctgactatcctattctatagaggggaatatatttttggataatttgaattattattaaattcaatccactcatcccttactcaaaatactgggtgaaaagctgcgctttttgaactgcatcgccccatcactcttcttgtcttggctcatattcctgatgcatttgccagatgcaaggtgtcatcacatgcccagccctgacccctgccattctgccttgttgtgagttgtagcatctaaacagatctataaacagaagtattgatggtgatttggagggctgatgtggacttggcacctgcattttgggggaacaggcttttggccctctaataggtgaaagccatacaggcagctgctgcaagactgctcctctcgtctcaaaatgacccacccagctagagcactgtacacccccagtggagagccaattcagtcctgggacgacatagagcgagatatggtcatctgtgtgtctatgggacatggtttcaaaaccccaaaagagttaaaacaactgatggagatcagagcaaattatgccagaatccgaaggcagcagggccctcaagccacagacattgtggtgtcaccatccacgaagctgctgtctctggcacatctccacaattaactcctatcagaaccatcggattttctgctgtatttttctggaaagaaaactttctttacccacttataaacagaagactgtgacaagaaggccaattatttccatcgctgaagactctaaatttggcaaatcttctaaataacaatcctgcatagtttattaaaaaaaattagtcgtaaaatttatccttcaaaaatctgcattttaaataaaccctgacagtgatttctcaagactgtaaagatattagtctgagaatgcaactctaacagactgctctgggcatcttttctctttgccttggccaggcctctcagaattgagtgagcgtgtgactccatttgcacagtgggacagatgagtacaactgaaataaaaagtggaggcctctgcaaaaaataaaaaataaaaaataaatttatccttcaaaataactcagttttttcaatgggcctattttgaagaatgaacattgaaaaatgagacaatatatccataaattcatagtatgacataccataatcgagagcattgttagccatagacattttgtatgccagtgaaatctgtatacattctctaaatttttccagtttatcgtgtggcttattggaaaaaaaaaaagcatatacactgactgcatgttttgtctccccaactaaatgataagtgcctagagggcaggaacacccttggttttatttacttgggacagagctctacccacaagggctcactgataaaactcatcagtcccaccccacagcaacatgatggggacatgaggttcagttcttctactcttggcctgagccgcaaaccaaaattacaacagtacaatgggaatagaggatctgctttatagaatttcctttcagtcagctgctcagaaactacaatcctcagagtgaaattaaatggagttatactgggatagtcctctctgcttttcagaggaaagaaacacttctcgaaattgtgcaaatgaaagaaatgtcatggtataaactagacatcttatatccttaaaatatatctttgatgattatacatattggtttcaaatcccaagtttgaagaaacatccaaaagttatgtgaaattacttatagatgaattgacaacatttgagacttcgacaggcaatcatgaagcagttctcaagttgatttggtttatatagctctttaagaatcttttggaaagccataatctcacaaaatacagatatgcaattttttttttttgagatggagtctcactctgttgcccagtctggagttcagtggcgcgatctcagctcactacaagctccccttcccaggttcaagcaattctcctgtctcagcctcctgagtagctgggactacaggcgcctgccaccacacccagctaacttttgtatttttagtagagatggggtttcaccttgttggtcaagctggtctcaaactcctgacctcaggtgatccactcgcctctgcctcccaaagtgctgggattacaggcgtaagccaccacacccagcccaaaaaatgtttgtgcacagaactgtggatgtttgtcacagaactttccaaataaagaagttctgataaaagagaagatatttctcatttccataatctttaaggtgtgggggatacgtaatctggacttctcaaatggatgatttctaaatacgcgtcagatgaagtgattctaactttctctgtagtaatatcttattttgttttattcaaaaacaataaaccatgtagatttattagcatgtgtgggtgtgatttttgcatctaggaatcttaagtggg

SEQ ID NO: 460006 - DNA, 4069 bp, Homo sapiens
tcagatgcagatgaaggaaacacaacctaaagagctagaaaaaatggtcatccaaactccaatgacattatctcccaggtggaagagtgtattgaaagatgtacagcggtcatatgaaggaaaagagtttcagaggaatctgaagacattagagaaccttcctgatgaaaaggagcccatatcaatcacacctcccccctccctacaatactccctgcctggagctcttcctatttctggccagcctctcactaaatgcattcatctcacacctcagcaggcccaggaagtggggatcacactcactcctcagcaggcccaggctcaggggatcacgctcacccttcagcaggcccaggaactagggatccctctcacccctcagcaggcccaggccctggagatccttttcacccctcagcaggcgcaggccctggggatccctctcacccctcagcagacccaggttcaagggatcactctcacccctcagcaggaccaggccccggggatctctctcaccactcagcaggctcataaactagggatccctcttacccctcagcaggcccaggccctggggatccctctcacccctcagcaggctcaggaattggggatccctctcacccctcagcaggcccaggccctgagggtctctctcacccctcagcaggctcaggaattggggatccctctcacccctcagcaggcccaggccctggggatcactctaacccttcagcaggcccagcaattggggatccctctcacccctcagcaggcgcaggctctcggaatcactctcacccctaagcaggttcaggaactggggatccctcttactcctcagcaggcccaggccctggggatcactctcacccctaagcaggctcaggaattggggatccctctcaaccctcagcaggcccagaccctggggatccctctcacccctaagcaggcacaggctctggggatccctttcacccctcagcaggcgcaggccctggggatccctctcacccctcagcaggcgcagactcaggagatcactctcacccctcagcaggcccaggccttggggatgcctctcaccactcagcaggctcaggaactggggatccctctcacccctcagcacgctcaggccttggggatgcctctcaccactcagcaggctcaggaactggggatccctctcacccctcagcaggctcaggccttggggatgcctctcaccactcagcaggctcaggaactggggatccctctcacccctcagcaggctcaggaattggggatccctttcacccctcagcaggcacaggctcaggagatcactctcacccctcagcaggcccaggccctggggatgcctctcaccgctcagcaggctcaggagctggggatcactctcacccctcagcaggctcaggaattggggatccctctcacccctcagcaggcccaggccctggggatccctctcatccctccgcaggctcaggaattggggatccctctcacccctcagcaggcccaggccctggggatccttctcatccctccgcaggctcaggaattggggatccctctcacccctcagcaggcccaggccctggggatccctctgatccctccgcaggctcaggaattggggatccctctcacccctcagcaggtccaggccctggggatccctctcatccctccgcaggctcaggaattggagatccctctcacccctcagcaggcccaggccctggggatccctctcacccctcagcaggcgcaggaactggggatccctctcacccctcagcaggcgcaggaactggggatccctctcacccctcagcaggcgcaggctcaggggatccctctcacccctcagcaggcccaggctctggggatctctctcacccctcagcaggcgcaggctcaggggatcactctcacccctcagcaggcccaggcactgggagtccccatcaccccagtaaatgcctgggtgtcagctgtcactcttacctctgagcaaacccacgctttggagtcccctatgaacttagaacaggctcaagaacagttattgaagttaggggttcctctcaccttagataaagcccataccttgggatcgcccctcacccttaagcaagtccagtggtcccatagaccatttcagaaatcgaaggcttctctccccactgggcaatccatcatatcaagattgtctccaagtcttaggctgtccctggcatcatcagctcctactgctgagaagtcctctatattcggggtctcttctactcctttgcagatatcaagggttcccctcaaccaaggcccctttgcccctgggaagcccctagaaatggggattctttctgagcctgggaagcttggggcaccacagactcttcgttcctctggacagaccctggtatacggaggtcaatccacttctgcgcagttcccggcaccacaggcccctccctcccctgggcagctcccaatatctcgggcccctcccactccagggcagccctttatagctggagttccacccacttctggacagattccaagtctctgggctcctctttctcctgggcagcccttagttcctgaagcctcttccatccctggggacctcctggaatctggacccttaaccttctctgagcagctccaggaattccagcctcctgccactgctgagcaatctccctatctgcaggctccttctacccctgggcagcatctggcaacatggacccttcctgggcgagcttcttcattatggatccctcccacctctagacatcctcccacactatggccgtccccagcccctggaaagccccagaaaagttggtccccttctgttgctaagaaaagattggcaattatttcttctctgaaatctaaatcagtattgatccatcctagtgctccagatttcaaggtagctcaagttcctttcaccactaagaagttccaaatgtcggaggtctctgacacttccgaagaaacccagatacttcgagacacttttgctatagaatcatttagaacatttcagtcccatttcaccaaatataggacaccagtataccaaaccccttacactgatgaaagggcccttctcactctcatgaagccaacaacatcaccatcttctctcactactctactcagaacatcacagatttcacctttggaatggtaccagaaatcccgattccctcctatagacaagccctggatactgagttcagtttcagataccaagaaacccaaagtaatggtgcccccttcctctcctcaagaacttgaagaaaagaggtattttgttgatgtggaggctcagaagaagaacctgatactattaaatcaggctataaaaacttgtggactcccttcacagctacacacaatggctaggactctcataattgagatacttcatatggacacagttcagttgggatacttattccgcaagtacattgcctataggctgatccagcatgccaggtagatataattatttacgtctagttttctggtttagttctgattgcaaatattttctgtcattgtcccagaagtatattcatatttgtcaggccatatgttctaaaggactgccttatataaggtctatgggaaggaagcttgtttaagatagcaaaaggagatatattttttggaaaataagaaatgacatataacgtgatccatttcatccatatatatctccagcggagatgccaagtatattttgtggatcatggttggtctccaaaacatcaatttcaaaagtttccagttattctgaatttctttcatcatttttggttcaccagaaatgtatgatttttaaaatgggagatggcataaaaaaagaatgagaccaggcatagtgtctcatgcctgtaatcccagcactttgggaggctgaggcaggtggataacttgaggccaggagttcaagaccagcctggccaacatggcgaaatcccatctctgcaaaaaattcaaaaattagacaggcatg

SEQ ID NO: 460007 - DNA, 994 bp, Homo sapiens
  misc_feature (1)..(1): n is a, c, g, or t
  misc_feature (7)..(8): n is a, c, g, or t
  misc_feature (12)..(13): n is a, c, g, or t
ncccagnncttnnagtgcccactctagggctccctccacagccatcatcacccctccgggccctccaggccagcgtgtctctgtcatcaccaaccatctgttgatttggaggtgaagttcatcttaacaatatatttcatttaaccaaatatgcccaaaatattatcatttcaacatgttacccatataaaaattattggagagatgcattcctatttttctcatactaagttttcaaaagctgggaaactgagacacagaggagtggatgacccgagatacacactcaggactgtggctcctacaacagtgcccctcgccctgttagagctggtgaaacgttcactagcaagagtggtacctgccctgcactcagaaccttgctccagggagaggccccagtgctcaaaagtcttggcaaagaatgtgcactcagcttcagcagaacttgaagctcaccatttttggatgacattctgtgaacgaagtgttctctatgagatactaagagcaatatagggtaatcactggtgacagaaacatctgctcatgcaggttcatgtcaaagtccagggttgaaggagaacccctcatcccaggtgtggcagaattgatgccctataacttctgagtgtaggtcataaaaggcaatgtggctcccccagctctctccctctgtcaagatgcttttccttggaatccagctgccatgttgtgagaaagcccagggcaccgcagagaccacatgtgggtgttccagccaacagccccagctaggtccccatggagagcccacaccaaccaccagatatgagggttcagactccagcccacagtcttcaagtcttccagctgcagtcccagacatcatgaaaccattctgctgtgacctgtcagaatttctgaccccagaaactgttggagataataaataattactgttgttttaatcctctaaattttggggtgatttgttatgcagcaatcgataact

SEQ ID NO: 460008 - DNA, 567 bp, Homo sapiens
aggtgaccctggaaaccgcatgttgatggtagcttagcagccatcagcctgggcccctgaatgaccgcatggagcagagtctttctgccgactggaattaccactccacattcctgtgagagagaaacaagtgttttcctcatgagattcttgagttttggatgtttctgtgccaacacagctaaccctggcccaacatacaaggttatgtgtttcagctgcgagtttttcaaattgttgcaaatcttcaaacatttttccaacaaatttactgaaaaaaatccacatataagtggcacccccaccagtttaaacctgtgttgttcaagagtcagctatttttatgaggtgttttcaaaagtttatggaaaatgaatcttatgaataaaactatgcatggatttcaaatcttttgcaccaaaataaactcatactaacttgttataaaatgtctgagttttatacagtttagtttgagacactaagaaagataagacatcagtttggaaagggtcatcagagcaacgtgaattatgcaaaactgaagcaaaaacaaacaccaaattt

SEQ ID NO: 460009 - DNA, 2671 bp, Homo sapiens
ctccagggtcagatggactcgggctgactcgggctccaccaattctgagtgtgggaatcggggacccttctaccctcgctgagcctcagtctcctcatctgtaaaatggggataagggcgcctgcctcctgggacatgctggggagtcagcttagccccgggacccatgggcactcactcagctcgctgccccttggggtcttcagtgggaagcccagacctgctgtcctgaggctatatctgggtgaggagcccgggagcggccgtgcatgcctgagctcccattggcgtaaatggggacacagacaggcgccccgtccacctgtcctgtccctgctaagtgtcggcctcctcgctgagtggggccccatcagtggcttttcagatgagtcagggatgctccaggcagagctgctgtcactccaggtggagcccttgtctgcggggagctgcccctcctcgggtgcctggagagggcacgtatgtgcggggtggtcagtgtggctcaggcctccacactacctgcccctgcttccctcctgctgaggccgggtggactctgggggaagggacccgtgctcatgggttcacggacacagagcaggatgtggggccagaacatgaaatccctgcacagacccctcggttcttcccacagatcctgtttttcatgcccaaatcacctggacacacttctgttgccccggctggttcccaaagtggccctgatccccccatccagggcactatccttaccacgtgcctcttccccctggccagcccccatccctgccccagcccacagctgccctgcccaggggacttcagtcccagatccacagcggctcttgggagtctcgctgggaaggcatgggtgggtcactcccatttcccaccattccactggagccttcctggttgattctgaggtccagacccctgtctcctcatctagatggggacaccgaggcttctgggaggtagacagtgctgggggaaccatcaggagatcagcagccaggcctggactcatgtgttctgggacagactggggccctcctgcctggcctctggggcctctcagtccaagtctgcagccacctgtggtctggagggccacaaagctcatggtttgcaatcccagccatttcttttctaaatcagtaaatcctgacctctgtggacaccgccatcactgccaaaatcaggtcaaaggcagctcccttgtgcacagagcaggtccacttctgctgctgacaggtgggagtcccgatgccctggggtcctatcagccacacccctgtcttcaccgcagggctgtgtgtgcacccctcactttgctgatgaccagaggctccccggacacggaagccagatatcaccatgctcatccctagagcagccgtgcggggcatggagcagcagagctcagagcttatgcagggctgatgcggggaagctggtctccccatgctgcagtccccatgggggaaggagctcacctgaagggggtgctctcattggctgggagcctccactgactccacagcactctcctgacttgtgccagatgcctttgaaacagtcactgggctgaaaagtgaccagagcatggggtcgagctgtgaagatgagttggccctggttgtggacggtgagggagggagcagcgctggcctgggctctggcagccctgctgagtccatctccctgaggatgagccgggctgggccggggctggcactccgtgatgtggaacggggtgtgttgggggagcctttgctgggaaggactcctgctgagaggagccgtgtgtcgtggaggctgtggttccgaatctctcagtgggtgtgattctctgcttattcgaattaactaaactgtaaatcatgcctgccacatcccattcccattggtttccgtggattcgctgctcatttcttgttagaaagtgctgtgggcatcaggagtagctcaataagcaaaatgaagcaggcccacaccctactgtgttctgggggagatgagatgattttcctgaaatattctttctcttcctggccccgttctccaggtgtggaatatcctgctccaatcaaagccatgtcacctgcgttgtccagtgaaacatcagtggacaggcgctgcccgggctccagggagctcctcactgaggctcactccctgtgcctctgccatcagcacagggggacatgcctggctgcctgtgggaccagggaggacgcgcggtgcgggagcagagccagccacactgccgctgctgcactgttcatctgagtggcgcaaggttatgtgtttcagctgcgagtttttcaaattgttgcaaatcttcaaacatttttccaacaaatttactgaaaaaaatccacatataagtggcacccccaccagtttaaacctgtgttgttcaagagtcagctatttttatgaggtgttttcaaaagtttatggaaaatgaatcttatgaataaaactatgcatggatttcaaatcttttgcaccaaaataaactcatactaacttgttataaaatgtctgagttttatacagtttagtttgagacactaagaaagataagacatcagtttggaaagggtcatcagagcaacgtgaattatgcaaaactgaagcaaaaacaaacaccaaattt

SEQ ID NO: 460010 - DNA, 877 bp, Homo sapiens
tgcaaacaacccaaagccccaacaatggaagcacagctaaggagtctttgcctggaaaacacaactgaaagaaaacacagcagaaatgtcatctgtgaatgggctgatctgagtgggaaggctataggcgctgacccacgaatgcaactctcagccgagctgtccctgccggatttcaaacagctgaagaagggctgggagaacatcaaggcttggactaaaacaattatggcccatgaaaggagagagaaggtgaaagggagcgtcagccccctcctgagtaaccaagtcctagggaaggagatcaccagcatgctgctggagcagctctacttcctgcagagcactccttccacccctccccccggaggaggagcccaaataccacgccacggcccaagaatcatttgctgtttcaaatagagaactgtgcgatgatgagaaagagttcatacgttttccaacacgtgagaggacctctcaacctgaaccctcgtgttcagctgtcagaataacagccaataaaaactacatgagcaaaatctctcaggaaggtgctttaaaaaagatgcatgaggactgaacatgatcaacaaatgtccatcttacaattgcaactgatacaaatgaatgaggtgcattgtggccaaaatccagcagacagagcgagagtgtgagatggcagaggaggaacacaggataaaaatgaagttctcaataaagagaagatgtattgggaaaaaaaactacaaacttttaccaaggaatggcctgcttcctcatttaaccggccctttcccaattcaccctaagactttgggggtggctctcttgtaattaattgtgttggcaaagaatgtctggaacatggacttgc

SEQ ID NO: 460011 - DNA, 3686 bp, Homo sapiens
ctgttactaggttagaaatttgggtgacctgcagagaaacgcctcctgattttgtcttacaatggaacttaaaaagtcgcctgacggtggatggggctgggtgattgtgtttgtctccttccttactcagtttttgtgttacggatccccactagctgttggagtcctgtacatagaatggctggatgcctttggtgaaggaaaaggaaaaacagcctgggttggatccctggcaagtggagttggcttgcttgcaagttcaaaggtgtggaatcactggttcatgtcacaggccgtgggtgtgataaagagcttgatgtctggtttgatgagaggaggtgaggggaaagaggcctctgaagttgtgtctccagtgtgtgaaatggaaggttcaagcgttggccttttcatatatgctgctctgcagaggatgctggttgagttctatggactggatggatgcttgctgattgtgggtgctttagctttaaatatattagcctgtggcagtctgatgagacccctccaatcttctgattgtcctttgcctaaaaaaatagctccagaagatctaccagataaatactccatttacaatgaaaaaggaaagaatctggaagaaaacataaacattcttgacaagagctacagtagtgaggaaaaatgcaggatcacgttagccaatggtgactggaaacaagacagcctacttcataaaaaccccacagtgacacacacaaaagagcctgaaacgtacaaaaagaaagttgcagaacagacatatttttgcaaacagcttgccaagaggaagtggcagttatataaaaactactgtggtgaaactgtggctctttttaaaaacaaagtattttcagcccttttcattgctatcttactctttgacatcggagggtttccaccttcattacttatggaagatgtagcaagaagttcaaacgtgaaagaagaagagtttattatgccacttatttccattataggcattatgacagcagttggtaaactgcttttagggatactggctgacttcaagtggattaataccttgtatctttatgttgctaccttaatcatcatgggcctagccttgtgtgcaattccatttgccaaaagctatgtcacattggcgttgctttctgggatcctagggtttcttactggtaattggtccatctttccatatgtgaccacgaagactgtgggaattgaaaaattagcccatgcctatgggatattaatgttctttgctggacttggaaatagcctaggaccacccatcgttggttggttttatgactggacccagacctatgatattgcattttattttagtggcttctgcgtcctgctgggaggttttattctgctgctggcagccttgccctcttgggatacatgcaacaagcaactccccaagccagctccaacaactttcttgtacaaagttgcctctaatgtttagaagaatattggaagacactatttttgctattttataccatatagcaacgatattttaacagattctcaagcaaattttctagagtcaagactattttctcatagcaaaatttcacaatgactgactctgaatgaattatttttttttatatatcctattttttatgtagtgtatgcgtagcctctatctcgtatttttttctatttctcctccccacaccatcaatgggactattctgttttgctgttattcactagttcttaacattgtaaaaagtttgaccagcctcagaaggctttctctgtgtaaagaagtataatttctctgccgactccatttaatccactgcaaggcacctagagagactgctcctattttaaaagtgatgcaagcatcatgataagatatgtgtgaagcccactaggaaataaatcattctcttctctatgtttgacttgctagtaaacagaagacttcaagccagccaggaaattaaagtggcgactaaaacagccttaagaattgcagtggagcaaattggtcattttttaaaaaaatatattttaacctacagtcaccagttttcattattctatttacctcactgaagtactcgcatgttgtttggtacccactgagcaactgtttcagttcctaaggtatttgctgagatgtgggtgaactccaaatggagaagtagtcactgtagactttcttcatggttgaccactccaaccttgctcacttttgcttcttggccatccactcagctgatgtttcctgggaagtgctaattttacctgtttccaaattggaaacacatttctcaatcattccgttctggcaaatgggaaacatccatttgctttgggcacagtggggatgggctgcaagttcttgcatatcctcccagtgaagcatttatttgctactatcagattttaccactatcaaatataattcaagggcagaattaaacgtgagtgtgtgtgtgtgtgtgtgtgtgtgctatgcatgctctaagtctgcatgggatatgggaatggaaaagggcaataagaaattaatacccttatgcagttgcatttaaccttaagaaaaatgtccttgggataaactccaatgtttaatacattgattttttttctaaagaaatgggttttaaactttggtatgcatcagaattccctatagatctttttgaaaatataggtacctgggtatcacacatagaacttttaattctgctggtgtaggctgttgcccaaacatctataattttactgagctcttcaagtgattctgataacacagcctggattgagaatttttataagattggcaatggaaaaacatttattcttttaaataataatttttttaaaacccaagaggtcaggggattttataaaccaatagccaagtgttctttaaataggaggcacccttcccattgtgccaaaatcatcttttcatttattttgaaatttgtatgattattttatacttgtatgttgcctttcttcgaaggcgcctgaagcactttataaacacaaatcctcacaatacctctgtgaggtaggtaaatagtacttttctatgtagtaaacctggaatatggagaatttcataacagttcattctacttaataatgcaataatggagctccaagttgtcttggacttctacaccacactcagacttctggaaagttttctgtacctcattctttagtccctgtcaaggttagtaaataaaataagtgacataaaaaaaaaaaaaactaaactacttgttgtgttgaaagttcctttttgccagttatgttcaggaaacccaataacctgaaaaagtttgactttgatgtgacatcttcatattcatcaatgctgataattgtccaaaggcatcttcactatgtctgctaaataacatccaatgtgggcgttatctgttgtctaggggatgaattttaagttacaataaaatatttttctttgttttgcatcagtttggttgctttttctcctcttagttctccacccaattatagtgacatgtcacttgaatgtaaaactataaattacctggcataattcagactctggaacatggttattggacaaaagcatattcaaaatgcttagctacttttaccattgccttccaaaaagctagtttatcagctttacctcttgtggt

SEQ ID NO: 460012 - DNA, 1011 bp, Homo sapiens
tgaatatggtggagaatgtattataactctctgaagatatgcgtggaacaccagtgccagccctgcctccatgaaccagcccccagagtcccaggctccagtcctagcccaatcacaggctggcccctgcaaactcaggctcgaggcccatccccagtgccagggaagcctctgtggattcaggctcctcccaatgaacccaggctccaagcccacccacccactgacctaggcaccaggccagcccatcaacaactctgccagtcagttcacacagaatctatagaccgactgagtggtgaagggctttccctgccaaagttaatcagtaaagtttggagaaggtgcctatgtcttccaatgtgtagataccaacacaaggccacaaggatcaagaataatcgggttggtaatgattttcagcggggctgtataaatgtaagtcacaacttcggtagtagagagggtgtatcagttctaaggaaggagaaagcaatgggattggaggacggtgagaataccaacagagacattcctcgctcagtgagcctcgaagggatattgctgccatcacatggatatgatctcactgagaatgaaactaacgtagaagaaagcaaagataagagaggggagagcaagcgcacaagagtttgaactaggtttcctgatgcttgtctgcaaaagattattcactgatatcgagagagatgttacttgttgaagtaaagagtgaagatttgttctacatcctattctcttacctcctgtgctgcactgaaggaaggagcagagctgaaaatgaacttgataaaatacacaagattaaaattattatacaaaaataaaatagatttgagaaccagagcaatgtccaatgcttgtgatgaatcttagataaataatggctgctagacaaataaaaaggacaatattctgaaagaaaaatgtcattttattccttctatgtgtacaccgacatcgctttgcatcacagcctttttcatctaa

SEQ ID NO: 460013 - DNA, 1789 bp, Homo sapiens
tgatacatttcataagattattttatggctttaagaggagttggaaatgggaatgcaggagtggggaatgggaatgcagcagagggagatggaatgcagcagagaaaaatgggtttgcagcagagagagatggaatgcaggaatgggaaatgggaatacagcagagagagggaatgcaggagtggaaaatgggattgcagcaaagggagatggaattcagcagtgggaaatgggaatgctggaatggtaaatgggattgcagcagagggaaatgggaatgcagcagagggagatggaatgcaggcatgggaaatggaaatgcaggaaaatgggaagatgaagcagagggagatggaatgcagcagtgggaaatgggaatgctggaatggtaaatgggattgcagcagagggaaatgggaatgcagcagagggagatggaatgcaggagtgggagatgggaatgcagcagagggagatggaatgcaagagtgggaaatgggaatgcagcagagggagatggaatgcagcagagggagatggaatgcaggagtgggagatgggaatgcagcagagggaaatggaatgcagcagagggagatggaatgcagcagagggagatggaatgcagcagagggagatggaatgcagcagagggagatggaatgcaggagtgggagatgggaatgcagcagagggagatggaatgcagcagagggagatggaatgcagcagagggagatggaatgcagcagagggagatggaatgcagcagagggaaatggaatgcagcagagggagatggaatgcaggagtgggagatgggaatgcaggagtgggaaatggaatgcagcaaaggggaaggagaatgcattagagagacatgggaatcccacaggggaaaatgggactgcagaagaggaaaacagtcatgcagctgtagaaaatgcagcagaggggaaggccacaggatcagtgggcagcctggcatcatgattaagtggagataccatcacagaacacctgagacttagagctacacacaacaggctgtgcggtgatgtgctgggcaacagaacatcgatttcgacgtcaaaagaccttcatagtgcttccgaattctgacttaccttagctgtctttccttttgtgaagcaccaaccactgaagttcattttggaatcatggccacccagaagaggaaaggggtgatcatgtgtctcaaagaagagataactttgagggagaggatgaaaactgcaaagacccttgggattaaatgaaatctgctgattctactcttttttcatgaatttctgtatgatatttagcaattagaatgtttgactggcaatggccaggtagatttcaccattatgtaacaaagagaataaaaaagaaaggaaaggagaaaacaataattggcctaggagatgggagttttgttcttggtcttagttgtctccctaggagaagcagctcttttccatccaaaggtgaacagaagactctgcagagcataatgttgctatggcttgttttactgaagtaaagacactgtaaatctcaaaaatactccaacttccctgattcttttggaagttattgggcatctgcattttcccaggagacttctctccacattgtcgcagtgttgaaactctgagataagaattccttgcccatcttctaacttccacccagatatctggcttctgtcaataggccttacccaaacagggttatgtatatgtatgtatgtatgtatgtgtgtgtatatatatatatatat

SEQ ID NO: 460014 - DNA, 1303 bp, Homo sapiens
tgatacatttcataagattattttatggctttaagaggagttggaaatgggaatgcaggagtggggaatgggaatgcagcagagggagatggaatgcagcagagaaaaatgggtttgcagcagagagagatggaatgcaggaatgggaaatgggaatacagcagagagagggaatgcaggagtggaaaatgggattgcagcaaagggagatggaattcagcagtgggaaatgggaatgctggaatggtaaatgggattgcagcagagggaaatgggaatgcagcagagggagatggaatgcaggcatgggaaatggaaatgcaggaaaatgggaagatgaagcagagggagatggaatgcagcagtgggaaatgggaatgctggaatggtaaatgggattgcagcagagggaaatgggaatgcagcagagggagatggaatgcaggagtgggagatgggaatgcagcagagggagatggaatgcaagagtgggaaatgggaatgcagcagagggagatggaatgcagcagagggagatggaatgcaggagtgggagatgggaatgcagcagagggaaatggaatgcagcagagggagatggaatgcagcagagggagatggaatgcagcagagggagatggaatgcagcagagggagatggaatgcaggagtgggagatgggaatgcagcagagggagatggaatgcagcagagggagatggaatgcagcagagggagatggaatgcagcagagggagatggaatgcagcagagggaaatggaatgcagcagagggagatggaatgcaggagtgggagatgggaatgcaggagtgggaaatggaatgcagcaaaggggaaggagaatgcattagagagacatgggaatcccacaggggaaaatgggactgcagaagaggaaaacagtcatgcagctgtagaaaatgcagcagaggggaaggccacaggatcagtgggcagcctggcatcatgattaagtggagataccatcacagaacacctgagacttagagctacacacaacaggctgtgcggtgatgtgctgggcaacagaacatcgatttcgacgtcaaaagaccttcatagtgcttccgaattctgacttaccttaggcaagtgcctgaaccaatgggttcctcagtttctcctttctgttggaattgggtaatgttgatattcaccaacctgctctgcagcataaaagtctaatggcaaacaaagtttgttatgtacattgaactcctggcctaaaagggactgtgatggaaacacagttggtccat

SEQ ID NO: 460015 - DNA, 499 bp, Homo sapiens
ctctgtgaggagggtgtgaagtcctccatgggaggaagagatgccagcaaaggagtaactccagttagcctccattgtctccaagccggcttttgtcctcatccacaacgcctccacacaagctctgaacacctgtccatgtaaaaatatcaagaaatgctgaggcccatgtcccagaacaacagtcctttaggtggatcacacattctccactacaccaagctctactcacaggttggagacacgctttttgcagaatatgtgaaggaacattttggaacccattgaggactatgtggaaaaaccaaatatccctagaaaaaaacaagttggaaagactcgttttgtagaatctgtgaagggaaaatcaaacccctttgaggcctatggggaaaaaccaaatatctccagataaaaactagaaagaagctatctgtgaaactgctttgtgatgtgtggattcatctcacagaattaaacctttcttttgattcaacag

SEQ ID NO: 460016 - DNA, 881 bp, Homo sapiens
ttctgagaggagaaaaaccaccctgtgttgggaggtatgaggaatttcaggttgactactgatcctagttcccatctcccctcatttcctaactccatttttgccatccccagcaacgctgaagtagagttaagggagagtgtagaagaaaagaaaagagaggaaacaggagggcagagcaaggacacaggccctggagcagtcaccgttcttctcccttcttttcaccctcatgttaacaatagcaaacaggatgacagtgtaaaacctgcctcagctctcccttttaagaagactcagccagctttccttctccttgtttccctctcttgctttttctttgaacactctctcatccctgtggctggtgtagtttccaaactccagacagatactaatattagggatttggaaataagatcaaaattctccagaataccctaaatcataaattgtgattaaaatacttcccatattcctcatgtactagttcattaggaagatcaaaaaattgttcaataggtaaaaatatcaagaaatgctgaggcccatgtcccagaacaacagtcctttaggtggatcacacattctccactacaccaagctctactcacaggttggagacacgctttttgcagaatatgtgaaggaacattttggaacccattgaggactatgtggaaaaaccaaatatccctagaaaaaaacaagttggaaagactcgttttgtagaatctgtgaagggaaaatcaaacccctttgaggcctatggggaaaaaccaaatatctccagataaaaactagaaagaagctatctgtgaaactgctttgtgatgtgtggattcatctcacagaattaaacctttcttttgattcaacag

SEQ ID NO: 460017 - DNA, 648 bp, Homo sapiens
gcagtgcctcttttaattaccccccgccccaggaatttattttgagccacgctgtgaccccgaaggtctggatcatgctatgctgctggttggctacagctatgaaggagcagactcagataacaataaatattggctggtgaagaacagctagggtaaaaactggggcatggatggctacataaagatggccaaagaccggaggaacaactgtggaattgccacagcagccagctaccccactgtgtgagctgatggatggtgatgaggaagaacttgactgaggatggcacatccaaaggaggaatttatcttcaatctaccagcccctgctgtgtggaatgcgcacttcaatcattgaagatccaagtgtgattggaattctgatattttcacactggtaaatgttacctgtattttaattactgctataaacatgtttgtattattgattcacttactttgtattttcattttaaaaggatatatacaattttacctgtttaaataaactgtaatttcaaatatactggtggggcttctttctgttttgatgcactgacttttttgtgtagttgtattagtctgttttcacactgctgataaagacatacccaagactgggcaatttataaaagagatttaatc

SEQ ID NO: 460018 - DNA, 654 bp, Homo sapiens
catagcgtgactgactctcttaatctccaccgctacaggaatttattttgagccacgctgtgaccccgaaggtctggatcatgctatgctgctggttggctacagctatgaaggagcagactcagataacaataaatattggctggtgaagaacagctagggtaaaaactggggcatggatggctacataaagatggccaaagaccggaggaacaactgtggaattgccacagcagccagctaccccactgtgtgagctgatggatggtgatgaggaagaacttgactgaggatggcacatccaaaggaggaatttatcttcaatctaccagcccctgctgtgtggaatgcgcacttcaatcattgaagatccaagtgtgattggaattctgatattttcacactggtaaatgttacctgtattttaattactgctataaacatgtttgtattattgattcacttactttgtattttcattttaaaaggatatatacaattttacctgtttaaataaactgtaatttcaaatatactggtggggcttctttctgttttgatgcactgacttttttgtgtagttgtattagtctgttttcacactgctgataaagacatacccaagactgggcaatttataaaagagatttaatc

SEQ ID NO: 460019 - DNA, 1168 bp, Homo sapiens
catagcgtgactgactctcttaatctccaccgctacaggaatttattttgagccacgctgtgaccccgaaggtctggatcatgctatgctgctggttggctacagctatgaaggagcagactcagataacaataaatattggctggtgaagaacaggtataaattgccagaaagacttatagttgaaactcaaaagggaatccttttttgcaatcagtatttacataccacaagcccttaatcacatttctgaaatcccagaagtctttttcccccttaggcagaacacagaatattaatgattgattgtaacgtcaagatactgtcacaagcatgctggggatattaatatggtatttgtcccattgcatgtctaaattctgaacattttcttaattctgaagtatatcggctggaaagacatcctatcctttttctgtttctgattttgcagttctgtgaaaggtcacagttttgggtctgggattgaagggatatgcaggttttgactcaagaatttacaagggatgaacaggaacatcagcatctcctgattctttatgttaagcctgtggcttctggcacactgtggcttctggcacactgtttaagttaataacccaatgtgctttatccttcctctgaaatggaaaacctgctctcctttcagctagggtaaaaactggggcatggatggctacataaagatggccaaagaccggaggaacaactgtggaattgccacagcagccagctaccccactgtgtgagctgatggatggtgatgaggaagaacttgactgaggatggcacatccaaaggaggaatttatcttcaatctaccagcccctgctgtgtggaatgcgcacttcaatcattgaagatccaagtgtgattggaattctgatattttcacactggtaaatgttacctgtattttaattactgctataaacatgtttgtattattgattcacttactttgtattttcattttaaaaggatatatacaattttacctgtttaaataaactgtaatttcaaatatactggtggggcttctttctgttttgatgcactgacttttttgtgtagttgtattagtctgttttcacactgctgataaagacatacccaagactgggcaatttataaaagagatttaatc

SEQ ID NO: 460020 - DNA, 998 bp, Homo sapiens
acatgactcctgtgaaggatcagtgcaactggtgctctggaagggcagatgttctggaaaacaggcaaacttatctcactgaatgagcagaatctggtagactgctctgggcctcaaggcaatgagggctgcaatggtggcttcatggataatcccttccggtatgttcaggagaacggaggcctggactctgaggcatcctatccatatgaaggaaaggttaaaacctgtaggtacaatcccaagtattctgctgctaatgacactggctttgtggacatcccttcacaggagaaggacctggcgaaggcagtggcaactgtggggcccatctctgttgctgctggtgcaagccatgtctccttccagttctataaaaaaggaatttattttgagccacgctgtgaccccgaaggtctggatcatgctatgctgctggttggctacagctatgaaggagcagactcagataacaataaatattggctggtgaagaacagctagggtaaaaactggggcatggatggctacataaagatggccaaagaccggaggaacaactgtggaattgccacagcagccagctaccccactgtgtgagctgatggatggtgatgaggaagaacttgactgaggatggcacatccaaaggaggaatttatcttcaatctaccagcccctgctgtgtggaatgcgcacttcaatcattgaagatccaagtgtgattggaattctgatattttcacactggtaaatgttacctgtattttaattactgctataaacatgtttgtattattgattcacttactttgtattttcattttaaaaggatatatacaattttacctgtttaaataaactgtaatttcaaatatactggtggggcttctttctgttttgatgcactgacttttttgtgtagttgtattagtctgttttcacactgctgataaagacatacccaagactgggcaatttataaaagagatttaatc

SEQ ID NO: 460021 - DNA, 1351 bp, Homo sapiens
agctgcccacatgcttctctacctacatccacaggaagaccagacacatcaccctgtgggccctagttcatggatgcttcccatacttccctgacaaactcaagaggcctatcaggtctcttgcagcagccaaacataggcaccttagactccagcctgccgaaggcccaggcccctgtgaccttgcacccggcccactccctgacctgcctccttaatgcgttatcttgtctgttgaagctgctgtttctcctcagtggtcccatttacaattccagactggaagatttcttcttctattgttcctcaatgaagcagtctttttcctcactgccttcccttgctggtcaattaacctcatctaacccaatatcagagaggagccagctggtggggggaagagcttggccccctggagaactagagaaagtaagaggatgtggtgcaaaagtgccctttcctccagcaccccacgggatcagacacagacacgagtcctcttcctcgctcgtcctccctaaaagtggaaatagaaatagaaaagactttgaagatttggcagacattatagaagagagttccttagccaatggagaagttcctgatgcccacacctgctggtctcaccgctagggcctgggcatcacaggcagggggaatggggaggggacggtagcgtcagcctacacccacacgcagtttcctgataaaaggtcctttggaaactttgattctcttctcaccaagttgaacggagatgtgttcccatagtaagagtgaggcccctgcatttgctgccctcggttttcccaactaacaccagggcctcccccctgtaccccattcatatgcctcagaagctgacaatgactgttgggcttttccaatgaataccagaacaccatttcctgcagcctgaaaagaagacagtataattgtttggcagcaagaggccaagcaggaaactagagatatggtgacggtagtggtcccagggaggagctttaacctgagcaccacccacagaaggcagaccaccctcccagccgcagtgcaaatgaatgttggcccccacccaggtccccaagtgctttcccagtcacgccccagctgccaggtttttttctccaggcctactacagatgggttaccctgactccacccccaacaccctccaatgattagaaccactgactcctccctcccatgcctgcctccatggcaggcccctgcagaaaccaaacatagtcaccttagactctggcatactgagaccagggcttgatcctggcccccttgcctccctggcaatttatcatttaataaaaatattgttaaaaaatattcatgc

SEQ ID NO: 460022 - DNA, 3205 bp, Homo sapiens
cccgcagccccggggccgcgccgcagagtcgggcttcctggatacatagaggcttgtgccaggcggggtgggaagactggattttgcagtggaagcagcatctcttccgtctgggacctggctgagggcgtccccaccctggggggagcagaggaccagccctgacctagccgggcccagcctcgtcctgcccggcctgagcgccccgcccagcagccggctctggcccaccggggtccgggagcgcgggcgccatggacaagatcttggaggcggtggtgacgtcgtcatacccggtcagcgtgaagcaggggctggttcggcgcgtgctggaggcggcgcggcagccgctggagcgtgagcagtgcctggcgctgctggcgctgggcgcgcgcctctacgtgggcggcgcggaggagctgccgcgccgcgtgggctgccagctgctgcacgtggccggccgccaccaccccgacgtcttcgccgagttcttcagcgcgcgtcgcgtgctgcgcctgctgcagggtggcgccggccccccgggcccccgcgcgctcgcctgcgtgcagctgggtctgcagctgctgcccgaggggcctgcggccgacgaggtgttcgcgctgctgcggcgcgaggtgctgcgcaccgtgtgcgagcgcccgggccccgcggcctgcgcgcaggtggcacggctgctggctcgccacccgcgctgtgtgcccgacggaccccaccgcctgctcttctgccagcagctggtgcgttgcctcggccgcttccgctgcccagccgaaggcgaggagggcgccgtggagttcctagagcaggcccagcagctgtggcgcgcacagcccgccgccatcctgccctgcctcaaagagctgttcgcagtcatctcctgcgcagaggaggagccaccatctagcgccctggccagcatggtccagcacctcccattggagctcatggatggtgttgtccggaacctcagcaatgatgacagtgtgacagactcgcagatgctgactgccattagcagggccttcctggattccttgcctttagtgggtaagagtgtgggctctcgagggttgttgtgaggattaaattgggtaaaacaagataatacacgaaacatgtctagaactgtgctgtgggagacgccgttatcattgttatgactttgctgtcatggttttgtctttttctagcacagtctgctgagtctaggctgttttcctcagcactgactgcatggcagctgtgtgctcagcccgcacaggcaggctgtgttgtggggtccagaggggctgatacatgtaaagttgatggaatatcctgctcaatggtgaatacgacctaagtgttagctgctgttatctcctttaatccatacaagaaccctctgagggaggtattatccccattttacagaggaagaaactgaggcccagagcggggaagtggcttgctctgggtcacacagcaaggacttgctggagccaaagcttctggcccaggggcagtgcccttccaggcagaagcagctgaaagccttgttctggcattgcagcccagtgtggaggggcgagacttggggtgctgagagggcctggctcccttcttggtgggctgggagcctcagtgtctggcaggtggctgtgctgggcttgtgcatttcccagccatgtctggttcagcccacagaccccggggctgccctttgcaggtgtgagtcaatgtgggaacccaggacattacggatagcccctgggctgccctcaccccagcattttgggtgtcccttgtccctgtgtcactgtcactcccctcaccaggatgattgactgggtgtcctggcccctggggaagaatattgacaagtggatcattgcactgctgaagggcctggctgctgttaagaagttcagcatcttgatcgaggtttcgctcaccaaaattgagaaggttttctctaagctgctgtaccccatcgtccggggagctgccttgtctgtgctcaagtacatgctcctgaccttccagcactcccacgaagccttccacctgctcctccctcacatcccccccatggtggcctctctggtcaaggaggactcgaactcggggaccagctgcctggagcagctggcggagctggtccactgcatggtgttccggttcccgggcttcccggatctgtatgagcctgtcatggaggccatcaagatatcttttccaactattctgcttgcctttgaatgttatttatggagtctggggtggttgtcataaagtgtaaactattggtttagtaaaatgtatcaatctttttctttgttgtctatgtttttaatattattaagaagccttgttttttctaagaccataaagatatgctcagatattttcttcccaagttttagctttgcatgtttaatccattcgaatttttgtttttgtgttgagtgtgaggaatattacacgtgaaaactggccgaacatcatttattattaaagtccatcttttccctactagtatttaatgcctcctttaatacacatcacgttctcacaaatgccatggtctatttctgaaatctactttgttccacagttctctttaccaattactatacccatatcatacaatctaataaccatagtgttgaattgttctttaatatctgatagggtgtatcatctactttttttcaaagctaatacatgttagcaattattattattactattcgtacacctttagacttccttatgattttaaaatcaccttgtcaagttatttgaaaaatctcattagggtattgattagaatttcattaaatttatagactcctatggaaagaactgatatatttaaaatgctgagtcttctgatctatgaacatggtatatatttatgcatttattcaaatttccttttatatccctcaataaaccattagcattttctctacaaaattcttgaacattttcactagtatgtctctagatatttatagtttttgttactgttgcaaatatctttatattctattacttttctaattggttaattagaatgctgctcttgtagtcagcaattttgctacactttcctattagttccaatagttttccacttgattctgttgggtttccccatatccttggcaacctttgcctgttgtctgttgccattgcc

SEQ ID NO: 460023 - DNA, 821 bp, Homo sapiens
cctcaccaatgtgggtgggcctcattcaatccattgcagacttgaatagaactaaaaggaagaggaagggcaaatttgttggctgcttgagctgggatattcatctttctcctgatcttggacatcagaactcctgattctcaagcctttgggtttggactggaggcaccagctttcctgggcctccagcttgcagatggcatatcatggaacttctcagcctccaaattcataactctaatacaccagtacaatggaaagattcctaaattcaaaagccagaaggctgggttcctgttcccaccctgccttttaccttctgtgtgttcctgatgaagacacttcatgctccactatttacttacctctgaaacgaagggctgacccagatcagttgttctctgacctgcttggagggactcagaggctgtggagcaacagatttgggaatgaggaatcgttccctggaagagtcagagcgctcgtagacacattctgctggattgcacgagctcctcccctgggaaatccactaagactagaggaaagaattgcttggaggattcagaggctgaagagtggacagacggctttaattgagaaaaagaagcagaaaattgaggaagatgtgaggcatcaatgccagcagacgacatgtgacaggtgctagccacatggatcacactaaatttctgtcatttatatagataaaaaagaatttccaaagagctcctccataattcagcattaaccagctttaaatcatcacctttctttaccttttcaaagcacttttatctagctagctttcactttcagag

SEQ ID NO: 460024 - DNA, 875 bp, Homo sapiens
cctcaccaatgtgggtgggcctcattcaatccattgcagacttgaatagaactaaaaggaagaggaagggcaaatttgttggctgcttgagctgggatattcatctttctcctgatcttggacatcagaactcctgattctcaagcctttgggtttggactggaggcaccagctttcctgggcctccagcttgcagatggcatatcatggaacttctcagcctccaaattcataactctaatacaccagtacaatggaaagattcctaaattcaaaagccagaaggctgggttcctgttcccaccctgccttttaccttctgtgtgttcctgatgaagacacttcatgctccactatttacttacctctgaaacgaagggctgacccagatcagttgttctctgacctgcttggagggactcagaggctgtggagatactcaagtaatgcccaggtctcaggaatgtataatctcttgcttatctctagcaacagatttgggaatgaggaatcgttccctggaagagtcagagcgctcgtagacacattctgctggattgcacgagctcctcccctgggaaatccactaagactagaggaaagaattgcttggaggattcagaggctgaagagtggacagacggctttaattgagaaaaagaagcagaaaattgaggaagatgtgaggcatcaatgccagcagacgacatgtgacaggtgctagccacatggatcacactaaatttctgtcatttatatagataaaaaagaatttccaaagagctcctccataattcagcattaaccagctttaaatcatcacctttctttaccttttcaaagcacttttatctagctagctttcactttcagag

SEQ ID NO: 460025 - DNA, 573 bp, Homo sapiens
gagagaatctggctaagtgtctagcaggatgattgattaacaagatgttttgttttcatcatctcagagaagctgtattgaggtataattgatatgccaaataactggacacattcaacttgtgcaatttgatgagtttggagatacacatacatctgtgaaaccatcaccaaaatcaagaacaactttctctgatctctgtggacatgcttaaaatggctgactcacacagcaagactatttaactgtgcctaaaatcaacccacattcagatgctaactgtaatcctattccctgatccatcaggaaaaagagtctgattgacataacttgtcaagtgttcgccccagcttctatcaactatggggaaggaagggccagaagaggtgtaaccatcatggctaccaggtttcgaaatatttacattacatactgcatttattaaaatacaaattaaatctgcaataaaaaactaattgaccattcaatgggattccgtctatgggtaatattttctgcagaaaatgttaacctctcccttaatggtaatggttaagctaagttggtgcttga

SEQ ID NO: 460026 - DNA, 530 bp, Homo sapiens
atttttcatctgcagcccaatgcaaagagctgtattgaggtataattgatatgccaaataactggacacattcaacttgtgcaatttgatgagtttggagatacacatacatctgtgaaaccatcaccaaaatcaagaacaactttctctgatctctgtggacatgcttaaaatggctgactcacacagcaagactatttaactgtgcctaaaatcaacccacattcagatgctaactgtaatcctattccctgatccatcaggaaaaagagtctgattgacataacttgtcaagtgttcgccccagcttctatcaactatggggaaggaagggccagaagaggtgtaaccatcatggctaccaggtttcgaaatatttacattacatactgcatttattaaaatacaaattaaatctgcaataaaaaactaattgaccattcaatgggattccgtctatgggtaatattttctgcagaaaatgttaacctctcccttaatggtaatggttaagctaagttggtgcttga

SEQ ID NO: 460027 - DNA, 558 bp, Homo sapiens
ttactttctctttcagtaatgacatggatctggagagattctcttaggagagaatctggctaagtgtctagcaggatgattgattaacaagatgttttgttttcatcatctcagagataagtacaactattctgtcatctaatctgctaactcctacattatcaatacggtagtaataaattatgaataaacataaaatatacagagatagaaactgcaaatttatttcagagagcacagttaagggactgattttattatttacactgaattataagcacaattatttcctccaactataaccacagaaagcactttaaattaggatgcttgggctgaacagcccagaaaatctactagccagaaattgagatgagcctgtggatagagttttaggtcatgcttccagttcacattccagcagagataaatgtgaggcctgggcagcatttaggttttgaggtttttcactctttgttttttcctttgacttttagcagtagctagccatgatgaatgactatcaattacaattagggttgccagataaaatatagg

SEQ ID NO: 460028 - DNA, 877 bp, Homo sapiens
tgctgcctcagacatcatcttttcttcactctgtctaaagcatgaatgtccttagatgttcattcaaaattagtgccagggagtgctatttggcaaggccacttagaatatatctgaaaatcatactccttgtaacacagtatgaaacatactccttgtatctcagtctgaaaatgatactccttgttacaagtcagcagagacatgaaggacaggagaggcaatggagtctccaaggctctagccacacccagcatacactgagggagacaaaacaaaaacaaaaacaaacaaaaaaacacacaaagaaacgattttctttgtattacccacagacaagtctgcaccagagaataaaagggcattccttagggttgctgaggattttctttgattgtattctgctaatgtgtgtgcaaggcagatataacacatttgtggaaggctctagagacattttctacaaattttaccctggtttcagaacaactttctctgatctctgtggacatgcttaaaatggctgactcacacagcaagactatttaactgtgcctaaaatcaacccacattcagatgctaactgtaatcctattccctgatccatcaggaaaaagagtctgattgacataacttgtcaagtgttcgccccagcttctatcaactatggggaaggaagggccagaagaggtgtaaccatcatggctaccaggtttcgaaatatttacattacatactgcatttattaaaatacaaattaaatctgcaataaaaaactaattgaccattcaatgggattccgtctatgggtaatattttctgcagaaaatgttaacctctcccttaatggtaatggttaagctaagttggtgcttga

SEQ ID NO: 460029 - DNA, 1600 bp, Homo sapiens
gtcgcctagcaacgaggcacaacaagggactgggggttcgtctgctgggtttgcggagcagctagctactcggcgggatctcccggcaggatgggtaaaaagataaagaaggaagtagagcctcctcctaaggatgtgtttgacccattaatgattgaaagcaaaaaagcagcaactgtggtgttaatgcttaattctccagaagaggaaattttggctaaagcatgtgaagccatttataaatttgctttaaaaggtgaggaaaataaaacaaccctccttgaacttggagctgtggaacctttaactaagctactcacccatgaagacaaaattgtaagaagaaatgctactatgatatttggaatcctggcttctaataatgatgttaaaaaattgttaagggagttagatgtcatgaattctgtcattgcccagctcgctccagaagaagaagtagttatccatgagtttgctagtctttgtctagcaaacatgtctgcagagtacaccagtaaagtgcaaatatttgaacatgggggattagagccactcatcagactactgagtagccctgacccggatgtaaagaagaactctatggaatgcatttacaacttggtgcaggattttcagtgtcgagctaaacttcaagaactaaatgcaatacctcctatcttagatctcttgaagtcagaatatccagtgattcagttgttggctctcaaaaccttaggtgttattgcaaatgataaggagtctcgaacaatgctaagagacaatcaaggattggaccatcttattaagatcctagaaactaaggaattgaatgaccttcatatagaagcacttgcagtgatagccaattgccttgaagacatggatactatggtgcagattcagcagacagggggtcttaaaaagctcctgtcatttgcagaaaactctacaattcctgatattcagaagaatgcagcaaaagccattactaaagcagcttatgatcctgaaaatagaaaactttttcatgaacaagaggttgaaaagtgccttgtagcccttttgggttctgaaaatgatggaactaaaattgctgcttcccaagctatttcagcaatgtgtgagaattcaggcagcaaagattttttcaataatcaggggattccacagttaattcagttgctaaaaagtgacaatgaagaggtacgggaagcagcagctctagccctggcaaacctaaccacttgcaaccctgctaatgcaaaagttccattttctaacaatgcaaggaactgcgtcttcatactgacccctagtggccgattaggaggacgttgggggaggggcaaaaaaggtaatggaaggatggttctgtagtttaatgaaacgtacgttaatttaatttggaacactctccagtgtatctaagataatatttccaaaacatttttaaaagattccgatctgaaaatcatttcaacatgctgcttttagagataatattctactgctaaacgtgtgtttaacagatgcttgtgtttgactttgtcccctattaaggtgtagtcatttacaaatgttttgacgcattcattgtacc

SEQ ID NO: 460030 - DNA, 1421 bp, Homo sapiens
atattgcatctttttccaggatgggtaaaaagataaagaaggaagtagagcctcctcctaaggatgtgtttgacccattaatgattgaaagcaaaaaagcagcaactgtggtgttaatgcttaattctccagaagaggaaattttggctaaagcatgtgaagccatttataaatttgctttaaaaggtgaggaaaataaaacaaccctccttgaacttggagctgtggaacctttaactaagctactcacccatgaagacaaaattgtaagaagaaatgctactatgatatttggaatcctggcttctaataatgatgttaaaaaattgttaagggagttagatgtcatgaattctgtcattgcccagctcgctccagaagaagaagtagttatccatgagtttgctagtctttgtctagcaaacatgtctgcagagtacaccagtaaagtgcaaatatttgaacatgggggattagagccactcatcagactactgagtagccctgacccggatgtaaagaagaactctatggaatgcatttacaacttggtgcaggtgttattgcaaatgataaggagtctcgaacaatgctaagagacaatcaaggattggaccatcttattaagatcctagaaactaaggaattgaatgaccttcatatagaagcacttgcagtgatagccaattgccttgaagacatggatactatggtgcagattcagcagacagggggtcttaaaaagctcctgtcatttgcagaaaactctacaattcctgatattcagaagaatgcagcaaaagccattactaaagcagcttatgatcctgaaaatagaaaactttttcatgaacaagaggttgaaaagtgccttgtagcccttttgggttctgaaaatgatggaactaaaattgctgcttcccaagctatttcagcaatgtgtgagaattcaggcagcaaagattttttcaataatcaggggattccacagttaattcagttgctaaaaagtgacaatgaagaggtacgggaagcagcagctctagccctggcaaacctaaccacttgcaaccctgctaatgcaaaagttccattttctaacaatgcaaggaactgcgtcttcatactgacccctagtggccgattaggaggacgttgggggaggggcaaaaaaggtaatggaaggatggttctgtagtttaatgaaacgtacgttaatttaatttggaacactctccagtgtatctaagataatatttccaaaacatttttaaaagattccgatctgaaaatcatttcaacatgctgcttttagagataatattctactgctaaacgtgtgtttaacagatgcttgtgtttgactttgtcccctattaaggtgtagtcatttacaaatgttttgacgcattcattgtacc

SEQ ID NO: 460031 - DNA, 1193 bp, Homo sapiens
ggtctcatgcaccatgacagccacccatggtgagatgagggtgcaaatagggacacagcagctggacttggagcagcaggacctgcagcagctggactgggagcagcagggcttgcagcagctggaccgggaacagcaggacttgcagcagctggaccgggaacatcaggacttgcagcagctggaccgggagcagcagggcttgcagcagctggactgggagcagaaatttgtcttggaaattcccactctgctcttccccggcagtatcagcagtcgcttagatctgtggccactggagaacaggcagcgagcggccctggaggatccagggtcccaatggtggttgagaagctggttcttagtgatcactgagcaacattggcctggccttgtggggtcagaccttgcatctcagtcagccgagggagaagaagaagatggtccacacccaagtgcagggaacaccatggcagttggctgggtgcccgcgtccaggcaaggccacctcctgcatcaaggaaacatgcatttccggagtgaggaggctgaaggcagggcccagtggagagctgagccatggaaggagcagcagggcttgcagcagctagactggcagcacacggggacacagcagctggactggcagcagcagggattgcagcagctggactggcagcaggatccacagcctgaggagcaacaacagggcttacagcaattgcactgggagcagccacaagaaccacagccccccttggagcccccacaggaaccacagccacctttggagcccccacaggagccacagccccccttggagcccccacaagagccacagtcccccttggagcccccacaggagccacagctggagcaggaacaggctggcacacagcagcacacgggcttgcagcagcagacgggcacacagcagctggagccacagcccccacagccagagccatagcccccacagccggagccacaacccccacagccggagccacagcctccggagcagccacagcagcccatgattctggtagattgagggtggatcaggtagaggagcaggtgagagggaggtgcaggtgtggagctccctgagcccgggctctttatatacctgtccagatgtcaggcaggacacagggtccctttcttgtgactgtttacattatttttccaga

SEQ ID NO: 460032 - DNA, 1988 bp, Homo sapiens
cacagaagagcatgactgttagcgatcatattggaaatatggcccaaagtgacttcctttacccagagaacccaaaaaggcgggaagaagtaaatcgtcttcaccagcagcttcttgattgcttatctgacagcttcgatgtcaccaataagctgactgaggttctaaatatgcacttggggtgcaggctggcctccattgagatgaaaagagatgggaccatcaaagaaaactgtgacctcatcatccaagccattatgaaaatccaaaaggaattgcagaaggttgatgaagcactaaaagataagctagagccaaccctctatagaaaacttcaggatattaaggaaaaggaaacagacaaaattgcaatagtgcaaaaggttatttcggtcatcctgggagaagctacatctgcagccagtgcagtcgctgttaaacttgtgggctcaaatgtcacaactggcataattaacaagttggtcactgtgttagctcaaattggtgcttctctccttggtagtattggagttgctgttcttggccttggcatagatatgattgtccgtgccatcctgggagcagtggaaaaaacacagcttcaagcagccatcaaaagttatgagaagcatctggtggagttcaaatcagcctcagaaaaatataatcatgccattactgaggtcatcaatacagtgaaacaccaaatgaaatgaacagccgttttatttgccactgaagtgtttttctgcttccttttcagtaacagtgtttgcttctttgattaggttcattttctataggcttccaatatggacttaaataagataaacaatttggagagggaaactggagatgccaagactagatgactagatgagttttgagtcaacaatgcctggatcagctgatgctagaccctgtgaggtaaaaaaattttctccctggatgttttcacaccctgctctaccagatcaacattggggtaaatgctatcgtagagtagcaagtataggggttacttttctcttttctaatttcagtaaaattcttaaatttcacattgaatgcagagactttcatttctaccaccagcttcaaacatcatttagttataaggggacatactcagtaacttctgcctagacacaaactctaggccttcgaatgagacagaaatactaccatatttttgaccatcagagtaaatctggttttctgtaaactagaagagactgaaaaatggtttgtaacaatgtgcttcaattaggacaggaagctgatctgtaaacgtctactgattacacaatgtaaaccggatggatttgaaaatggtaaaaatcaaaactaaaaacatcaaggtcctgtttcagtcactgcaatcaaccctgaccaactgtgataattaaatatcgctcaagtgaatgttcaaacactgaaacatttagaagacaagaaagcaaaacacagctacacatattgcatttaggatgcagaatagaaggtcactactcaaagcatttgtcatttaaaagaaagtcataatttattataagctttcagaaaaaagaatataatttcattttcaacactagcaaaaaggaggcagctgcctttgctacatgacgcattaggtgggccatttcactaattacctgattttagaaaacgccaaaggctatggaagcctattaatggttccgctgaatctctgcagatgtgtttgttttctaaatcctttgccaaccaataattcccatgaggactcttttagtctatactgacaaaattattaatatgctgttgatgccagactgtgtttgttatagttgattctcccatccaagtacaagaaatgtattgaaataaaaactgctcagcatatcttaaaaatagtagctacatataaaattttagctacatgaaagactttaatatttccaacatacactgttttctctttctcttcttgcattgtttttcaaaac

SEQ ID NO: 460033 - DNA, 1607 bp, Homo sapiens
cggccgcccgagtcggcggcgctgggcggcctgggccccgggctgtgctgctgggtgtcagtgttctcctgcctcagcctcgcctgctcctacgtgggcagcctctacgtctggaagagcgaactgcccagggaccatcccgcggtcatcaagcgacgcttcaccagcgtcctggtggtgtccagtctctcacccctgtgcgtgctgctctggagggaactcacaggcatccaggtgcgaaggaggcggggcaaagggcaacggcggtgagagctcaggggtctttaggggaggaagcaaaactgatgccccctttcctgtggctcagccaggcacatccctgctcaccctgatgggcttcaggctggagggcattttcccagcggcgctgctgcccctgttgctgaccatggtgagtgctcctgctgtattttttcttctggtctttgttatcagcctgatgggcagtgccgtggactcttgtttttggtttttggttgatgggagacaggacttttgagatggccccagggtcctccgccccccgctcctgggcccgctgcctcacagacatgcgttggctgcggaaccaagtgatcgccccgctgacagaggagctggtgttccgggcctgtatgctgcccatgttagcaccgtgcatgggcctgggccctgctgtgttcacctgcccgctcttttttggagttgcccattttcaccatattattgagcagctgcgtttccgccagagcagcgtggggaacatcttcttgtctgctgcgttccagttctcctacacagctgtcttcggtgcctacactgctttcctcttcatccgcacaggacacctgattgggccggttctctgccattccttctgcaattacatgggtttcccagctgtttgcgcggccttggagcacccacagaggcggcccctgctggcaggctatgccctgggtgtgggactcttcctgcttctgctccagcccctcacggaccccaagctctacggcagccttcccctttgtgtgcttttggagcgggcaggggactcagaggctcccctgtgctcctgacctatgctcctggatacgctatgaactctcaccggctccccagccctccccaccaaggggtactgcaggggaagggctggctggggtccccgagatctcaggaatttttgtaggggattgaagccagagctagttgcgtcccagggaccaagagaaagaagcagatatccaaagggtgcagccccttttgaaaggggtgtttacgagcagctctcctctgcctctgaaaagctgctcggggttttttatttataaaacctctccccaccccccaccccccaacttcctgggttttctcattgtctttttgcatcagtactttgtattgggatattaaagagatttaacttggaggaacccagaacacaggctgcagccctgagggcagcagggactttgccaagcaacacagtgactccagggtccttctcggcacctgcaagtgttctgcctgctctccatcatttttggaagggctctcgtttccctgcctgtgctcttttaaaattagattcctgaaagagtatt

SEQ ID NO: 460034 - DNA, 1509 bp, Homo sapiens
cggccgcccgagtcggcggcgctgggcggcctgggccccgggctgtgctgctgggtgtcagtgttctcctgcctcagcctcgcctgctcctacgtgggcagcctctacgtctggaagagcgaactgcccagggaccatcccgcggtcatcaagcgacgcttcaccagcgtcctggtggtgtccagtctctcacccctgtgcgtgctgctctggagggaactcacaggcatccaggcacatccctgctcaccctgatgggcttcaggctggagggcattttcccagcggcgctgctgcccctgttgctgaccatggtgagtgctcctgctgtattttttcttctggtctttgttatcagcctgatgggcagtgccgtggactcttgtttttggtttttggttgatgggagacaggacttttgagatggccccagggtcctccgccccccgctcctgggcccgctgcctcacagacatgcgttggctgcggaaccaagtgatcgccccgctgacagaggagctggtgttccgggcctgtatgctgcccatgttagcaccgtgcatgggcctgggccctgctgtgttcacctgcccgctcttttttggagttgcccattttcaccatattattgagcagctgcgtttccgccagagcagcgtggggaacatcttcttgtctgctgcgttccagttctcctacacagctgtcttcggtgcctacactgctttcctcttcatccgcacaggacacctgattgggccggttctctgccattccttctgcaattacatgggtttcccagctgtttgcgcggccttggagcacccacagaggcggcccctgctggcaggctatgccctgggtgtgggactcttcctgcttctgctccagcccctcacggaccccaagctctacggcagccttcccctttgtgtgcttttggagcgggcaggggactcagaggctcccctgtgctcctgacctatgctcctggatacgctatgaactctcaccggctccccagccctccccaccaaggggtactgcaggggaagggctggctggggtccccgagatctcaggaatttttgtaggggattgaagccagagctagttgcgtcccagggaccaagagaaagaagcagatatccaaagggtgcagccccttttgaaaggggtgtttacgagcagctctcctctgcctctgaaaagctgctcggggttttttatttataaaacctctccccaccccccaccccccaacttcctgggttttctcattgtctttttgcatcagtactttgtattgggatattaaagagatttaacttggaggaacccagaacacaggctgcagccctgagggcagcagggactttgccaagcaacacagtgactccagggtccttctcggcacctgcaagtgttctgcctgctctccatcatttttggaagggctctcgtttccctgcctgtgctcttttaaaattagattcctgaaagagtatt

SEQ ID NO: 460035 - DNA, 3777 bp, Homo sapiens
ctcctcgccgcgcggttggggagcgccggggcagggaggcgggcaccaggcgcgggtccctccgggcaggggaggtaggcctgggcctgacgccggccacgcagcggcgggagagtgagcactcgggcggcggcgtcctggagacccgcgagagatggaagcggcggcgacgccggcggctgccggggcggcgaggcgcgaggagctagatatggatgtaatgaggcccttgataaatgagcagaattttgatgggacatcagatgaagaacatgagcaagagcttctgcctgttcagaagcattaccaacttgatgatcaagagggcatttcatttgtacaaactcttatgcaccttcttaaaggaaatattggaactggccttttaggacttccattggcaataaaaaatgcaggcatagtgcttggaccaatcagccttgtgtttataggaattatttctgttcactgtatgcacatattggtacgttgcagtcactttctatgtctgaggtttaaaaagtcaacattaggttatagtgacactgtgagctttgctatggaagtgagtccttggagttgtcttcagaagcaagcagcatgggggcggagtgtggttgacttttttctggtgataacacagctgggattctgtagtgtttatattgtcttcttagctgaaaatgtgaaacaagttcatgaaggattcctggagagtaaagtgtttatttcaaatagtaccaattcatcaaacccttgtgagagaagaagtgttgacctaaggatatatatgctttgctttcttccatttataattcttttggtcttcattcgtgaactaaagaatctatttgtactttcattccttgccaacgtttccatggctgtcagtcttgtgataatttaccagtatgttgtcaggaacatgccagatccccacaaccttccaatagtggctggttggaagaaatacccactcttttttggtactgctgtatttgcttttgaaggcataggagtggtccttccactggaaaaccaaatgaaagaatcaaagcgtttccctcaagcgttgaatattggcatggggattgttacaactttgtatgtaacattagctactttaggatatatgtgtttccatgatgaaatcaaaggcagcataactttaaatcttccccaagatgtatggttatatcaatcagtgaaaattctatattcctttggcatttttgtgacatattcaattcagttctatgttccagcagagatcattatccctgggatcacatccaaatttcatactaaatggaagcaaatctgtgaatttgggataagatccttcttggttagtattacttgtgccggagcaattcttattcctcgtttagacattgtgatttccttcgttggagctgtgagcagcagcacattggccctaatcctgccacctttggttgaaattcttacattttcgaaggaacattataatatatggatggtcctgaaaaatatttctatagcattcactggagttgttggcttcttattaggtacatatataactgttgaagaaattatttatcctactcccaaagttgtagctggcactccacagagtccttttctaaatttgaattcaacatgcttaacatctggtttgaaatagtaaaagcagaatcatgagtcttctatttttgtcccatttctgaaaattatcaagataactagtaaaatacattgctatatacataaaaatggtaacaaactctgttttctttggcacgatattaatattttggaagtaatcataactctttaccagtagtggtaaacctatgaaaaatccttgcttttaagtgttagcaatagttcaaaaaattaagttctgaaaattgaaaaaattaaaatgtaaaaaaattaaagaataaaaatacttctattattcttttatctcagtaagaaataccttaaccaagttatctctcttttatgctactcttttgccactcacttgagaacagaataggatttcaacaataagagaataaaataagaacatgtataacaaaaagctctctccagatcatccctgtgaatgccaaagtaaactttatgtacagtgtaaaaaaaaaaaatctcagttatgtttttattagccaaattctaatgattggctcctggaagtatagaaaactcccattaacataatataagcatcagaaaattgcaaacactagaattaattttacactctaatggtagttgatcttcatagtcaagaggcactgttcaagatcatgacttagtgtttcaatgaaatttgaaaagggactttaaaacttatccagtgcaactcccttgtttttcgtcagaggaaaaggaggcctagaaaggttaagtaacttggtcgagaccactcagccttgagatcaagaaaacctaatcttctgactcccaggccaggatgttttatttctcacatcatgtccaagaaaaagaataaattatgttcagcttaattttagtgttgaatctatttgattatattttaatactttgaaaatgaatgtgtgatttttaatagtatatgtgacctgagcagaaaatcagggaactccaagaagcctacactgtggccatataaacctcagcaagagaaagaagctatgttcttttaaaacagaatagagaccgcttgctggtgaaactcctggctagtaagatgtgtgtctagctatactatttgtggcttgagcttttttaattattaccttcctttcctgagttttgtaggcaccacattcctgaatggcagaaaatagacacctcagaaaacggaggatttgtggactctttccagccctgtggcttttcttatcacagccttttatttattatgagcagaataaaagaatcagctaggtgtggtggtctgtgcttataatcccagctactctggaggataagttgggaggatcacttgagaggccaggagcttgagaccagcctgggcagcatagtgagacctcgactctataaaacataaaaatttaaaaaaaaattagcctgatgtggcgtgtacctgtagtcccagctactgaggaggctgaagcaggaggatccctcgagcacaaaagtttcaggctgtgaaagatgctgttttgaaaagaacactaaaaatatttcattagcgttttcttgataacaaataggaaaatatatgtttacaccctgaataaattcagctgtgggtggatttttgtttttcaaaatgattttgttagtttgaatgaaacctaaatataacattcaagtcaattcttttaacatttttctttataacagaatatgaaaaacgctgtcttaaagtgttgtaacttttctgaattttcaataaaatattttgcttgcagttgccttttagataacatttttctaaggttaaatgacattgataagtgtcataagctaaaaatggcactagtataatattctcataataacattttaagcagtctttgtggttaattctgttatgctggaagttgatattgtatacttctaagttttaagagcagaagttgattaaaaatgaaaggacacactcaaaactgtgacctgaacttcctgcagcatgaatgcaggatgagccatctgcagatgctgcattcatgatttactgcttttgtaaggtcaagaatatatatcaatcattttgtttgcattacaaaattaatgctttaggaaagcattatgccaatcctgtagtaaaag

SEQ ID NO: 460036 - DNA, 1118 bp, Homo sapiens
ggatgagctgagctgcccacgtatgagtctggaccgtgcacatagtgtgaatggggtcagtggcttgtactctactgaagccctgggcttgggtgaggtcactgggggaccttagagagaagagaggaaacaggcctgagcactttcaaggtctaacggcagggagagaagagagatccctcagcaagagggaaggagagcctctccccagggacgtctgggtgctagaggtgcacagggtgctagaggtgcacagattagaaaggacagaagaggctgaaacagaatatgtctcaggactgacggaaagcatccaggagatgggagagagtcataaaatagaactgaggaaagaatgctgtgctcttactgaggaactagggaagatgggctccggagccctgcaggaagaggtgctcccaccatgcatgcacgtctactgactctttaaccctctgtgtacttcatcgttatctactgaaaaaaaaaaagtactgatgtctttatccttggagaggagaggtgtaatcgagatggagaagatgagacaaatggagcacatagaagccacacaaccttcctaaagtcacgcagctggaggccgcacagccagatggctccagaggacatgtccttaatcatgatgttgctatttagcagaaacatcgctgcagaaagtcagaccacagatggggactggtggaaaccaaacatatgactacatcagtctacaaaagcatcatggtattcccacataattcagaagcatgccaggccattcagaatctacagaccagagcaatcatgcaagataatggaagataatgacaaaacaatataatgacaagataatggaagatagtgacaaaaatattctgagcatcattgatttagtcaccctttatttcataaacatcttagaattttcttcccacctttgtttattatttggtgtgattttgtgttttttcttcctaatcttttattaatttattttaagtgacaagtaaatattgtatatatttatggtatacaaaatgtatttgtattttgatatatgcatacattgtggaatggctaaattaagctatttaacatatgcattatctcacatactt

SEQ ID NO: 460037 - DNA, 2065 bp, Homo sapiens
  misc_feature (1115)..(1115): n is a, c, g, or t
gcctagctctgggaccttgaatggtgctttaacagagcgtctgctcccagcgccaagccctcagtgcagagggggagactcaggcggccctcagacacaattcgccaaggtcgcacagcaagtcaggactgaagctaagaagtgctggagacagcagttgctttagccacaggctgtgtagaccacctgaggatgacctgggggtctgttttgtgcaccttggaacccatcggatccctccaatgacacatttgtccagagcaagacaagatcacactttgacagccctctgtcaagatccttgctccaaatctccagactagcagccaggagtctccatgctgttctgaagaagcagattcctcacccacccttcaactccttcccaggaggtaatcctcctccaaatctctggaaaagatacacctcctcttctctgataaaggctggggggtgatgcccctcccccagtttcccaataaagctatgcaagacaggagcaagggatctcacggcctgtttttgctacaaaaaccctttttcggaaaaaataataaagaaaggaatcagccaatccctcctcgatgccatcacctcttctcggtgatttttcggggaaggagtgggtgggttgctatggcaacagatgcgagctcgtctcagtaaagaagggaccttgatatttttttctctctctcattctctcagttgtgtgtgtcgagagacggggaagcacggaggaggaacgcgccggtgcgtcgcgacgggagcgcaggtgtcgagcacccgagctggagtccgcagccgccggtcatgtaccgctccaccaaggcgctccaaggcgcgccgtgaccagatcaacgccgagatccggaacctcaaggagctgctgccgctggccgaagcggacaaggtccggctgtcctacctgcacatcatgagcctcgcctgcatctacactcgcaagggcgtcttcttcgctggtggtgagcatgctggggctaccgcagatccgagctgccaggcgccggagaccctggagctgagggaacccgctggggctggatctcctgtcgccttcggggcgctgcccatggtgctgacggctgcgggcnctcctctggcgggccccacggggcttctctcagctcaagagcttgaggacatcgtagcggcactacccggctttctgcttgtgttcacagccgaggggaaattgctctacctgtctgagagtgtgagcgagcatctgggccactccatggtggacctggttgcccagggtgacagcatctacgacatcattgacccagctgaccacctcactgtgcgccagcaactcaccctgccctctgccctggacactgatcgcctcttccgctgccgcttcaacacctccaagtccctcaggcgccagagtgcaggcaacaaactcgtgcttattcgaggccgattccatgctcacccacctggagcctactgggcaggaaatcccgtgttcacagctttctgtgcccctctggagccgagaccccgcccaggtcctggccctggcccttgccctgcctcgctcttcctggccatgttccagagccgccatgctaaagacctggctctactggacatctccgagagtggctgagagtggagatattcaggcagagatggtggtgaggctacaggccaagactggaggctgggcatggatttactgcctgttatactcagaaggtccagagggacccattactgccaataactacccaatcaggtaagccacaagccaggggactagggggcagctgaggtcgtcatggaggagacacaaatcagggaactgctctggatatggacgtcggacccttaccagctgcctcttctctcctctccagtgacatggaagcctggagcctccgccagcagttgaactctgaagacacccaggcagcttatgtcctgggcactccgaccatgctgccctcattccctgaaaacattctttcccaggaagagtgctccagcactaacccactcttcaccgcagcactgggggctcccagaagca

SEQ ID NO: 460038 - DNA, 1796 bp, Homo sapiens
acacttcctgatttcaaaatctacaagttactacaaaactgaaatattttgtcatcaaaaagcatgacacctacagcagaaaaacagttagaaaagcctttggaaaatggcagtgaattgcaagaaggagatagtcttacagttccgacaaaacttagccaatatgaaaggcaaggtgaaataaaaacatcattgcatgggaaaccaaagactgacattgctgcttttgaaaatggagtgaatgatgtccagccagtgaagaagcctcattttaaaggtgtgaagaaaagaaaatggatttatgatgaaccacagaactttcctaactctggaatgcagagagcagtacaggccccaagaccccaaaataaaatgagttatcaccgcaataataaaaatcgaaatgcggagaatgcatcctatatccacgttcaaagagatgctgtcaggactgtcgcgttgaatgcaccttcccgcagcaggcccacgcatgggtcctacaataaagtccatgctaacagggaacccaaacccaacctcagtccagacaaatatacgtcaacatcatataatgattcagcctggcgaaaacgaattcctttttcaaaaacatattcaaaaagtgaaaagatatatccagagccaagaagaaatgggagcaagtaaacctggaggttgagagagagaaaaatgagaaaaaattgccagacatcatctgatttacaatcaaaaatgaaaattcaaagaatgagatactcaagtactccatgttatgtagtggatagccaaagatgataaaaatgcaaattctgaaaataagatgcaggaagtacattgtgctctttcaaaactgataaaaatgcaaattaccaacagctgccagtgtatttatgtaggtctggaattcattccgtgcattactccaaacattttaataaaatttaaaagtttgacaattaaaatcattctttaattgtaaaccaagttagattacacagattgagaagtaaaattgtgcctttaatttctgttttgcaatattccttatggaagaaacctcacttcttatttctttacctggattttaagctgggccctcagcaatgataacatataaaatgtaaatacattgaatgaagtttcagcattacagtttggtgatgaatatgttagaggaattccaatagaaatacactttaatgcatggtagaaagagacaaagattggcctattattcagggcagttgttgaacaatgttttaattggcagctacaaaatcggtctgctgaggtttgctagattcaaactgaaaaataaacattttcctaccatgaaaataaaaattatatgattatattggagaaaaggacatgtttaagaaaaaagtgtattaataacatggtgttccaaatgtcttagtgatattttaaggcattagtaactccagaagcataaatatttacaagtgaaagagagacatcatttgaaaactaattttgatttctttctgccctttttagaattgtgttttgaatagtacttttaaatttaatttttaaaattttcatcaaagtgaaccacccgcagtgactgaaacaaaaacttaaaaatttattctttaaattgaaaaacatgtttgaaagcaatataagtaattaatatttaaaatgatgtaacatttaaaatgatgtctttgtaagtgtagtatttatacttctgagtttattaaagcttagaaattcactaagactttgggatatctcatatttatatttgcatgaattttgtggttatc

SEQ ID NO: 460039 - DNA, 1094 bp, Homo sapiens
  misc_feature (2)..(2): n is a, c, g, or t
  misc_feature (6)..(6): n is a, c, g, or t
  misc_feature (10)..(13): n is a, c, g, or t
  misc_feature (15)..(15): n is a, c, g, or t
  misc_feature (17)..(18): n is a, c, g, or t
anagtnggcnnnntnanngtctaaggggaccattacctaaaatgcattcactaaatgatggatttactaagagatttgctaagtgacatgaaatacctcggttatccaaaattcacctctaaacccaaaaggagagcttatagaatcaaacagttgcctcaataccttcattatcctttattcttctactctggccctgattttgtcctgtctgactggtattttccaaagcacacatccaagctgccctggcgaaatgccctaggatactgcctaacttcccacatctgtcctggtgctcatcatcatctgctccaaccaaaggtcaaatgcatcaatctttcccagcaggatgtggacagatctgcatctgtaaaggatgctagaggagccatccaaagagtcccaccaatttctgtctgcgttcaccctcttaactggaacctgctacacaagggcatctcacaggtgacctcacgccccactaaaatctcattacttagatgttaactgctttccaaggactggctttctatttgaactgttttcacatcccaaggaaaaataagcaaataagactggctcagggaaacacagcaagtaagtgaaaaatccttgaattaaacaatttaagaagacattgagtgtgggaacttagaagagtgggtaaagtaaaaagaagaaagaaaacctcaaatacaaaatcaatgtaaacagacatcttgctcaggtggcttaccctgttgttacttatctagtatttaaatgtccaagtgtctgtttctttggagaaaaaactttatagaaagtacctccttcatagcgctgtttataagaaaatgcgcatctgacaggaagtctattttttgaggactgtgatctgcagagaaaacacttagaaggacacaatcaaagtcaaaagcctatacattttgtggataagtgatccaaacctaagacagttacaaagaaaatggctctcagctatttacagccagacttcaggccttctgtggatttctttggcattacctcactaagttaatatatcatcacttgacatttaataataaatacctgatgaaattatgcat

SEQ ID NO: 460040 - DNA, 773 bp, Homo sapiens
gtaaaacagtgaagttctcacggacgacctcattgaattcccgatctggttcactctgcaaatgagggatacaagcttgtttatttctgattggctgatgcaagtcacagtctatttcttaagtccatatgatgaaatgggtacaggtagcagttgtgttgctggtgggctggttcaggttcttgactttgctgcacaaaagaagtcttactttgagagtgagtccaacgtaaaagtaagcaagagaggttactgcaaagtgaatgtacactctgacagccgatcagagtgggctgctcaaagatattgtccgtgtgatcagcacagtcagaaagatgtggggtttccaggacaggaggtcacatgtgccatgtcttctctcagtcctgatgtccctgctgattcctctggggcatggcgagtgacgaggacaccctctaacatactttctctattgcacatggggccacaagcccagcagagggagccacgtgatggaggtgtccacctgctgaccccacagccaccacctcctccctcagactcacccgaggatttgtgggccttgctccttaccgggagtcgccttctggccttttcttcctcgtggtgaatcctcttgccaataaaatgtgccaacatcacttcctttaatgttctgatagccacttccctgtggtacaaatggattcctggtagttcttgctgccccctcatgtcctgccctaacataatgagggtatgttgcactagttgtattgtgttttgttggc

SEQ ID NO: 460041 - DNA, 178 bp, Homo sapiens
aaatgatggctggtcccattccggggggaggtgtaacaatgcagtgggaacctcaaagtgtgtctcggccgtgcctttcacattccaaacaatgcaaaagcttgaagaaaacctcagcagttgaaaccgtgatgcagttcagcaaagaagtagctcctgtccccgtaaaacagtgaag

SEQ ID NO: 460042 - DNA, 2494 bp, Homo sapiens
cacccatctattacttcactgttctgtagatcacaagtccaacttggcatggctgctgcatactttgctcaggatgtccgaggcaaaaggcaaggtataggctggttcaagttcctgtctgaaggctctgggggaatacccaattccaaatccattcaggttgtttgcatgatctggttcctctcagttaaagaactggttccccgctcttcttctgcgtctattaatgtggaggttacattgtgctgtgatgcgttttttatgtctgtttactcccacaagaatagagcttttcaaaagagaagattgtctctgtcctatttgcagtttagtcctcagtgcctagggtgcctggcacatggcaggttctccatcttcccatctgacggcttaaaagtgtggcacttcctacctcactctctctctctctcctgctgcattgtgaagaaactgcttgcttccctctcaccctctgcagtttcctgaggcctccccagccatgcggaacgctgtagaccaagacctggaattaacacatcagaagattctatgaggaaacccatttaaaaataggatgcatttttttcttttctgcacagggagaaagtttaagctctcctcactatgagttttcaagtataaaagactttttcttccacgattttgagaacaactgaggactcttgtgaccaggacaacagggaagcttgcagcaagatagctccaggttggattcatgcttcgcaccccaagggctgccagccagagaggaggagaagcaatcactcctgcagtttctgaacactacacagacgccaggtagcttcttcaggagaacagccctctgaggaggcaggaagaggaggcttatctttcagcagccggagctgctgagatctctgggcagattaagctctctctaatggatgggctccagcctggcacattcagtggagagggatccactcatccatcatcaacataatatggtcctccctgcacttcacagtgtcctcttgctattgaaaaggcttttttgccttctcaagtttctttgtcaacagtctacaggaagaagctcaggccgccaccggcagaggtgaatgcaagctcacgttttatttctgactgcttaatcattgcctcgatcactgctcaagctctgcctttgtttccaaaggttacctgtgggaaaacttctttttctatgctgaaattaatagggaggcaaagatgagtccactgataagcagagccttaaaactcacatagagaaacaactttgctggagtgtgtgtgagtgaaccactaaggaatcagatagtgtgatggcagttatcattgcaggttaagacatttctacaaatatttcgacatctccatatactcactcctttcccccctgagtggagagactcagctaccaagagaggaagctcaaaaaaaacagaagcttcaaacaaacaaccaaccaaaaaaaaaaaaaaactgtgggttcatcagaggtggtagggaagacaaaaacatgggaggagcagctgggcacggtggctcaagcctgtaatcccagcactttgcgaggctgaggtgggtggatcacctgaggtcaggagttcgagaccagcctggccaacatggtgaaaccccatctctactaaaaatacaaaaaattagccgggcgttgtggtacgcacctgtaatcccagctactccggaggctgaggcagcagaatcgcttgaacccaggaggcagaggttgcaacgagccaagatcgcaccattgcactccagcctgggcaacaagagcgaaactccatctaaaaaaaacaaacaagcaaacaaacaaaaaacacgggaggagcaataaaaaggaatccatgctttgatttttttttttagtgagaggaagggaaggctgctgcctctcacttctccctgttttgttgttcttttaagtagcatgtgtcactctgtatatatcctgtccatgtgttttcttttattattatttgtccacttgcctagaatgaaaactccatgggagcatggctatagtgtcttgttcactcctgcctctccagggcctgaaacagaagtaggtagacagagcctgaaacaaaagtaggcagtccataaactttgctgaaggaatgagtgaatgaatgaagaccccaaggatggacctcaggaaggtgagcctgggcaaaggttttcagtcctagtccatcatgaccacatagctggaatacacttatttcactttgtcacatgaattagagattcatttggggaaacaagcaactgttagagttgcagacatctctgaggggtaaatggctgttcaaatcttgcatcttaccctgatcctcactctatctgctttccaaaaacatggagctaagatcccagcactgagaagatgggcattcctagcagggggcatttaggtgtagacagcctcagtgactcctgggtttaggatcagtgagataat

SEQ ID NO: 460043 - DNA, 2472 bp, Homo sapiens
cacccatctattacttcactgttctgtagatcacaagtccaacttggcatggctgctgcatactttgctcaggatgtccgaggcaaaaggcaaggtataggctggttcaagttcctgtctgaaggctctgggggaatacccaattccaaatccattcaggttgtttgcatgatctggttcctctcagttaaagaactggttccccgctcttcttctgcgtctattaatgtggaggttacattgtgctgtgatgcgttttttatgtctgtttactcccacaagaatagagcttttcaaaagagaagattgtctctgtcctatttgcagtttagtcctcagtgcctagggtgcctggcacatggcaggttctccatcttcccatctgacggcttaaaagtgtggcacttcctacctcactctctctctctctcctgctgcattgtgaagaaactgcttgcttccctctcaccctctgcagtttcctgaggcctccccagccatgcggaacggccagatgcagtgcctcatgcctgtaatcccagcactttgggaggctaaggagggaggattgcttgagggagaaagtttaagctctcctcactatgagttttcaagtataaaagactttttcttccacgattttgagaacaactgaggactcttgtgaccaggacaacagggaagcttgcagcaagatagctccaggttggattcatgcttcgcaccccaagggctgccagccagagaggaggagaagcaatcactcctgcagtttctgaacactacacagacgccaggtagcttcttcaggagaacagccctctgaggaggcaggaagaggaggcttatctttcagcagccggagctgctgagatctctgggcagattaagctctctctaatggatgggctccagcctggcacattcagtggagagggatccactcatccatcatcaacataatatggtcctccctgcacttcacagtgtcctcttgctattgaaaaggcttttttgccttctcaagtttctttgtcaacagtctacaggaagaagctcaggccgccaccggcagaggtgaatgcaagctcacgttttatttctgactgcttaatcattgcctcgatcactgctcaagctctgcctttgtttccaaaggttacctgtgggaaaacttctttttctatgctgaaattaatagggaggcaaagatgagtccactgataagcagagccttaaaactcacatagagaaacaactttgctggagtgtgtgtgagtgaaccactaaggaatcagatagtgtgatggcagttatcattgcaggttaagacatttctacaaatatttcgacatctccatatactcactcctttcccccctgagtggagagactcagctaccaagagaggaagctcaaaaaaaacagaagcttcaaacaaacaaccaaccaaaaaaaaaaaaaaactgtgggttcatcagaggtggtagggaagacaaaaacatgggaggagcagctgggcacggtggctcaagcctgtaatcccagcactttgcgaggctgaggtgggtggatcacctgaggtcaggagttcgagaccagcctggccaacatggtgaaaccccatctctactaaaaatacaaaaaattagccgggcgttgtggtacgcacctgtaatcccagctactccggaggctgaggcagcagaatcgcttgaacccaggaggcagaggttgcaacgagccaagatcgcaccattgcactccagcctgggcaacaagagcgaaactccatctaaaaaaaacaaacaagcaaacaaacaaaaaacacgggaggagcaataaaaaggaatccatgctttgatttttttttttagtgagaggaagggaaggctgctgcctctcacttctccctgttttgttgttcttttaagtagcatgtgtcactctgtatatatcctgtccatgtgttttcttttattattatttgtccacttgcctagaatgaaaactccatgggagcatggctatagtgtcttgttcactcctgcctctccagggcctgaaacagaagtaggtagacagagcctgaaacaaaagtaggcagtccataaactttgctgaaggaatgagtgaatgaatgaagaccccaaggatggacctcaggaaggtgagcctgggcaaaggttttcagtcctagtccatcatgaccacatagctggaatacacttatttcactttgtcacatgaattagagattcatttggggaaacaagcaactgttagagttgcagacatctctgaggggtaaatggctgttcaaatcttgcatcttaccctgatcctcactctatctgctttccaaaaacatggagctaagatcccagcactgagaagatgggcattcctagcagggggcatttaggtgtagacagcctcagtgactcctgggtttaggatcagtgagataat

SEQ ID NO: 460044 - DNA, 2690 bp, Homo sapiens
cacccatctattacttcactgttctgtagatcacaagtccaacttggcatggctgctgcatactttgctcaggatgtccgaggcaaaaggcaaggtataggctggttcaagttcctgtctgaaggctctgggggaatacccaattccaaatccattcaggttgtttgcatgatctggttcctctcagttaaagaactggttccccgctcttcttctgcgtctattaatgtggaggttacattgtgctgtgatgcgttttttatgtctgtttactcccacaagaatagagcttttcaaaagagaagattgtctctgtcctatttgcagtttagtcctcagtgcctagggtgcctggcacatggcaggttctccatcttcccatctgacggcttaaaagtgtggcacttcctacctcactctctctctctctcctgctgcattgtgaagaaactgcttgcttccctctcaccctctgcagtttcctgaggcctccccagccatgcggaacggccagatgcagtgcctcatgcctgtaatcccagcactttgggaggctaaggagggaggattgcttgagcctgcttccatatcgtaaactgccttggaaccaattaccactaccagggagacaaactattgcttagaggatgctgacaggagcagcatgccaaaattggaagaatgttgtctctcagctggtgccacgaataggtcttcagcaggctgttccattccaccattctgtctggcccactgcttcttacaagattaagatagcagatcccatgggtgtagggagaaagtttaagctctcctcactatgagttttcaagtataaaagactttttcttccacgattttgagaacaactgaggactcttgtgaccaggacaacagggaagcttgcagcaagatagctccaggttggattcatgcttcgcaccccaagggctgccagccagagaggaggagaagcaatcactcctgcagtttctgaacactacacagacgccaggtagcttcttcaggagaacagccctctgaggaggcaggaagaggaggcttatctttcagcagccggagctgctgagatctctgggcagattaagctctctctaatggatgggctccagcctggcacattcagtggagagggatccactcatccatcatcaacataatatggtcctccctgcacttcacagtgtcctcttgctattgaaaaggcttttttgccttctcaagtttctttgtcaacagtctacaggaagaagctcaggccgccaccggcagaggtgaatgcaagctcacgttttatttctgactgcttaatcattgcctcgatcactgctcaagctctgcctttgtttccaaaggttacctgtgggaaaacttctttttctatgctgaaattaatagggaggcaaagatgagtccactgataagcagagccttaaaactcacatagagaaacaactttgctggagtgtgtgtgagtgaaccactaaggaatcagatagtgtgatggcagttatcattgcaggttaagacatttctacaaatatttcgacatctccatatactcactcctttcccccctgagtggagagactcagctaccaagagaggaagctcaaaaaaaacagaagcttcaaacaaacaaccaaccaaaaaaaaaaaaaaactgtgggttcatcagaggtggtagggaagacaaaaacatgggaggagcagctgggcacggtggctcaagcctgtaatcccagcactttgcgaggctgaggtgggtggatcacctgaggtcaggagttcgagaccagcctggccaacatggtgaaaccccatctctactaaaaatacaaaaaattagccgggcgttgtggtacgcacctgtaatcccagctactccggaggctgaggcagcagaatcgcttgaacccaggaggcagaggttgcaacgagccaagatcgcaccattgcactccagcctgggcaacaagagcgaaactccatctaaaaaaaacaaacaagcaaacaaacaaaaaacacgggaggagcaataaaaaggaatccatgctttgatttttttttttagtgagaggaagggaaggctgctgcctctcacttctccctgttttgttgttcttttaagtagcatgtgtcactctgtatatatcctgtccatgtgttttcttttattattatttgtccacttgcctagaatgaaaactccatgggagcatggctatagtgtcttgttcactcctgcctctccagggcctgaaacagaagtaggtagacagagcctgaaacaaaagtaggcagtccataaactttgctgaaggaatgagtgaatgaatgaagaccccaaggatggacctcaggaaggtgagcctgggcaaaggttttcagtcctagtccatcatgaccacatagctggaatacacttatttcactttgtcacatgaattagagattcatttggggaaacaagcaactgttagagttgcagacatctctgaggggtaaatggctgttcaaatcttgcatcttaccctgatcctcactctatctgctttccaaaaacatggagctaagatcccagcactgagaagatgggcattcctagcagggggcatttaggtgtagacagcctcagtgactcctgggtttaggatcagtgagataat

SEQ ID NO: 460045 - DNA, 1921 bp, Homo sapiens
cacccatctattacttcactgttctgtagatcacaagtccaacttggcatggctgctgcatactttgctcaggatgtccgaggcaaaaggcaaggtataggctggttcaagttcctgtctgaaggctctgggggaatacccaattccaaatccattcaggttgtttgcatgatctggttcctctcagttaaagaactggttccccgctcttcttctgcgtctattaatgtggaggttacattgtgctgtgatgcgttttttatgtctgtttactcccacaagaatagagcttttcaaaagagaagattgtctctgtcctatttgcagtttagtcctcagtgcctagggtgcctggcacatggcaggttctccatcttcccatctgacggcttaaaagtgtggcacttcctacctcactctctctctctctcctgctgcattgtgaagaaactgcttgcttccctctcaccctctgcagtttcctgaggcctccccagccatgcggaacgggtcttgctctgtcacccaggctggagtgcagtgacacaatgctggctcaacctcctgggctcaagagatccttccacctcggcctcctgagtagctgggatcacagaaccttccactggccactctcagcgaaaggcagctgattcagcacctggagaagaccggcaacagggctgagtttccttgcactgcagaggaggggagaggcaaggagtggacatgagcacggaggatccagggcactcccttgatggtgatgccctcgaagggctgccccgtgcccattgtacagaatgtggattccaccccacgccatgagagctctcgcgcaggcccagaccactttataagccatatttcccaccaattcctgtttctggatctgtcaggttatttcatatttctaggcccttagctttgcttcctcttccctgaacgccctttgcccacatcatcccagctctccttctcctcctgccttctgtcttctcttcctctcatttcttgtcacccaggctggagtccagtggcgtgatcacggctcactacagccttgaactcccgggctcaggtgatcctcccacctgagcctcccgagtagctgggactacagatgcacaccaccatgccagctaatttttaaaactgtttttagggatggggtcatcttcctgtgttgcccaggcttgtctcaaactcctgggctcaagtgatcctctcacctcagccttccaaagtgctgggattacaggcatgagccacaacatccagccccttttctcttttcttacccttctttcctattttcttttccattttctttccctcccttcttctttctttcctaactattaaggagtagattgaattcaaggtctttatgtgtgtcagtttttgttttccaacaaatatttcttaaaaaccaaccattgaaacgtaatggtaaccactggcccctgtctccacctccacacctaagaagccccaaatccagatgtgtccattaaaatcagtccagatcttctttaccaagtgccaatgccagcctgcacagtgcagaaagtgaatagacagtgaatgtgttcgtctaattggggtttacagtaaacaccaataaaactgtagacaactgaaaaccccaaatctaccctatccggcactcacaccagaaccacactcaagtcaataccggaggacacagattagcccgaggagcacacgcaggaccgtcggaggctcaaagcctggccgacatagcgaacgaacacgggctcaactcacaaccccagacattacttgcatgagcgtcgaacatgagggccagataaacgccacggaagtaccccgccaaataaagcagagccagcaaaatacaaacccgaaagaaacgccaggtataaaccggattaag

SEQ ID NO: 460046 - DNA, 1718 bp, Homo sapiens
tcttctcttcctctcatttctttgtcacccaggctggagtccagtggcgtgatcacggctcactacagccgtggaactcccggctcaggtgatcctcccacctgagcctcccgagtagctgggactacagatgcacaccaccattgccagctaatttttaaaactgtttttagggatggggtcatcttcctgtgttgcccaggcttgtctcatcttcctgtgttgcccaggcttgtctcaaactcctgggctcaagtgatcctctcacctcagcactttgggaggctaaggagggaggattgcttgagcctgcttccatatcgtaaactgccttggaaccaattaccactaccagggagacaaactattgcttagaggatgctgacaggagcagcatgccaaaattggaagaaaaccttccactggccactctcagcgaaaggcagctgattcagcacctggagaagaccggcaacagggctgagtttccttgcactgcagaggaggggagaggcaaggagtggacatgagcacggaggatccagggcactcccttgatggtgatgccctcgaagggctgccccgtgcccattgtacagaatgtggattccaccccacgccatgagagctctcgcgcaggcccagaccactttataagccatatttcccaccaattcctgtttctggatctgtcaggttatttcatatttctaggcccttagctttgcttcctcttccctgaacgccctttgcccacatcatcccagctctccttctcctcctgccttctgtcttctcttcctctcatttcttgtcacccaggctggagtccagtggcgtgatcacggctcactacagccttgaactcccgggctcaggtgatcctcccacctgagcctcccgagtagctgggactacagatgcacaccaccatgccagctaatttttaaaactgtttttagggatggggtcatcttcctgtgttgcccaggcttgtctcaaactcctgggctcaagtgatcctctcacctcagccttccaaagtgctgggattacaggcatgagccacaacatccagccccttttctcttttcttacccttctttcctattttcttttccattttctttccctcccttcttctttctttcctaactattaaggagtagattgaattcaaggtctttatgtgtgtcagtttttgttttccaacaaatatttcttaaaaaccaaccattgaaacgtaatggtaaccactggcccctgtctccacctccacacctaagaagccccaaatccagatgtgtccattaaaatcagtccagatcttctttaccaagtgccaatgccagcctgcacagtgcagaaagtgaatagacagtgaatgtgttcgtctaattggggtttacagtaaacaccaataaaactgtagacaactgaaaaccccaaatctaccctatccggcactcacaccagaaccacactcaagtcaataccggaggacacagattagcccgaggagcacacgcaggaccgtcggaggctcaaagcctggccgacatagcgaacgaacacgggctcaactcacaaccccagacattacttgcatgagcgtcgaacatgagggccagataaacgccacggaagtaccccgccaaataaagcagagccagcaaaatacaaacccgaaagaaacgccaggtataaaccggattaag

SEQ ID NO: 460047 - DNA, 1219 bp, Homo sapiens
cacccatctattacttcactgttctgtagatcacaagtccaacttggcatggctgctgcatactttgctcaggatgtccgaggcaaaaggcaaggtataggctggttcaagttcctgtctgaaggctctgggggaatacccaattccaaatccattcaggttgtttgcatgatctggttcctctcagttaaagaactggttccccgctcttcttctgcgtctattaatgtggaggttacattgtgctgtgatgcgttttttatgtctgtttactcccacaagaatagagcttttcaaaagagaagattgtctctgtcctatttgcagtttagtcctcagtgcctagggtgcctggcacatggcaggttctccatcttcccatctgacggcttaaaagtgtggcacttcctacctcactctctctctctctcctgctgcattgtgaagaaactgcttgcttccctctcaccctctgcagtttcctgaggcctccccagccatgcggaacgaatcaagcccaagttttccctatggatgatgcaaattcaactactgactgaccactaggaacccaatccaacaacctggtcagttccctcggcgcaggcccagcgcctcccaggcccaccttcctcacttccgtcaagcctcatggcagcatctgcccacagaggaaagagacaaaaccattaccaataaaattgtgaagttttccaaaaaaaaaaacacaaacaacaacacacacacacaacactgtttcgccccccctgcgcccccccacaaccctttctccccccatcccttggcgcccgcgggcccccacacgcccaccgccaaccacgtgcgcacaagacgtgtaccccacacagaaacacccgggccacgcaaacagcgcggcgcggaacccctcacccaataaacaaacgccccgcggggacacacacgcaacgcgttctatgaaacaaatcccacaactggccatcccgacggacaaaactaccggcgaaagccattcatcaccgacgagggcaatctccacagggagaagtcctgccaaattctccaaaatataagcccccccctacccctgtggaagacaccacaccctcaacgcgtcacagaaaccacactcaccgaccccacaacagccgccacccacgacggaaaacgaaacaagacacacaacacaaccacaccacacaaccacagataaccacga

SEQ ID NO: 460048 - DNA, 315 bp, Homo sapiens
ccattttctttccctcccttcttctttctttcctaactattaaggagtagattgaattcaaggtctttatgtgtgtcagtttttgttttccaacaaatatttcttaaaaaccaaccattgaaacgtaatggtaaccactggcccctgtctccacctccacacctaagaagccccaaatccagatgtgtccattaaaatcagtccagatcttctttaccaagccactagatgtcatattaatttcacagcagaatagggaagcccatgccggagctgaaaacctgcaacaacaaaaaagcatctaaatactgcaaa

SEQ ID NO: 460049 - DNA, 2577 bp, Homo sapiens
cacccatctattacttcactgttctgtagatcacaagtccaacttggcatggctgctgcatactttgctcaggatgtccgaggcaaaaggcaaggtataggctggttcaagttcctgtctgaaggctctgggggaatacccaattccaaatccattcaggttgtttgcatgatctggttcctctcagttaaagaactggttccccgctcttcttctgcgtctattaatgtggaggttacattgtgctgtgatgcgttttttatgtctgtttactcccacaagaatagagcttttcaaaagagaagattgtctctgtcctatttgcagtttagtcctcagtgcctagggtgcctggcacatggcaggttctccatcttcccatctgacggcttaaaagtgtggcacttcctacctcactctctctctctctcctgctgcattgtgaagaaactgcttgcttccctctcaccctctgcagtttcctgaggcctccccagccatgcggaacggccagatgcagtgcctcatgcctgtaatcccagcactttgggaggctaaggagggaggattgcttgagcctgcttccatatcgtaaactgccttggaaccaattaccactaccagggagacaaactattgcttagaggatgctgacaggagcagcatgccaaaattggaagaaggagaaagtttaagctctcctcactatgagttttcaagtataaaagactttttcttccacgattttgagaacaactgaggactcttgtgaccaggacaacagggaagcttgcagcaagatagctccaggttggattcatgcttcgcaccccaagggctgccagccagagaggaggagaagcaatcactcctgcagtttctgaacactacacagacgccaggtagcttcttcaggagaacagccctctgaggaggcaggaagaggaggcttatctttcagcagccggagctgctgagatctctgggcagattaagctctctctaatggatgggctccagcctggcacattcagtggagagggatccactcatccatcatcaacataatatggtcctccctgcacttcacagtgtcctcttgctattgaaaaggcttttttgccttctcaagtttctttgtcaacagtctacaggaagaagctcaggccgccaccggcagaggtgaatgcaagctcacgttttatttctgactgcttaatcattgcctcgatcactgctcaagctctgcctttgtttccaaaggttacctgtgggaaaacttctttttctatgctgaaattaatagggaggcaaagatgagtccactgataagcagagccttaaaactcacatagagaaacaactttgctggagtgtgtgtgagtgaaccactaaggaatcagatagtgtgatggcagttatcattgcaggttaagacatttctacaaatatttcgacatctccatatactcactcctttcccccctgagtggagagactcagctaccaagagaggaagctcaaaaaaaacagaagcttcaaacaaacaaccaaccaaaaaaaaaaaaaaactgtgggttcatcagaggtggtagggaagacaaaaacatgggaggagcagctgggcacggtggctcaagcctgtaatcccagcactttgcgaggctgaggtgggtggatcacctgaggtcaggagttcgagaccagcctggccaacatggtgaaaccccatctctactaaaaatacaaaaaattagccgggcgttgtggtacgcacctgtaatcccagctactccggaggctgaggcagcagaatcgcttgaacccaggaggcagaggttgcaacgagccaagatcgcaccattgcactccagcctgggcaacaagagcgaaactccatctaaaaaaaacaaacaagcaaacaaacaaaaaacacgggaggagcaataaaaaggaatccatgctttgatttttttttttagtgagaggaagggaaggctgctgcctctcacttctccctgttttgttgttcttttaagtagcatgtgtcactctgtatatatcctgtccatgtgttttcttttattattatttgtccacttgcctagaatgaaaactccatgggagcatggctatagtgtcttgttcactcctgcctctccagggcctgaaacagaagtaggtagacagagcctgaaacaaaagtaggcagtccataaactttgctgaaggaatgagtgaatgaatgaagaccccaaggatggacctcaggaaggtgagcctgggcaaaggttttcagtcctagtccatcatgaccacatagctggaatacacttatttcactttgtcacatgaattagagattcatttggggaaacaagcaactgttagagttgcagacatctctgaggggtaaatggctgttcaaatcttgcatcttaccctgatcctcactctatctgctttccaaaaacatggagctaagatcccagcactgagaagatgggcattcctagcagggggcatttaggtgtagacagcctcagtgactcctgggtttaggatcagtgagataat

SEQ ID NO: 460050 - DNA, 2404 bp, Homo sapiens
cacccatctattacttcactgttctgtagatcacaagtccaacttggcatggctgctgcatactttgctcaggatgtccgaggcaaaaggcaaggtataggctggttcaagttcctgtctgaaggctctgggggaatacccaattccaaatccattcaggttgtttgcatgatctggttcctctcagttaaagaactggttccccgctcttcttctgcgtctattaatgtggaggttacattgtgctgtgatgcgttttttatgtctgtttactcccacaagaatagagcttttcaaaagagaagattgtctctgtcctatttgcagtttagtcctcagtgcctagggtgcctggcacatggcaggttctccatcttcccatctgacggcttaaaagtgtggcacttcctacctcactctctctctctctcctgctgcattgtgaagaaactgcttgcttccctctcaccctctgcagtttcctgaggcctccccagccatgcggaacgggagaaagtttaagctctcctcactatgagttttcaagtataaaagactttttcttccacgattttgagaacaactgaggactcttgtgaccaggacaacagggaagcttgcagcaagatagctccaggttggattcatgcttcgcaccccaagggctgccagccagagaggaggagaagcaatcactcctgcagtttctgaacactacacagacgccaggtagcttcttcaggagaacagccctctgaggaggcaggaagaggaggcttatctttcagcagccggagctgctgagatctctgggcagattaagctctctctaatggatgggctccagcctggcacattcagtggagagggatccactcatccatcatcaacataatatggtcctccctgcacttcacagtgtcctcttgctattgaaaaggcttttttgccttctcaagtttctttgtcaacagtctacaggaagaagctcaggccgccaccggcagaggtgaatgcaagctcacgttttatttctgactgcttaatcattgcctcgatcactgctcaagctctgcctttgtttccaaaggttacctgtgggaaaacttctttttctatgctgaaattaatagggaggcaaagatgagtccactgataagcagagccttaaaactcacatagagaaacaactttgctggagtgtgtgtgagtgaaccactaaggaatcagatagtgtgatggcagttatcattgcaggttaagacatttctacaaatatttcgacatctccatatactcactcctttcccccctgagtggagagactcagctaccaagagaggaagctcaaaaaaaacagaagcttcaaacaaacaaccaaccaaaaaaaaaaaaaaactgtgggttcatcagaggtggtagggaagacaaaaacatgggaggagcagctgggcacggtggctcaagcctgtaatcccagcactttgcgaggctgaggtgggtggatcacctgaggtcaggagttcgagaccagcctggccaacatggtgaaaccccatctctactaaaaatacaaaaaattagccgggcgttgtggtacgcacctgtaatcccagctactccggaggctgaggcagcagaatcgcttgaacccaggaggcagaggttgcaacgagccaagatcgcaccattgcactccagcctgggcaacaagagcgaaactccatctaaaaaaaacaaacaagcaaacaaacaaaaaacacgggaggagcaataaaaaggaatccatgctttgatttttttttttagtgagaggaagggaaggctgctgcctctcacttctccctgttttgttgttcttttaagtagcatgtgtcactctgtatatatcctgtccatgtgttttcttttattattatttgtccacttgcctagaatgaaaactccatgggagcatggctatagtgtcttgttcactcctgcctctccagggcctgaaacagaagtaggtagacagagcctgaaacaaaagtaggcagtccataaactttgctgaaggaatgagtgaatgaatgaagaccccaaggatggacctcaggaaggtgagcctgggcaaaggttttcagtcctagtccatcatgaccacatagctggaatacacttatttcactttgtcacatgaattagagattcatttggggaaacaagcaactgttagagttgcagacatctctgaggggtaaatggctgttcaaatcttgcatcttaccctgatcctcactctatctgctttccaaaaacatggagctaagatcccagcactgagaagatgggcattcctagcagggggcatttaggtgtagacagcctcagtgactcctgggtttaggatcagtgagataat

SEQ ID NO: 460051 - DNA, 1882 bp, Homo sapiens
cacccatctattacttcactgttctgtagatcacaagtccaacttggcatggctgctgcatactttgctcaggatgtccgaggcaaaaggcaaggtataggctggttcaagttcctgtctgaaggctctgggggaatacccaattccaaatccattcaggttgtttgcatgatctggttcctctcagttaaagaactggttccccgctcttcttctgcgtctattaatgtggaggttacattgtgctgtgatgcgttttttatgtctgtttactcccacaagaatagagcttttcaaaagagaagattgtctctgtcctatttgcagtttagtcctcagtgcctagggtgcctggcacatggcaggttctccatcttcccatctgacggcttaaaagtgtggcacttcctacctcactctctctctctctcctgctgcattgtgaagaaactgcttgcttccctctcaccctctgcagtttcctgaggcctccccagccatgcggaacggccagatgcagtgcctcatgcctgtaatcccagcactttgggaggctaaggagggaggattgcttgagaaccttccactggccactctcagcgaaaggcagctgattcagcacctggagaagaccggcaacagggctgagtttccttgcactgcagaggaggggagaggcaaggagtggacatgagcacggaggatccagggcactcccttgatggtgatgccctcgaagggctgccccgtgcccattgtacagaatgtggattccaccccacgccatgagagctctcgcgcaggcccagaccactttataagccatatttcccaccaattcctgtttctggatctgtcaggttatttcatatttctaggcccttagctttgcttcctcttccctgaacgccctttgcccacatcatcccagctctccttctcctcctgccttctgtcttctcttcctctcatttcttgtcacccaggctggagtccagtggcgtgatcacggctcactacagccttgaactcccgggctcaggtgatcctcccacctgagcctcccgagtagctgggactacagatgcacaccaccatgccagctaatttttaaaactgtttttagggatggggtcatcttcctgtgttgcccaggcttgtctcaaactcctgggctcaagtgatcctctcacctcagccttccaaagtgctgggattacaggcatgagccacaacatccagccccttttctcttttcttacccttctttcctattttcttttccattttctttccctcccttcttctttctttcctaactattaaggagtagattgaattcaaggtctttatgtgtgtcagtttttgttttccaacaaatatttcttaaaaaccaaccattgaaacgtaatggtaaccactggcccctgtctccacctccacacctaagaagccccaaatccagatgtgtccattaaaatcagtccagatcttctttaccaagtgccaatgccagcctgcacagtgcagaaagtgaatagacagtgaatgtgttcgtctaattggggtttacagtaaacaccaataaaactgtagacaactgaaaaccccaaatctaccctatccggcactcacaccagaaccacactcaagtcaataccggaggacacagattagcccgaggagcacacgcaggaccgtcggaggctcaaagcctggccgacatagcgaacgaacacgggctcaactcacaaccccagacattacttgcatgagcgtcgaacatgagggccagataaacgccacggaagtaccccgccaaataaagcagagccagcaaaatacaaacccgaaagaaacgccaggtataaaccggattaag

SEQ ID NO: 460052 - DNA, 1065 bp, Homo sapiens
cacccatctattacttcactgttctgtagatcacaagtccaacttggcatggctgctgcatactttgctcaggatgtccgaggcaaaaggcaaggtataggctggttcaagttcctgtctgaaggctctgggggaatacccaattccaaatccattcaggttgtttgcatgatctggttcctctcagttaaagaactggttccccgctcttcttctgcgtctattaatgtggaggttacattgtgctgtgatgcgttttttatgtctgtttactcccacaagaatagagcttttcaaaagagaagattgtctctgtcctatttgcagtttagtcctcagtgcctagggtgcctggcacatggcaggttctccatcttcccatctgacggcttaaaagtgtggcacttcctacctcactctctctctctctcctgctgcattgtgaagaaactgcttgcttccctctcaccctctgcagtttcctgaggcctccccagccatgcggaacggccagatgcagtgcctcatgcctgtaatcccagcactttgggaggctaaggagggaggattgcttgagcctgcttccatatcgtaaactgccttggaaccaattaccactaccagggagacaaactattgcttagaggatgctgacaggagcagcatgccaaaattggaagaatggactggagccgggagtgaatggctggctgcatagttactgtggaaaccaaagatctgaaggggccctgtcaccctttggacaaacaccggcagactggcgtgcatgtctcccagggaccagggacattactgcgagtgatgtgccaatctgcagtagggtgatcacattctagggataaaactaaatttaaaaaatatttacattggcaacttgtcattttggaaagggctcaagatccagagtcagaaacctctgtaataaatgaggagccttctgtttccaagatggagaagggatggggagaacggtaatacccactttgcaggaatggcagagggatgacatgaacatactctgacatgaagctagtgctcaagaat

SEQ ID NO: 460053 - DNA, 978 bp, Homo sapiens
gtgaaaaccctgccggctggagaaagacaagagccggggatcaaagtcacgtagtctgacttcaaagcttctcaccactatgccatggtaaaggaaggaagaaatggaggaccaaagacagcagcagatggcctggagggcacaacagcaatgccagaagttaaggcagcaaggatggccatgtccatacggaggaaacacgggcacagcgaagcctgcgccgacccgattctaagggaactgcctgcctcttccaagcattccatcaatgctgtggggagagtgaagcaaactgtcctaaccagatactctggagccatctttggcttctctagcaacctagctgggacacgcaagaccaacccagatgaagtaggaatgaaagaaaaaaacttaggtgcaacacaagttccagaaagaacgaagtcagctggttctaaaataattgaggaaggcttcagggaagagatgagagagaaggataagcagagttttgaaagacaagcagagggatgtcatgagactggaaaacagcaggcacagggcgaagaggaggcgcggcagagcccaagggaagaccaagcccagggaggagaccccacctccggttctgccgggacaggaagtgagggtgaagctactgctctctggatggctgcttccagatggatgatttaaacactcttctgcatctcccagcagcagggttcttcctggctctctttctcccacctaacatctgtcccctgcaactagagcaaggagatttaataaggagaatattcccaagtcatcagactccaagaacataccaggcactgggtaaagcttcaggcagagttcttaactagggatccatgtataggggtcaggggactgtgtacctcctcccaaaatagtatgcaaaatatacaggagacgagcaaacttctggggaaagtgtaaccgtttcttcaccagattccttttttcttttct

SEQ ID NO: 460054 - DNA, 359 bp, Homo sapiens
  misc_feature (11)..(11): n is a, c, g, or t
tttttcccccnaaccaaattttatctacgagactgaagttgaaagattaagaatgaaaacatttcctgctcttgttcaaatgtaaaaacgctggcaggaaaacacaaggccaaatcaatcatttaaaaaatcatttcatttgggtaaaatgatttccttttctttcttactgggaaattgaagtagcatgtcctctgagttgcatgttttagataaaaaattgtttaattttagccttaattgtatacaaatttttgtcctgcatgaataaatgtgtaaaataccatgaattgctgtttttattcaagaataaacaagacttgaagtcagaaagtattcaagatctattttactcattt

SEQ ID NO: 460055 - DNA, 546 bp, Homo sapiens
cctcataggttcgcaggaggtcgagagagtgttcctgaactcatcctattacaggaagagaaagtgagattccagttgaatttgacaatccaaattcttcttaaacaaggacaagtagaactggaaaatttccagctagtactggagtattctgatgcaattctcatcaacaagaacataattgaagacttgaattctgtgattcggactcaaggacaaaagaaagttgctagcatgatggaaagtaaagatgtacacaaaagaatacttcagattgagtgggaacataagaaaatggagatggaaagggaagatctaaatcagaaggcttgggatattcagatgctatttttttcaagagatcgtcaaaaggtaaattctccctacccccctacatagttttaattttattcattaatgtattcattcatttaaccagtatttaataagaagcctctgtgatatcaagcatattctaagccaggagtgtttcaaaatatatctgtgagttatttttcttccaacagtttacatttgcagcctcca

SEQ ID NO: 460056 - DNA, 1296 bp, Homo sapiens
taatgatcaagccctgaaagtttgaggccaatccttaaaaaggctgtggtttagtttcccagctgatgattgtagaggttgtgggtcagaattctgttgttacatatgaagctgttcggaaatctagagaagacctggatgtgtgcaaggagcactatgacaacttactggcagaagacaaagtaaagcagaaagcagctgacttattggaaatggcaactttcctccagaagagagttgaggaggaagagaaggtgcaacaggagattgagagagtgttccatgaactcatcctattacaggaagagaaagtgagattccagttgaatttgacaatccaaattcttcttaaacaaggacaagtagaactggaaaatttccagctagtactggagtattctgatgcaattctcatcaacaagaacataattgaagacttgaattctgtgattcggactcaaggacaaaagaaagttgctagcatgatggaaagtaaagatgtacacaaaagaatacttcagattgagtgggaacataagaaaatggagatggaaagggaagatctaaatcagaaggcttgggatattcagatgctatttttttcaagagatcgtcaaaagtacctaaatgaaccaaactatgaggctctgattagtattcagattggaataatggaacaaaccattgctgttttagataagatgcacaaaaagaatgtggaaaactgcaagaaactactcaaaaaacttggaaagttcagcaatcaaaaagatatagcaaattatgccctaagctgcaatctacgagaagagttggtagctgtctcagagagaaaagacatctgtaatgcaatggggtctaaactgacttgtgaaaagattgtcaaagaacggtatgaaaacatgatgcaacagcagaagttaacaaatatttcaaaacaacaagctgaacagatttcaatactacagactgaagttgaaagattaagaatgaaaacatttcctgctcttgttcaaatgtaaaaacgctggcaggaaaacacaaggccaaatcaatcatttaaaaaatcatttcatttgggtaaaatgatttccttttctttcttactgggaaattgaagtagcatgtcctctgagttgcatgttttagataaaaaattgtttaattttagccttaattgtatacaaatttttgtcctgcatgaataaatgtgtaaaataccatgaattgctgtttttattcaagaataaacaagacttgaagtcagaaagtattcaagatctattttactcattt

SEQ ID NO: 460057 - DNA, 797 bp, Homo sapiens
aatcaattggccttgcaaaagtaggcatgaggagggaatgaacccaagggaaacttaaagaaggaggcagactgctgctgaaagcactgtgatgtgtcccaaagccaacgggcagttggttttcgatgatccaaggttagtccggacagagtccgttccgtgtgacatcaacaaccctctacggaagccacctcgctattcagacctgcacatcagtcagacgctccccaaaaccaacaaaatcaacaaggaccacatccctgtcccttaccagccagactccagcagcaacccctcctccacgacgtcctccacgccctcctcgccagcaccccccctccctcctagtgccacgccgccttctcccctacacccttccccacagtgcacacggcagcagaagaacttcaacctgccaggtacctccatgcttggggagacatgaggggtgcagcgttggaggggcagagattagggagggggtgggttcatgccagagccctgatgcagcaagtctctgcaggaaagcgaatgggtcaatgaccagagaggggcaaggaagtatgtggactgacccttatcgtaccctaagcaattacccttatatcacttatttaatctttggaacagccacaaggtaagcattatcagctcattttacagatgaagaaacagaggctcaaagaggtgcaggaactcttagagactctgtcttttggcgagctacaacccagggtcttcgcctaagtctaagtcacagaagggagccattggctctggagatgacagttgtctta

SEQ ID NO: 460058 - DNA, 2536 bp, Homo sapiens
aaactttggaaaaaatggactctctggaatggaaccaagaacaggctctcagtgcatcaataggaaggtcgtgtactccctggcagactcagctggtggggtcttctccattgacagctcatctggcatcatcatcctggagcagccactggaccgtgagcagcagtcttcgtacaacatcagcgtgcgggccactgaccagagtcctggacagtccctgtcctctctcactactgtcaccatcaccgttctggacattaatgacaacccccctgtgtttgagaggagggactacctggtgacggtgcctgaggacacctcccctggcacccaagtccttgctgtttttgccaccagcaaagatattggcacaaatgctgagatcacttatctcatccggtctgggaacgaacaagggaaatttaagatcaaccccaagacagggggtatttctgtctctgaagtcctggactatgaattatgcaaaaggttttacctggtagtggaagccaaagatgggggcaccccagctctcagcgctgtggccactgtcaacatcaacctcacagatgttaatgacaaccctcccaagttcagccaagacgtctacagtgcggttatcagtgaagacgccttggtgggagactctgtcattttgctaatagcagaagatgtagacagccagcccaacggacagattcatttttccattgtgaatggagatcgggacaatgaatttactgtagatcctgtcttgggacttgtgaaagttaagaagaaattggaccgggaacgggccgtagacagtggcattcctgcaatgtcatcaactgcaactgtcaacattgatatttctgatgtgaatgacaacagcccggtgtttacacctgccaactatactgctgtgattcaggtactgagcgtcctctacttctcagtatttctaggagctgaaagcccaactttaggaggatcaggaaatctagcccaggaaaactgtcagtgtagaggacttagagaagacagagtgatatgcatgacttggagggccacaggtggttgtgggaagcagccaaagataaggaacatgacacttacagacaccaacatgttttcagaagacaaggaaaataagccagtgggcaccagcatcttgcagctggtggtgacagacagagactcctttcacaatgggcctcccttttcattctctattttgtcgggaaatgaagaggaggagtttgtgttggaccctcatgggatcttgcggtcggctgtggtcttccagcacacagagtctctggaatacgtgttgtgtgtccaggcaaaggattcaggcaaaccccagcaagtttctcacacttacatccgcgtgcgagtcattgaggaaagcacccacaagcccacagccattcccctggaaattttcattgtcaccatggaggatgactttcctggtggggtcattgggaagattcatgccacagatcaagacatgtatgatgtgctcacatttgccctgaaatcggagcagaaaagcttatttaaagtgaacagtcacgatgggaaaatcatcgccctgggaggcctggacagcggcaagtatgtcctgaatgtgtctgtgagtgatggtcgcttccaggtacccattgatgtggtcgtgcatgtggagcagttggtgcatgagatgctgcagaacactgtcaccatccgctttgaaaatgtgtcccctgaggacttcgtggggctgcacatgcatgggttccggcgcaccctgcggaatgcagtcctcacccagaagcaggacagcctgcgcatcatcagcatccagcccgtggcaggcaccaaccaactggacatgctgtttgcggtggagatgcacagcagcgagttctacaagccagcctacctgatccagaagctgtccaatgctagaagacacctggagaatatcatgcgcatctcagccatcttggagaagaactgctcagggctggactgtcaggaacagcattgtgagcaaggcttgtcactcgattcccacgcgctcatgacctacagcacggctcgcatcagctttgtgtgtccgcgtttctacaggaacgtgcgttgcacctgcaatgtcaaagccatagctgcacagagtcacatgcccgtagtgatcgatgagaagcattgccctctctctcttttcctccgtctgacatgtggagccataaattcactgcccccttctaagaaaattgcagccagagtttttctagccagtgtgaatttggtccaaagggaccatggccagagggaggccatttgtaaaacatcctttagtgttcagtacagtagcatgctgtacaagcctgtagcctaggagccataggctgtaccatatagcctgggtgcatagtaggctgtgctatctaggtttgtgtaagcgcactctatgatgtttgcacaatgacgaaatagcccaacgatgcatttcacagaatatatccccattattaagcaattcatgaccgtaatgtgattttcctag

SEQ ID NO: 460059 - DNA, 2839 bp, Homo sapiens
tcagagctaatgctcagaatttcagtcttcagagttcttgggtcagacctttactatgaaaaggtatagtttggcagtggggcctccaaaaaaagacccaaaagttaaaggtgtccaatcagcagctgtacaagcttttcttaaaaggaaagaagaggagctgagacgaaaagccttagaggagaaaaggagaaaagaggaactagtgaaaaagcgaattgagctcaaacatgacaagaaagcaagagctatggccaagaggacaaaggataatttccatggttacaatgggattcctattgaggaaaagtcaaagaagaggcaggcaacagaaagccataccagccaaggaaccgaccgagagtatgaaatggaagaagagaatgaattcctcgagtacaatcacgcagagtcagagcaggagtatgaggaagagcaagaacctcccaaagttgaaagcaaaccaaaggtcccccttaaaagtgccccaccacccatgaacttcactgatttactcaggctggctgagaaaaagcagtttgaaccagtggaaatcaaggtagtgaagaaatcagaagagcgacctatgaccgcagaagaacttagggagcgagaattccttgaacgaaagcataggagaaaaaaacttgagacagatggaaaactacctccaactgtgtccaaaaaggcaccctctcagaaagaaagtgtgggcacaaaacttagcaaaggttctggagacaggcatccttcttccaaaggaatgccccttcctcatgctgagaagaaatcaagacccagcatggccaatgagaaacacctcgctttgtcttcatccaaatccatgccaggagagaggatcaaggcaggatctggcaatagctcccaaccctcacttcgtgagggccacgacaaacctgtttttaatggagctggaaagcctcattccagcacctcttcaccaagtgtcccaaagacttctgctagcaggactcagaaatctgctgttgagcacaaagccaaaaaatctctgtcccatcctagccattccaggcctgggcccatggtcaccccacacaataaggctaagagtccaggtgtcaggcagccaggcagcagctctagctcagcccctgggcagcccagcacaggggttgctcgacccacagttagttctggccctgtgcctaggcgccagaatggcagctccagctcaggacctgagcgatcaatcagtgggtccaagaagccaaccaatgactcaaatccctctaggcggacagtcagtggtacatgtggccctggacaacctgcaagcagctcaggtggccctgggcgacccatcagtggttcagttagttctgcaagacccttggccagctctcgtggccctggcgggcctgtgagcagtccacatgaacttcgacgaccagtgagtggcttgggccccccggggcggtctgtcagtggccctgggagatccataagtggctcaattccagctggacggactgtcagtaattcagtcccaggaagaccagtgagcagcttgggacctgggcaaacagttagtagctcaggtcccactataaagcctaagtgcactgttgtctccgaaacaatttcttccaagaatatcattagccggtccagcaatggacagatgaatggaatgaagcctcccctatctggctacagagctgcccaaggtcctcaaaggcttcccttccctactggttacaaaaggcagcgagaatatgaagaggaagatgacgatgatgatgaatacgactctgaaatggaagattttattgaagatgaaggagagcctcaggaagaaatatccaagcacattagagaaatctttggttatgaccgaaaaaaatacaaagatgaaagtgattatgccttacgttacatggaaagtagttggaaagagcagcagaaggaagaagcaaagagcttaagactgggtatgcaagaggacttagaggaaatgagacgtgaagaagaagaaatgcaacgtcgaagggccaagaagctgaagaggcgttagctgctgcttttatttttgtgaaattctagagctgctctgctgcaaggatttcctgccttcagactgaagaagcccccttatcattttagatttatacttgggtactcaaggagaaggaatgcatactgtcatttgcaggctgtcatttgagcataaaatattttcagatattttccagggtgaaatctgtaatgcagatgatataatgcccacttgtgctcttatgaagttaactgttcacagatgccagccttgatcctgatgagctatgcactctaatgtggggccactcaccagtcagccaatcttttattgttcctttgctactttgaaaggaaaaaaaaggttgtctcttgatttctgtaattcttctgctgatctgtgagtagggcactgccctgctcccaatcaaacttagtctttttatgagaaacctggaccttccatgaatgttgccagcaataaagtgacttgtcctaatctatggattgagaacttgaaaatgtagagtagaatttataactatcatatggatgtcatcctgtgactttgaagtacaaagtagaataaattctgtattcatggattggatgctgagcattcttactcattaatttaggtggctaggaattaatgaaaaaattttcaagttaaaatacaggttataacagtataatattcttttctaagttttcctttcagatttactgttatgttggctttagtgtaagacaaggtcactgtgctgattgatttttatctaaaaaaattcatttttatatc

SEQ ID NO: 460060 - DNA, 1082 bp, Homo sapiens
aaccagactcaagtcccagcagacccctaaagaaaacatcattttattctctgttttcatgcgttcagttttttcgcacttcatgtataggacccttctctattcattcaatatctgcactttcgggctactcagtggaacatcttttcaataccaagatcaaatgaaatatttttccttacacctcatcaattatataaatcattgtttctttttatcttctttttttcttaatgctgctggtttttctcacatgtctaatcgtcttcgggtttgtctcttcctatttaagaatgaaggatggggatctggtataggcatctcctctgatatactggtgtccagtactgatgtccagataggctattccaccaagcggaaattctgcatgcttgttgtctgcctatcctgttacaacatcacctccacaaggacagggaatttgcctgtgttgttcactgttatacccactccacttcctaggaaatgcctagaaatagaaggaactcagtaaatacttcctggaacagaaaccccaatcgttcatgaattctcagagcatccctttctgtgataatagagtggagaaaaacttcctgtgggtctgcaatcctatccccgcacagaaaggctgtcaccatttgaccaaaagggaggaccaggacagaaggaccataagtcaatggttttctttagtgtgctgccagcagaatcagaatcacctggaagctggggacatggatggacttggaagccattatcctcaggaaactcatgcaagaacagaaaaccaaccactgcatgttctcacttataagtgggagctgaatgatgagaacatatggatgcatcagggggaacaagacacactggggcctgttggggcatgggaggaggaagagcatcaggaataatagctaatggattctgcgcttaaaacctaggtgatgggttgatctatgcagcaaaccaccagggcacacattcacctatgtaacaaacctgtacagcctgcacaggtacccctgaacttaaaattaaagttgaagtaaaaataaaaagaaaaagtctgtgaacccttt

SEQ ID NO: 460061 - DNA, 1726 bp, Homo sapiens
tcctgctgcagatcaaaaatattcgacttggtgcttttgaaaaatgcagactccacttagctgtcctgcctctcccgtcttccctgggtcctgtctcctcttgtggggacacatggctgtctccaagctcaccctggcagacccagatgggcctggctgtggtagccttctttgattttccccaggcccctgagcagccccatctccttcgagggtcccacctggtttggctccagggacacggacagcgcagaggacagaggctgctcagcatgggagtggtccccctggcattgccttctgcgggcctcccggtggaggaggcatggctggccagtgagacaaacagcctttcttctgctccatgcaagccttgcggctggaaatttgtctccacctccacacaggtgctggcggcctgggtcctgccttggcgagagtcctgctgggcttccatggtattccgaggagcatctctgggctgtgaggagcctggcttgggcaaaagcagcagaggctgggatgagagtgagcagagtttcagggaagccacccagggcagtgctgcctacacagacagaagggctcctggtcacccatgactccggcttaccctccagcttcctgggcatcactttctgataccatgtgcaaaattttgcgttgaatttaagcaaattaggcttaatgtggatcaataaccatttccaagttcattaacgagttcccaggccctgttttatggacctttattgtttaaaggaatcctgactgcctctctatgaggggtccggaaatatgcatgcttttaacagtatgacccaaatgtgcacatttattagcgtttagctgtggactagtgctgagatgtgtttttagacagagtttcttcatcacttaaaaaaaaacctggcattggaaaaggagagcgtggagctccagccctatccttcagcttctgtctttggaaaacttagtctaaatcaaccaaagacaagctgactgcaaattactctgagctgcagtgaggtaagccatgaagtacattacaaaggtaatgtgtgtttaagaaggaactactgcagaatgtatattttcattatcaaaaacgttaagccatttatcctgaggagtcagaataatcattaatggctgggaatttatggtgccagatcttaaactaatgtgaatgattccaggtgttactaatggcttcagtgaaatgtgccagtatctaagacttctactaaatctgagataattctttgaggtagcggcatgaacagcatgggagcaagtggctatgtggaagatgtcaagccagacctgtaatgatcgccacggcgctggattgacggttgccctctcttgtctggcgctgcgtggaaagcgggtgaaggcagagaagcctgcctgctgacccatcgctctgccccatcaggagttcaatttacttcccctgacacgcagcgatgaggcggtatgggttgcatttgattggtccatgtaggttaaataaaaattggtttaatgaatatttcaaaatgccttgtctggatcagatattttaattaagggacatgcattccgcatgtgtgcggggccccctctcctccagtgtctttcatgggtgtctatagggtcttcggcttcagtggaagacaggaatgtaaaatggccaggtgtcaatgtttgtgtgggttctgaaaagctgtgatctttgtac

SEQ ID NO: 460062 - DNA, 695 bp, Homo sapiens
tcatcataatacagagggacctgttcaatgatcaatgtctcgaataagtactgtggtggcacagatgacagactccactggcagggagaagggatcagagaaggctttggaagacagcaacctctgtacagacgaccaggccagatccacatggccccgtttggtgcttggatgtctggtaaactgcctgccaaggaggaacgcagtgataaagaacaaggacttcagaatcaggtaaatctgggtgtaaatttcagtcctacaactttctacctgtggactgaccatccatccaaccattcactcatcagtaaatgtcgatatagcacctatgctgtgccagatgctgtgacggcgagcctctttgaaaaggaggaagagctcgcaaagggtgacggcagagagatgcccagaatcttgcaggaggaaggagaatgcagcctaacttgctggaaggattcaggagacgtgtgagtaagagccaagatttcccagatcagcctacagccaagataagcacagctttctacccaacctgcacctcaccacagagaatggaagaatcactcagccatcctgtatattgtagcaataatgtatggttattttttctaggcactgagttttgggatgatttgttatgcagcaacagctggctgctacagagattgtgcccaccctcacagccccctgga

SEQ ID NO: 460063 - DNA, 1708 bp, Homo sapiens
atccatcacacccatgcccagtgccacaaaaagcttcagtggtcagggagttgtcttcaggacccaggacccaggacccaggacccaccatccattcttctggccaagggtagcatggatgtgcgtgggcagtctcgaccttcattgcaagttcctgctccagctcctctgcttctgccatctccgtggcactaccacaagcccagggccagaaattttaacaatcacagcattgtttatgatgggagttgtggatcctttggagccaaagactcgaacagacatgcgagacctctaccaactgaaggtttcgccacgaagctccttagtgaggagctgccatgctgggccatccaccatctggattcctacgactcagggaatagaacactgcaccttccagaagcacttgtttcttcgtgggtacaccaccagctgagaaagaagcctcatgatgattgttgtcttatggatgcttctcattgcaggaaccatgtggaagggatataaatatcccccaggagggactccagtggaagtaagcaaggatgatcctggtgaagtaatgcagctgtgaagctcacctgaccagctgtacagttcctgttgttggtttcacataaagtaattgcacattattttgtcatattttatgttaagaagttaccgcactttttttttttttttttttttttttttgagacagagtctcgctgtgtcgcccaggctggagtgcagtggcgcgatctcggctcactgcaagctccgcctcccgggttcatgccattcccctgcctcagcctccagagtagctgggactacaggcgcctgccaccacgcctggctatttttttgtgtttttagtagagacggggtttcaccgtgttatccaggatggtctcgatctcctgacctcatgatctgcccgcctcggcctcccaaagtgctgggattacaggcgtgagccaatgtgcccggcattaccgcattttttaagatgaatgcagactagtattctgttagcttgtaacagagagacagaggttgggaagtagttgagtgatgggagacaattgggtccttctgctacatggtctctaagactggcattaagatacctagttttgcctggcgcgatggctcacacgtgtgatctcagcactttggaggcccaacacaggtggatcatctagggtcaggagttcaagaccagccttgccaacatggtgaaaccccgtctctactaaaaatacaaaaaattagctagggcgtggtgtggtggcacgtctgtagtcccagctactcgggaggcagtggttgcagtgagctgagatcggccactgcactccagcctgggtgacagagtgagactcagtctcaaaagaaaaaaaaaaaagaaccctaagcttataccatgtggggtaagaaactcatttttaatattagggttaaatactgaagtataattatcctaatccttaaaataaccttctgaagctattagcctcatcttacaaaatggcaaaaatgaagttgaggggcatgtttatcttgccaacacacacagccctgggctgcagagtcaagattaagatccaggccttctcccttcacactttcatgtgccaaggaaaagagccaaacaagagactgtgggatatccaagatcttgctgtttaaatgtctccctcacctgaaaacccaagaa

SEQ ID NO: 460064 - DNA, 712 bp, Homo sapiens
caccgaagcgggagcggccaaaatgaagtttaatccctttgtgacttccgaccgaagcaagaatcgcaaaaggcatttcaacgcaccttcccacattcgaaggaagattatgtcttcccttctttccaaagagctgagacagaagtacaacgagcgatccatgcccatccgaaaggacgatgaagttcaggttgtacgaggacactacgaaggtcagcaaattggcaaagtggtccaggtttacaggaagaaatatgttatctacattgaatgggtgcagcgggaaaaggctaatggcacaactgtccacataggcattcactccagcaaggtggttatcactaggctaaaactggacaaagacagcaaaaagatccttgaacggaaagccaaatctcgccaagtaggaaaggaaaagggcaaatacaaggaagaaacaattgagaagatggaggaataatcttatatacaagctttgattaaaacttgaaacaaaggagaaaaaaaagaagagccttatgactagagctccgagagtaaagagttggccaattttaagactgaaattctaagtgtcgtcaactttttacttccattcctgatgtccaactacctgttgagataacaggactttatattcacctttttgttgctgcaagctatttgcctaccttatgactgaaattgcagcttccccttcaaaattacattt

SEQ ID NO: 460065 - DNA, 775 bp, Homo sapiens
caccgaagcgggagcggccaaaatgaagtttaatccctttgtgacttccgaccgaagcaagaatcgcaaaaggcatttcaacgcaccttcccacattcgaaggaagattatgtcttcccttctttccaaagagctgagacagaagtacaacgagcgatccatgcccatccgaaaggacgatgaagttcaggttgtacgaggacactacgaaggtcagcaaattggcaaagtggtccaggtttacaggaagaaatatgttatctacattgaatgggtgcagcgggaaaaggctaatggcacaactgtccacataggcattcactccagcaaggtggttatcactaggctaaaactggacaaagacagcaaaaagatcctcgaacggaaagccaaatctcgccaagtaggaaaggaaaagggcaaatacaaggaagaagatcctgaacggaaagccaaatctcgccaagtaggaaaggaaaagggcaaatacaaggaagaaacaattgagaagatggaggaataatcttatatacaagctttgattaaaacttgaaacaaaggagaaaaaaaagaagagccttatgactagagctccgagagtaaagagttggccaattttaagactgaaattctaagtgtcgtcaactttttacttccattcctgatgtccaactacctgttgagataacaggactttatattcacctttttgttgctgcaagctatttgcctaccttatgactgaaattgcagcttccccttcaaaattacattt

SEQ ID NO: 460066 - DNA, 2341 bp, Homo sapiens
ctcattcattcctcttccaaagacttgctgagcaccttctaggtgccagatgcggtgctggctcctggggacatgggagtgaacaggccaggcgtggccctgaaccatcaaatagacaaccacagaaataacaacaacaaagacaaaaccgggcccttccacacagtagctggaacacaaaggaagatcagccaagcctcaacataatctcataaaaattcttcaaatatcccattgttatggattcatacatcaggaaagcagatgccaagaacctgaacaccttctactggtaacatatattttggcgagccagcctggagacaagaccactatgggcaacttcctgtctattctacctggtgtcactgtggacaacttcctatctattccacccgattcaccgcttggctacatcctccaccattgggatgaatttgaccctaacaatctaaagaaaaggcatatgattttttactgcaatattgtttgacacaattatgagctgcccaatccggaacaatgggcagtcaatgccctgctactctcagagaaatagcaggggctgaggggccaatcctagtgtgggtccccttctctatgattgatatacaacaatgtaaggaaaagctaggaagctattctgaggattccgggaagtttgcagatgggttccaaactttgaccttagcctttgatctctcatggagagacgttcaattcactctagcaacctgttgcacctcctcggaaaaggaacgaatctttgaggctgccctccgagaagtggacgaattattcacccaaaaccgcaagttattaatggcacaacgtttcattagccaatccacaccagacattagacgtaagctccaaaagctacacatggggccacaaactaaccaaaatcagcttcttggtactgccttcatggtgtataacaatcgtgacctggaggaaggagaagggaaacagagtaaagaaaaacggcaagccaaaattatgttagccatcactggtgatgccctaaatgcacaaagattgtccaagggaaactcaaagggccataaggataatgccagcaaaggctcttgcttcaaatgcaataaaagtgcgattgggcacaggaatccactaagcccccgccagtcccctgccgtcaatgtaaaagcaccagttgtggctcctggccctggagaattgactgtccctgctcccaccaaggggctcaaaataaagggacacatctggatgacaggggaaatgttaactaaataccagcccatgctcctagacaatccagatataactcttaaaacctgcaacactttaaatccagcttcattgctgcccacaggcccaataattgatcattcctgtgagcaggtcattgcacatacatatgttagccagcctgatttaaaagatgaggctctcccagattctgaagctgaccggctcacagacggcagtagttctttgtcgaatggggagcacagagctggatatgcagcagtaaatcatgacacaattattgaagcccagccagttgggtcaaaggttaccccagaaaaggctaatgaggttctaaggtcctcttaaaagaaataattccccagtttgggttacctcagggtctccaaagtgataatggctaatcctttatctcccaaataactcaaggggttgctaaggctcttggaataaaatactatttacattcagcctggaggccccaatcctctggaaaagtggaaagggttaaccaaactctaaaataagcactagctaaactatgtcaggaaacatcagaaacttgggttagcttattgctcacagcccttttaagaatttgtaatacccctagctcaaaaattaacagaagcccatataaaatgttatacagaaggccattcttaactaatgatttaattattgacccagaaagagttggtgtaattaaatacctagtcaacccagaacaattccagcgggtttacaagagtttggaattcaaaggctcctcacacttggaactaaccagcaacccaaaatcaggccaggagatagggtacttgttaaaacatggaatgagggatcacctgcccaacaattacaaccccaatagaagggacttttttcagtaatactggccacgtcttctgtggtcaaagtactagtattagatagctggatacatctttcaaggatcaaaccatcaataccagaagctccagaccaggaacctgaagttcccatcagccagtacacctgtgaaccagtggaggacctgaagtacctgtttaaaagatagccaaaagataagtaaatgcctaccaac

SEQ ID NO: 460067 - DNA, 1109 bp, Homo sapiens
gcttgatcagatttgtatattttggaaaataactgatatagtttggatatttgtcccctccaaatctcatgttgaaattccacccccagagtctcagccttgccactgcccaaagactgctgagcccctgtctgtccaccgccaccacccactctggacacagaacatccagtcatggataaaaatgagctggttcagaaggccaaactggccgagcaggctgagcgatatgatgacatggcagcctgcatgaagtctgtaactgagcaaggagctgaattatccaatgaggaaaggaatctcctctcagttgcttataaaaatgttgtaggagcccataggtcatcttggagggtcgtctcaagtattgaacaaaagacggagggagctgagaaaaaacagcagatggctcgcgaatacagagagaaaattgagacggagctaagagatatctgcaatgatgtactgtctcttttggaaaagttcttgatccccagtgcttcacaagcagagagcaaagtcttctatttgaaaatggaaggagattactaccgttacttggctgaggttgccgctggggatgacaagaaagggattgtggatcagtcacaacaagcgtaccaagaagcttttgaaatcagcaaaaaggaaatgcaaccaacacatcctatcagactgggtctggcccttaacttctctgtgttctattatgagattctgaactccccagagaaagcctgctctcttgcaaagacagcttttgatgaagccattgctgaacttgatacattaagtgaagagtcatacaaagacagcacgctaataatgcaattactgagggacaacctgacactgtggacatcagatacccaagcagacgaaggtgaagcaggagaaggaacacagttgtgacccattttactctgtataagggcagaaatggttcacattccattatttataaagttacctgctgttagcattcattatttttgctacactcattttatttgtatttaaatgttttaggcaacctaagaacaaatgtaaaagtaaagatgcagtaaaaatgaattgcttggtattcactacttcatgtatatcaagca

SEQ ID NO: 460068 - DNA, 2346 bp, Homo sapiens
tacggtgtccttataagcaatgtcgtctacagcgtcctcgttagcatgccttgtgggtgtcattagcgatgtcatatacagcatcctcattggtgatgtcttatatggtgtcctcattagcgatgttgtgtacagcgtcctcgttagcaatgccttgtacagtgtcctcgttagcaatgtcatatacagtgtcctcattagcgatggcttgtacactgtcctcattagcgatgttgtgtacagcatccttgttagcgtgccttgtacggtgtcattagcgatgtcgtatacagccgccctcattggtgatgtcttgtacggtgccgtcattagcgatgttgtgtacagtgtccttgttagcgacggcttgtatggtgtcctcgttagcgatgtcgtatacagcgtcctcattaccgatgccttgtatggtgtcctcattagcgatgtcgtgtacagcgtcctcgttagcgtgccttgtacggtgtcattagtgatgtcatatacggcaccctcattagcgatgtcatatacggagtcctcattagcgatgtcgtgtacagtgtccgccgatgtcatatacaacgtcctcattaccgatgccttgtatggtgtcctcattagcgatgtcgtgtacagcgtcctcgttagcgtgccttgtacggtgtcattagcgatgtcatatacggcaccctcattagcgatgtcgtatacggagtcctcattagcgatgtcgtgtacagtgtccacgttagcgtgccttgtgggtgccattagcaatgtcagtgtcctcgttagcgatgtcatatacaacgtcctcattaccaatgccttgtatggtgtcctcattagcgatgtcgtgtacagcgtcctcgttagcgtgccttgtacggtgtcattagcgatgtcatatatggcatcctcattagcgatgtccgatgccgtgcacggcatcctcgttagcaatgccgtgggcagcgtcctccttggcgatgccgtgggcggcgtcctccttggcgatgccctggacggcgtcctcgttggcgatgccctgggcggcgtcctcgttggcgatgccctgggcggcgtcctcgttggcgatgcccttgtcggcggcctcgttagcgatgccgtggacagcgtcctcgttagtgatatcgtgtgaggcatcctcgttagtgatgttgtgtacggtgtcctcatggggagctagaagaacacagagttaaggttttaaaaaaacacttcccctatacttattcctatcacaatcccaggatcagggtggctcttcacattgaaaccaggcaaggatgccacacctttcttggcatccagattgttttctcggcctccttttctttgtcatgcatgcatattaattgaggatggagaatatctacgcttgttcaggccagccaacatacgacagtttacttcaagacaggagacatgggttgaatgctgaaaacatgcacagccaagcccagatgccagtcttgttagctgccttcctttaccttcaagagtgggctgaagcttgtccaatctttcaaggttgctgaagactgtatgatggaagtcatctgcattgggaaagaaattaatggagagaggagaaaacttgagaatccacactactcaccctgcagggccaagaactctgtctcccatgcattgctgacccatctcagtatttcctgtgaccacctcctttttcaactgaagactttgcacctgaaggggttcccaggtttttcacctcggcccttgtcaggactgatcctctcaactactgaccatttcacctccattcatgtccatgccacatcaggctgtgttgtctagatggcatgaatctaccccaaatgtccctttctggaggaagccaccattatgctgtacctccaagcataatgatacgtccacacacaccaaggcacctcactcatgcaaggtgtgtgtcctctaacaaagtttcacgctctaaacccagataacttttgaaacccaagttctgttgattcccctactttgggtgctccatagatgctcatttgtctactaaacactgccccaggcaattaaatattccaaagtgaccagcagaatttttatgttaattctgacattgcattgttagtacaagtgtttttcccccttcaaatttatgtctttgttactgataaatgtaactgataatgcttttttcagctatgttgccaagcatatttatataaaaatatactcagattgttttcagaatttgacaaagatgatagcaacaacgataatctcatttgtcttatactaatctttatgtgttactttcatcatttcttacatatt

SEQ ID NO: 460069 - DNA, 1879 bp, Homo sapiens
cagccggtcgctggctccgccggccgccggctcccagacgcaagcggagggcggaggggaggggcaggcggcgcccgggagggaggcaccgggccgcgggccaagcctaccgggggtcacaatttgggtctgcagcagaaatgctttcagaacagacagcagcgctggggacaggatgggaatcaatgaatgtacagctggatggagcagagccccaggtggaaaggggaagccaggaagagcggccatggagaacagtaccaggacctctggagcacctgtgctgtgaccttgaagaggagccacagtcccttcaggagaaggctcagtctgctccctgggttcctgcaattccccaggaggggaacactggagactgggagatggcagctgcacttcttgcggctggatcacaggtgagctctgcttcccttggcgtctcctgtggtcccatcactgctgcctttgtattgctttcgcatcagcccattgatgagttggctcacatgatcatcaatgggcctggtaaccatcaaggatgtgtcactgtgcttctctcaggaggagtggcggagcctggacccctctcagacagacttttatggagaatatgtcatgcaggaaaactgtgggatagtagtctctctgagatttccaattcccaaactggacatgctttctcaactagaaggaggagaagaacaatgggtccctgacccccaggacttagaggagagggacattctgagggtcacatatacaggtaagaacctagaataggctttcagccacttccttcacagttcgggacatcatcattccatgttcgtttaatccctcctctgcctcagagagttccagagacaaaaggtttagagatttttttcttcaaaagcaagggagtgtaatagaatgatgtagcaggcactttgtggatttgaattctgggctgtagttgtgggaccttggaaaagtaataaaactccctttggtttcttcatctgtaaattattgtgaaaattaaatatatgaatatattagaatattagaatagaacagtgccaagcacataataagcactcaataaatgttagttgttgttattgttgatattgttgtcaacctcccacccatttcaggaatgccttgaggactgccgacaggtgtcattcagccagtgacaattgcggcacattctgtaattctctccatctatgcttagatagaaagatgctgattaatagtaatatacagtagtaaataaataatggtaataaataataacaataacatatacaatttactaagtacttaaactatgtgcaggttctgtgctatctatcttataactgccggagagagaggtattattccaattttacagaagaaatgaaggtttagggaagttaagtgggaaagctgagattccatcttaggtaatctgcctcctaagcctaggcttttaacctctatatctattgcactgtcttgtacgacattagactatgttctctcagcccttctggggtcaagtctgggccctggcaggtatcagacaacctcatttgtgacttaggcctcaagcactctcttgtgactcttctcttggggttggtatttccccttctccgcaggagatggaagtgaacatgagggggatacccctgaactagaagcagaacctcccagaatgttatccagcgtgtctgaagatactgttctctggaacccggagcatgatgagagctgggattccatgcccagcagctccagaggaatgctcctggggcccccttttcttcaggaagatagtttctcaaacctgctgtgtagcacagagatggattccctgttaagaccccacacatgcccccagtgt

SEQ ID NO: 460070 - DNA, 1875 bp, Homo sapiens
ggaggttgcggtgagccaagattgtgctactgcactccagcctgggcgacagtgagactccgtctcaaaaaaaaaaaaatgctgtggcaagggaggcaagaaagaatgttttatctgtagcattttgtgctgatagaaaaggcagggtccagtggaagaaggaggaaatggtacataatttcttcataaaaagagtaaggccagggagaagtgactgagtagacacctgtagctaaacagaggtggtgatgagtttatggtgcctccagcttctcatggccccacttgggaaattcctccagtaacattacactcactcactccttgaccatctacctttactcctctcctcatttccctgttaccaaaactatgtgccctacccagggacttctgggcagctcttttctcagatcatttctcaccctctctcctctactaacttagcctttcatactgaatcacattttccttaaaaaacagctgctgacagaagatgctacattttgtttcagggcctggtaaccatcaaggatgtgtcactgtgcttctctcaggaggagtggcggagcctggacccctctcagacagacttttatggagaatatgtcatgcaggaaaactgtgggatagtagtctctctgagatttccaattcccaaactggacatgctttctcaactagaaggaggagaagaacaatgggtccctgacccccaggacttagaggagagggacattctgagggtcacatatacaggtaagaacctagaataggctttcagccacttccttcacagttcgggacatcatcattccatgttcgtttaatccctcctctgcctcagagagttccagagacaaaaggtttagagatttttttcttcaaaagcaagggagtgtaatagaatgatgtagcaggcactttgtggatttgaattctgggctgtagttgtgggaccttggaaaagtaataaaactccctttggtttcttcatctgtaaattattgtgaaaattaaatatatgaatatattagaatattagaatagaacagtgccaagcacataataagcactcaataaatgttagttgttgttattgttgatattgttgtcaacctcccacccatttcaggaatgccttgaggactgccgacaggtgtcattcagccagtgacaattgcggcacattctgtaattctctccatctatgcttagatagaaagatgctgattaatagtaatatacagtagtaaataaataatggtaataaataataacaataacatatacaatttactaagtacttaaactatgtgcaggttctgtgctatctatcttataactgccggagagagaggtattattccaattttacagaagaaatgaaggtttagggaagttaagtgggaaagctgagattccatcttaggtaatctgcctcctaagcctaggcttttaacctctatatctattgcactgtcttgtacgacattagactatgttctctcagcccttctggggtcaagtctgggccctggcaggtatcagacaacctcatttgtgacttaggcctcaagcactctcttgtgactcttctcttggggttggtatttccccttctccgcaggagatggaagtgaacatgagggggatacccctgaactagaagcagaacctcccagaatgttatccagcgtgtctgaagatactgttctctggaacccggagcatgatgagagctgggattccatgcccagcagctccagaggaatgctcctggggcccccttttcttcaggaagatagtttctcaaacctgctgtgtagcacagagatggattccctgttaagaccccacacatgcccccagtgt

SEQ ID NO: 460071 - DNA, 465 bp, Homo sapiens
gaaatatagaattgctgttgaactaattgacagctctattttcctttcccatgagcaggatttccaattcccaaactggacatgctttctcaactagaaggaggagaagaacaatgggtccctgacccccaggacttagaggagagggacattctgagggtcacatatacaggtaagaacctagaataggctttcagccacttccttcacagttcgggacatcatcattccatgttcgtttaatccctcctctgcctcagagagttccagagacaaaaggtttagagatttttttcttcaaaagcaagggagtgtaatagaatgatgtagcaggcactttgtggatttgaattctgggctgtagttgtgggaccttggaaaagtaataaaactccctttggtttcttcatctgtaaattattgtgaaaattaaatatatgaatatattagaatattagaatagaa

SEQ ID NO: 460072 - DNA, 905 bp, Homo sapiens
cagccggtcgctggctccgccggccgccggctcccagacgcaagcggagggcggaggggaggggcaggcggcgcccgggagggaggcaccgggccgcgggccaagcctaccgggggtcacaatttgggtctgcagcagaaatgctttcagaacagacagcagcgctggggacaggatgggaatcaatgaatgtacagctggatggagcagagccccaggtggaaaggggaagccaggaagagcggccatggagaacagtaccaggacctctggagcacctgtgctgtgaccttgaagaggagccacagtcccttcaggagaaggctcagtctgctccctgggttcctgcaattccccaggaggggaacactggagactgggagatggcagctgcacttcttgcggctggatcacagggcctggtaaccatcaaggatgtgtcactgtgcttctctcaggaggagtggcggagcctggacccctctcagacagacttttatggagaatatgtcatgcaggaaaactgtgggatagtagtctctctgagatttccaattcccaaactggacatgctttctcaactagaaggaggagaagaacaatgggtccctgacccccaggacttagaggagagggacattctgagggtcacatatacaggagatggaagtgaacatgagggggatacccctgaactagaagcagaacctcccagaatgttatccagcgtgtctgaagatactgttctctggaacccggagcatgatgagagctgggattccatgcccagcagctccagaggaatgctcctggggcccccttttcttcaggaagatagtttctcaaacctgctgtgtagcacagagatggattccctgttaagaccccacacatgcccccagtgt

SEQ ID NO: 460073 - DNA, 1530 bp, Homo sapiens
cagctccacattaggagcctaattccacagccacaccccagacccttgtcattccttggaactgccactgcatggtgcacaactcatggggcaccactcaggagacaatgcatctgaagctcaggctcctgtttctaccagccctctcctctctgcctacatgcatatttgttttcctcgtagcctcttaaaaaccttcctgggcccaactttctccttaagcttcaacttcaaccacctcccctttcctttactgccaaacttcttaaaagagtattcagtacttgctgcctccacctccctcttcactccatccactgccatctggcagaggtccctccccacatccattgaaattgctcagtcgacagtcagtcatggcatcctaactgccaagtccaatggcctctttcagcgttcatccacttcctcatccttaatcaccctgctgacaggagatgagaaaaatgttggacaatccctctccagagagcttgcataatggctcccaaagggtggtcccagagcagcagcattgacattatctaggaatttgtgtgatatacattcttttttattatactttaagttctggggtacatatgcagaatgtgcaggacaaggatccagggagaactctaacattacatttgcaaacactgatgacaagagtcagtgtgaagcattctattaaccagtatgctttgtaacaagaaagcagattgctagaacaataaatttggcaggatgcaaaatatttaacctattaatttttttaaagttttctgaaagttttctatttaggaaaaagacaagtttctaaaacataaagcaagtcttttttttttaaatcaaggctttcaacaaaaaacatttccatctaactctgaggaaattcatttttaaaacttttcccaaaagccccaaaagaaaacttaactgctattataattcaccgacgcctgcacacattcaattgaatcatctgtggtaatggaaacaatgacagcagagacaaatgaaattcagactttatctcaatttagctaatacatactctttaactttgtctccccttttcattttattcaatattggttgatttcaattcaacagctctttagttttctgttgtcctttattaagattgtgaaggattaatgcctctcagcagaattcaagaaaacctgtctttatcagatgtctgagtcccttaccatcagtagacagaggtactgagttttgcctagtgctttggtgatgcttcataatgtttacaagacaccatgcgtccactccatggaaataatcatcaatgagagaagcaacatcatcctaatcagttgcacagttaaacaaaaaaaaaaaaaaaaaaaaaaaacgacatcactgaagtcaagaagcacaaaatgacaaatggtcaagttccaacagctaaaaagatccaagacattatgagcttttaatgagtgaaacatgccatgagaaagagaccttctgtcaataaatccaaatccttgttcactaatt

SEQ ID NO: 460074 - DNA, 2903 bp, Homo sapiens
gacagctgctgaatcctctgatcacacacgatgggacttggcctcatccagctcctgcagctgtcagtcctctcagacctcatccacctgcagctgtcagtcctctcagacctcatcaacctgcagctgtcagtcctctgggacctcatccacctcctgcaactggcagtcctcccggatctcatctacctgcagctgtcagtcctccgggacctcatccacctcctgcagctgtcactgtcagtcctctgggacctcatccacctcctgcagctggcagttctcccggacctcatctacctgccgctgtcagtcctccaggacctcatccacctcctgcagctgtcagtcctccaggacctcatccacctcctgcagctgtcactatcagtcctcccggacctcatctacctgcagctgtcagtcctccgggacctcatccacctcctgcaactggcagtcctcccggacctcatctacctgcagctgtcagtcctccgggacctcatccacctcctacagctgtcagtcctccgggacctcatccacctgcagctgtcagtcctctgggacctcatccacctcctgcagctgtcagtcctccgggacctcatccacctgcagctgtcagtcctctgggacctcatccacctcctgcagctggcagtcctcccggacctcatctacctgcagctgtcagtcctccaggacctcatccacctcctgcagctgtcagtcctccgggacctcatcgacctgcagctgtcagtcctctgggacctcatccacctcctgcagctgtcagtcctcccggacatcatccacctgcagctgtcagtcttctgggacctcatccacctcctgcagctggtggtcctctcggacctcatccatctcctgcaccagtaggtcctctgggatctcatccacctcctgcagctgttggtcctctgggacctcatccacctcctgcagctccttgtcctcccggaccttatccatcttctgcatgtttctgtcctccgggacctcatccatcttttatagctgcctttcctctgggacatcattcacctttttgttctgtgaggcctctgggacctccgactacatctccacttagtaatctctggatcctcagccaccccttctacctgggtggccctctggcccctcaacaaccaccttcacatgaatctcctcagctacttcaataatctccacttgtggtccctgggacttcagccacctcctccaccagggtctcttctagtacatctgccacctcctccacttgcctggcctctgctatctgaaccaactcctctgggacctcaaccagctcctctacccattgtggcctgtaagacctcaaccaccaactccacatgtaccacttggataattttgaaatttgaagagtctcctgggccatgatatcttggaaaagtctccaccatatttgatgctccatgccccgtgctccctcctctctctctcatttccagtgtttccctttagaaacatttgcagtcctatctttctgggtgtctgcttcctggaggaccagttcacaccccagggtataccaggtgtgactcctcgtacactattcaaactcaggcagatactgccttgctggacacagaagcagggttaccctttgggtagtgttgactgcacttatcaccttctaacattctgtacaatttccttcctgtataaatttcatatttgtttcccctcactagaatagaagctccaggagggcagagacttttatttctccatgtgcctagaatagtatatgacattcaggagtgcaaaaaaccaaagcaacttgtaagtgctctccacttccctgtccagcagctgctccagtgagcaccatggcagccacagaagctgccaggagaggacactttatgggaagaggactctggatggggctgtgcctcctcccaagggagcagtttcaagtttccagacaaattgaacagaaaatctagagctcccccacagcacctcttcctccacacacaacttccccaattaacatcatgcattagtgtggtacgtttgtcacacctgataagctagtattgctatattattattaactagagcctctagtttacataagggctcagtctttgtattgtgcattcaatgggttgtgacaaatatatgtcatgtatcaaccattacatacttcatgcagaatattatattttcaatcccctgaaaaaatgtgttcttcctacttatcccttccttcctctgacccccaaactttaggcagttgaaattattagcttctctatagttttgtcttttccagaatgccatattttggaattatattgtatgtagcctgttcacattggcctctttcacttagtaatatacatttacggttccttcatgttttttccatagcttgataatcatttctttttatcactgaataatattccattatatggatataccacagtttgtttatcaattcacctattggaggataactcagttacttccagtttttggcaattatgaataaagttgctgtaaacattcgtataaaggtttttgtgtggacatcagttttcaactcatttgggtaaataccaaggagctagatcatatgatatatgatttgcaaatattttctcccattctgtgggttgccctttcacctctttgatagtatcctttgaagcacaaatattttattttaattattctatttatctactttgttgtcattgcttgagtttttggtgtcatatctaagatatatgtctttttccttaagttcacattctttccatctgttgagttctggattctgcctgatgtttgcaaatgtcttttctaccacttgcattttgaacaagcct

SEQ ID NO: 460075 - DNA, 2334 bp, Homo sapiens
agtgaaatgcttcaaggatgccatttttatttgggggtctcagttccaactccctaccttgcacatgggcattacaatccaagaaccagataaatggacagttctcaaaccccaggtttactgggaaactggtgctcagatcacatctcctcatgataaagaaattctaaaatgtatagaagaatgtgtggaaccctggaatggttcctggaatgataatttagtggataccagcccgctgaagagagaccctctgcaggacatttgcaggagatacatggaagatctgaaaaagatctgtttttacagagtgaagctgttcaatccttttgtgagatttattctagcaatattcaactattttggtgcaagcctggaaaaggaacacatttgggttcaacaagatttggggtattggagggtcaaagtagccagactgacatataagaaggaaacattaccaggttttaaatggattggaagtaggataatagacctcctggaaaatgggaaagaagtcctttttgcatttgaagagtctattggttttctctgtggaacttcagttttggataaagatggggtgagtgcagctgttgtggttgctgagatggcatcttacctggaaaccatgaatataacattgaaacagcaactggttaaggtttatgaaaaatatggttatcatatttcaaaaacttcctatttcttgtgttatgaaccacctaccatcaaaagtatatttgaaaggcttcgtaattttgattctccaaaagaatatccaaaattttgtggaacatttgctatattgcatgtacgggacgttaccactggatatgacagtagccagcctaataagaaatcagtgctgcctgtgagtaaaaacagccaaatgattacatttacttttcaaaatggctgtgttgctacccttcggacaagtggaacagaaccaaagataaagtattatgcagagatgtgtgcgtcacctgaccagagtgacactgctttactggaggaagaactgaagaaactcattgatgctctgatagagaattttcttcagcctagtaagaatggactgatctggcgttctgtttaggggtacaccaatatgtcatgacactgtgtgggcatatggaacagagcaaccgagaactgcatacattgaaccttgtgttagcattctctctctatctcatctggccgagtatctttttccttttattttctttctttttggtcaactggctagactaaacaaagtataagtttgaaatgaaatggtctagagggaaatgattcaaattttttcataattcaaacaaaagttattacactaaaagtattatagtaacgtattgtccttccgttaacagaaacatcacaattcaaaagtgagttttcttattatagtgtgattaagcctagttctgtatctcgtaattgtgtatagcatggtaaaagaaaaaaaaaaagacaggtaaatgttatataattgtagggttagttaaggaaattagtccataaaattggcaagaaaatggtactttccttgattgttatgaaaaagtgtcattgtgacatcacaggtattaatttacaaattagagtatttgaaataggatatttagcatttctgtagtttagaacagatgttacagtgtgtggttttggcatgtctgtttcaggtgcccttggtgcagtataaatttactgtatgtatttaaaattctgatgtttactgaacataaaacaatagtggcaacactcctattggctttgttcttatcaaatttctcagtgccttctcagggtctggtgtgaacagaaaaaacagtgttcctgcatttaccataatttaatcagtcaatttgcagatagctaaggaaaatcttccaaaatctgtaggtgcttcctctatatcaagtgagtttgctgattttaaaatcttaggaatataaataaagatcttaataaaagcaagcttaatgtagttaaggatcttcatattagaattgtgtcatttatcaaaccttttattacagaaaaaaatctgaactgagaaaggagctctgaatttatttgacagtctaacttttgaattacatttttgtttccttgtacttggggagccaaagcacaagatctaaggaaatcttattcacatttgtccctcagagcatcttaccctaagccatagaggtataaatagtaagatgagaattgctcattgtctgactccttgcacagcatgaatttaattctagttggaaacaaagttagtgttgactactggttaccttaaagtattcaccatactatatatttatt

SEQ ID NO: 460076 - DNA, 2301 bp, Homo sapiens
agtgaaatgcttcaaggatgccatttttatttgggggtctcagttccaactccctaccttgcacatgggcattacaatccaagaaccagataaatggacagttctcaaaccccaggtttactgggaaactggtgctcagatcacatctcctcatgataaagaaattctaaaatgtatagaagaatgtgtggaaccctggaatggttcctggaatgataatttagtggataccagcccgctgaagagagaccctctgcaggacatttgcaggagatacatggaagatctgaaaaagatctgtttttacagagtgaagctgttcaatccttttgtgagatttattctagcaatattcaactattttggtgcaagcctggaaaaggaacacatttgggttcaacaagatttggggtattggagggtcaaagtagccagactgacatataagaaggaaacattaccaggttttaaatggattggaagtaggataatagacctcctggaaaatgggaaagaagtcctttttgcatttgaagagtctattggttttctctgtggaacttcagttttggataaagatggggtgagtgcagctgttgtggttgctgagatggcatcttacctggaaaccatgaatataacattgaaacagcaactggttaaggtttatgaaaaatatggttatcatatttcaaaaacttcctatttcttgtgttatgaaccacctaccatcaaaagtatatttgaaaggcttcgtaattttgattctccaaaagaatatccaaaattttgtggaacatttgctatattgcatgtacgggacgttaccactggatatgacagtagccagcctaataagaaatcagtgctgcctgtgagtaaaaacagccaaatgattacatttacttttcaaaatggctgtgttgctacccttcggacaagtggaacagaaccaaagataaagtattatgcagagatgtgtgcgtcacctgaccagagtgacactgctttactggaggaagaactgaagaaactcattgatgctctgatagagaattttcttcagcctagtaagaatggactgatctggcgttctgtttaggggtacaccaatatgtcatgacactgtgtgggcatatggaacagagcaaccgagaactgcatacattgaaccttgtgttagcattctctctctatctcatctggccgagtatctttttccttttattttctttctttttggtcaactggctagactaaacaaagtataacaaattttttcataattcaaacaaaagttattacactaaaagtattatagtaacgtattgtccttccgttaacagaaacatcacaattcaaaagtgagttttcttattatagtgtgattaagcctagttctgtatctcgtaattgtgtatagcatggtaaaagaaaaaaaaaaagacaggtaaatgttatataattgtagggttagttaaggaaattagtccataaaattggcaagaaaatggtactttccttgattgttatgaaaaagtgtcattgtgacatcacaggtattaatttacaaattagagtatttgaaataggatatttagcatttctgtagtttagaacagatgttacagtgtgtggttttggcatgtctgtttcaggtgcccttggtgcagtataaatttactgtatgtatttaaaattctgatgtttactgaacataaaacaatagtggcaacactcctattggctttgttcttatcaaatttctcagtgccttctcagggtctggtgtgaacagaaaaaacagtgttcctgcatttaccataatttaatcagtcaatttgcagatagctaaggaaaatcttccaaaatctgtaggtgcttcctctatatcaagtgagtttgctgattttaaaatcttaggaatataaataaagatcttaataaaagcaagcttaatgtagttaaggatcttcatattagaattgtgtcatttatcaaaccttttattacagaaaaaaatctgaactgagaaaggagctctgaatttatttgacagtctaacttttgaattacatttttgtttccttgtacttggggagccaaagcacaagatctaaggaaatcttattcacatttgtccctcagagcatcttaccctaagccatagaggtataaatagtaagatgagaattgctcattgtctgactccttgcacagcatgaatttaattctagttggaaacaaagttagtgttgactactggttaccttaaagtattcaccatactatatatttatt

SEQ ID NO: 460077 - DNA, 1027 bp, Homo sapiens
cttttcgttatatgtaaagattatgtggtctcaactaggccaaccagacatttggattgtgggtttcatacgtgggtctctggctgtactctgccacaatcatttaattaagggttgtcttgtgcatccagcatctcagaaatggtctcctgagaaaaaaatgccttcatttgtccttgtactttcctctctggagcttgagtaccatggtggtcctacagaagaatgcaaagggtggggaggcagacattcattcagcaggtgtttactgagcacttgttatatgccaggctatgctctgggtgttagggagatcatggggaacaagaagttggaagagtttgccatcacagagcatacatttctggagtgcttgagaaagaggtactggctaaagactgtctgggctgggcagaaaatgatcgtggctttcttcttcatcacaaacccagatcccaaaaccagtatggggggatgggggatgtcctattgaaagccagactggaactaaccccgtcccctccctcacaacactttttccgcacgtccattagtacacttatcaaccttagcattggatcagagttatttttgtctgtttgtcttcccccatgagattgtaaatttctagatactggacctgggcatttccccctctttgtggagagatttttaaccttttgtggatcacatacatccgtaagaatctgatgaagaggccaggcacggtggctcatgcctgcaatccagcactttgggagactaaggtaggaggatggcttgagcccaggagtttgagaccagcatgggcaacatagcgagaccctgtctctacataaaatttaaaaattagcccaggccaagcatggtggcacacacctgtaatctcagcattttgggaggctgagatgggtggatcacttgagtccaggagttcaagatcagcttgggcaacatcgtgaaaccctgtctacaaaaaatataagaattagctggaagtggtggcactactatagtcccagctact

SEQ ID NO: 460078 - DNA, 1528 bp, Homo sapiens
ggtttatatcccgatcattgtccatcctgctgtgctctcaggtgataggtgattggctgttcctttacctcctatgaattctcggggctccatgggtgtaggaccctctgagtcatgtacgggatataatctcctggtgtgccgtttgctaagaccattggaaaagcgcagtattaggattggcaatgtctgctgggagctctactgcctggaacatggcatccagcccgatggccagatgccaagtgacaagaccattgggggaggagatgactccttcaacaccttcagtgagacgggtgctggcaagcatgtgccccgggctgtgtttgtagacttggaacccatggtcattgatgaagtttgcactggcacctaccgccagctcttccaccctgagcagctcatcacaggcaaggaagatgctgccaataactatgcccgagggcactacaccattggcaaggagatcattgaccttgtgttggaccgaattcgcaagctggctaaccagtgcactggttttcagggcttcttggttttccacagctttggtgggggaactggttctgggttcacctccctgctcatagaacgtctcttagttgattatggcaagaagtccaagctggagttctccaattacccagcgccccaggtttccacagctgtagttgagccctacaactccatcctcaccacccacaccaccctggagcactctgattgtgccttcatggtagacaatgaggccatctgtgacatctgttgtagaaacctcaatatcgagcgcccaacctacactaaccttaaccaccttattagccagattgtgtcctctatcactgcttccctgagatttgatggagccctgaatgttgacctgacagaattccagaccaacctggtaccctactcccacatccacttccctctggcgacatatgcccctgtcatttctgctgagaaagcctaccatgaacagctttctgtagcagagatcaccaatgcttcctttgagccagccaaccagatggtgaaatgtgaccctcgccatggtaaatacatggcttgctgcctattgtgccatggtgatgtggttcccaaagatgccaatgctgccattgccaccatcaagaccaagcgtagcatccagtttgtagattggtgccccactggcttcaaggcctgggctcgcctggaccacaagtttgacctgatgtatgccaagcgtgcctttgttcactggtacgtgggtgaggggatggaggaaggcgagttttcagaggcccgtgaagacatggctgcccttgagaaggattatgaggaggttggtgtggattctgttgaaggagaggaggctgaggatgaagggaaatagggtgttgttgtttaatggttatagtttcacttttgcaagatgaaaaagttttggagattggtgcacagcaacatgaatatgtttaacactactgaactgtacacttaaaatggttgttggtaaattttatgttctgtgtattttatc

SEQ ID NO: 460079 - DNA, 1513 bp, Homo sapiens
atgagctggcacaccagcggcatgggcggctgccctgggctcgcctcttccagcccagcatccagctggcccgccagggcttccccgtgggcaagggcttggcggcagtcctggaaaacaagcggaccgtcatcgagcagcagcctgtcttgtgggggcattgtgacagctgaggacctgaacaactactgtgctgagctgatcgagcacccgctgaacatcagcctgggagacgcggtgctgtacatgcccagtgcgcggctcagcgggcccgtgctggccctcatcctcaacatcctcaaagggtacaacttctcccgggagagcgtggagacccccgagcagaagggcctgacgtaccaccgcatcgtagaggctttccggtttgcctacgccaagaggaccctgcttggggaccccaagtttgtggatgtgactgaggccagctctggggtctcagcaggtggtccgcaacatgacctctgagttcttcgctgcccagctccggtcccagatctctgaccacaccactcacccgatctcctactacaagcccgagttctacacgctggatgacgggggcactgctcacctgtctgtcgtcgcagaggacggcagtgctgtgtccgccaccagcaccatcaacctctactttggctccaaggtctgctccccggtcagtgggatcctgttcaataatgaatggacgacttcagctctcccagcatcaccaatgagtttggggcacccccctcacctgccaatttcatccagccagggaagcagccgctcttgtccatgtgcccgacgatcatggtgggccaggacggccaggtccggatggtggtgggagctgctgggggcacgcagatcaccacagacactgcactggtatgtgtcaccccttttctccctggccctgcccactctgcacagcccccaagccacgctgatcacactcccatgccccaggccatcatctacaacctctggttcggctatgacgtgaagagggccgtggaggagccccggctgcacaacaagcttctgcccaacgtcacgacagtggagagaaacattgaccagctccaccttgatgctgactaggctgggccatgcggagagggttaggggatagagatgggagctggggagcagggctccactctgggaggggggcagccttgccggatccagggcagagttaagcggccccagctctgctttcccagagctgctgagaacctggggaatggtgtggaggttccagggagccctgcccctacctggcaaccgcagtgcagcacgcaccaagttctcctgcacattgcgacagtgtgaccatgggctctggcgggcggtagctatctggcctgtctgtcgatccatcttcgtgtctgtcttcagcccccacctgtttgtccatctgtccaattacctgccccatttgacccccggcctttgcccacgccgctgttgctgctgactccaaggtcttctcaaatattgtacg

SEQ ID NO: 460080 - DNA, 1119 bp, Homo sapiens
tctggcactagatgcaccctgcctccttatataagagggggcgggagacaagccctatcagcacatcccagaaaatgggaaaccgaatcacccaggggatggcaaggaatgaccagagggaaagttccagttctgtccaacatgcactaccagccccattttggaaaagaacagatttaatagacctcaccaagacaagaattgtttttcgtcaaaggaaatcaaaggaacaaacaagaggcagtgaccaccagagacttcaccttttgggaaacgtggctgcactgctggaggaagaacttgatcatgacgggcaatgcttggaagtaaagaagcatctgctgccttggaaaggcttggtcagggcaatcattgtcacaggccatgttttttctctgactatctcttggaatttcagagtgactaagtgattactacaattagagcaagaggcggtgtcttccagaagtcggtgtgggcagcaccaaaccatccaccatgcatcagagaaaagccagacagctggaaggctctattcccaggccactctccagtcctcaaacatgtcaccatctctcatgcctccttactgggcccatgctgtctccttgaccaggaatgtcctccaccccgatcccatccccatagcccccttcactgtaagatctgggcccagcaaattgcccagctcctcttctctgaatgcttctttaatgtctctgagaaggagttccttcctcctttactgtccatctcttccaccacatgaggggtttgggggaggtctttgaagacaagggacccttcctcattcatatttgaatactgagcccaagcacacgcccctagcatctgcaatacacacatgtcaaggtgaatggggagatagatgccaagatccttgagcgctgcaaatcttcactgccaacttcaactactccaaaataaagtcaaaattttaaaagtaagctttgatgactcaagtgactaattttatggacaagggccccttaatgaaatctaagaggaggaatgtggtgacataagcaggacatggctgtgagacactgagcaaacagtttatcctccctgagcttcgattttctcatctgtaaaaac

SEQ ID NO: 460081 - DNA, 2463 bp, Homo sapiens
ggatggactctgaggacactatgctgagtgaaataagccagacacaaaaagacaagtactgaatgattccacacgtaccaggtcccaagagtcgtcagattcagagacagaaggtaggagggcaggtgccaggagctggagaggacaatggggagtttaatagggacacagtttccatttggggagatgagaaatcatggaggcagatgctgatggcggctgcatgacagtgtgaatatgcttagtgtgaatatactcagtgtgaatacgctcagtgtgaatatgctgagtatgctcggtgtgaatatgctcagtgtgaatatgctcagtgtgaatatgctcggtgtgaatacgctcggtgtgaatacgctcggtgtgaatatgctcggtgtgaatatgctgtgtgaaaatgctcagtgtgaatacgcttggtgtgaatacgcttggtgtgaatatgcttgtaatatgctcggtgtgaatatgctttgtgtgaatatgctttgtgtgaaaatgcttagtgtgaatacgctcagtgtgaatacgctcggtgtgaatatgctcggtgtgaatatgctcggtgtggtgtgaatatgcttgtaatatgctcggtgtgaatatgctttgtgtgaaaatgcttagtgtgaatacgcttagtgtgaatacgctcggtgtgaatatgctcggtgtgaatacgctcagtgtgaatacgcttagtgtgaatacgctcggtgtgaatatgctcggtgtgaatatgctcggtgtggtgtgaatatgcttgtaatatgctcggtgtgaatatgctcagtgtgaaaatgcttagtgtgaatacgcttagtgtgaatatgcttggtgtgaatatgctcggtgtgaatatgcttggtgtgaatatgcttggtgtgaatatgcttgtaatatgctcggtgtgaatatgctttgtgtgaatatgctgtgtgaatatgctcagtgtgaaaatgcttagtgtgaatacgcttagtgtgaatatgcttggtgtgaatatgctcggtgtgaatatgcttggtgtgaatatgcttgtaatatgctcggtgtgaatatgctcagtgtgaaaatgcttagtgtgaatacgcttagtgtgaatatgcttggtgtgaatatgctcggtgtgaatatgcttggtgtgaatatgcttggtgtgaatatgcttgtaatatgctcggtgtgaatatgctttgtgtgaatatgctgtgtgaatatgctcagtgtgaaaatgcttagtgtgaatacgcttagtgtgaatatgcttggtgtgaatatgctcggtgtgaatatgcttggtgtgaatatgcttgtaatatgctcggtgtgaatatgctttgtgtgaatatgctgtgtgaatatgctcagtgtgaaaatgcttagtgtgaatacacagtgtgaatacgcttagtgtgaatatgctcggtgtgaatatgcttagtgtgaatacgctgtgaatacgcttagtgtgaatatgctcggtgtgaatatgctcggtgtggtgtgaatatgcttgtaatatgctcggtgtaaatatgctcagtgtgaaaatgcttagtgtgaatacgcttagtgtgaatatgctcggtgtgaatatgcttggtgtgaatatgcttgtaatatgctcggtgtgaatatgctttgtgtgaatatgctttgtgtgaatatgctcagtgtgaaaatgcttagtgtgaatacgcttagtgtgaatatgctcggtgtgaatatgctcggtgtgaatatgcttagtgtgaatacgctgtgaatacgcttagtgtgaatatgctgtgtgaatatgcttagtgtaactatgcttagtggcactgaactgggtaggaggccacgtgagacagaggcagaaatcggagggaagtggctgcaagccaaggaatgcctggagcccccagatgacgaggaagggtccccacataaggtctggtgttctggtccttggggagggcagcccctgctgaaaaggggcaggttgagacccagggaccacttcaggccctcgctggcagcccccaggctgggggcagcagactctagcaactctggccagtgcctgcacctgaggccccatctccaggcgttccctcttgtcctcccagccctgcacccgccttgctcagtgaggcactgtcctccctcctcggactggcttccagccaggcaggcactggtgagggccggtgtgggcagccctgccatgcccagggtctgggttctgaggaggtgaagcttctccccatgtcccagatacagaaactgagacctagggagatttggaaacttggtggacaccacagacttcttgaggagctcgacaagggtgatctgtgtgggtccgccctgagtggggtcctggacacagctgtagctgccccgtttctcctgggctgggctgggctgggccaggctgttgggttgtcatggtaagtaacatcc

SEQ ID NO: 460082 - DNA, 1113 bp, Homo sapiens
ctgcagtagcatgaagaggtctgaggaagctgtgcgtccctcaagaaagcaattctttattgcccatcaaagatgaatccataggggatcattaacaaggagatcatcccagagagcagcttctagaatcaccaaccaagtttccttcatttctattcagcctcatgaaataaagaaataaagaaaacaaacaagtaaataaaaacaagatctttatggatgtggcagaaagctttgcaagccaagaaagtcttctatccaggtgatgcaaataactgtaaaacttcagacttcttgaactacaaagatgaactctgccaacccaagttctagtacttcctctactcccagcctgacccccactgtttcttggtttcctcactccttctctttctgtttgactcttgagagtaataaactcagccaagtcctactacttgagcccatatttaaatgcagaacaatttggccttcagtttattcttcccccttcttccagactctgcacttcatggtggttgggggttctcttatttacaaccaaagaagaagaagaagaagaataaggaggaggaggaggacgaggaggaggaggaggggaggaggaggagggggaggaggaggaggaggaagaagaagaagaggaagaggaagaggaagaagaagaagaagaagaagaggaagcagcagcagcagaagcagcagcagcagcagcagcagcttgagggccccctctccttcccaaaaccataccactacctggaaagcttgctcgggataaggacaattgaggaaggagctctaacctccaatttttcaagagtaataaagacaaaagagaacctgatatttgatctaacaagactaaaaagagcaaaacaagagaaggagagaagaggaggaggtggagacagagaagtagagataaaaaaaaaacagaagagttggaggagggagagaataaaagcttgggagttttaaatttcagaaaaatatctccccattgataaataatgagcaaatgcaggacacttaagtagtgttcccatcagtagtgtgaaccctgtcagcactaaccagctggtccttgtctgttttgcagtcaaagaaaac

SEQ ID NO: 460083 - DNA, 1092 bp, Homo sapiens
ctgcagtagcatgaagaggtctgaggaagctgtgcgtccctcaagaaagcaattctttattgcccatcaaagatgaatccataggggatcattaacaaggagatcatcccagagagcagcttctagaatcaccaaccaacctcatgaaataaagaaataaagaaaacaaacaagtaaataaaaacaagatctttatggatgtggcagaaagctttgcaagccaagaaagtcttctatccaggtgatgcaaataactgtaaaacttcagacttcttgaactacaaagatgaactctgccaacccaagttctagtacttcctctactcccagcctgacccccactgtttcttggtttcctcactccttctctttctgtttgactcttgagagtaataaactcagccaagtcctactacttgagcccatatttaaatgcagaacaatttggccttcagtttattcttcccccttcttccagactctgcacttcatggtggttgggggttctcttatttacaaccaaagaagaagaagaagaagaataaggaggaggaggaggacgaggaggaggaggaggggaggaggaggagggggaggaggaggaggaggaagaagaagaagaggaagaggaagaggaagaagaagaagaagaagaagaggaagcagcagcagcagaagcagcagcagcagcagcagcagcttgagggccccctctccttcccaaaaccataccactacctggaaagcttgctcgggataaggacaattgaggaaggagctctaacctccaatttttcaagagtaataaagacaaaagagaacctgatatttgatctaacaagactaaaaagagcaaaacaagagaaggagagaagaggaggaggtggagacagagaagtagagataaaaaaaaaacagaagagttggaggagggagagaataaaagcttgggagttttaaatttcagaaaaatatctccccattgataaataatgagcaaatgcaggacacttaagtagtgttcccatcagtagtgtgaaccctgtcagcactaaccagctggtccttgtctgttttgcagtcaaagaaaac

SEQ ID NO: 460084 - DNA, 1786 bp, Homo sapiens
ctcaccgggaacatgagtggaagagcccgagtgaaggccagaggcatcgcccgcagccccagtgccacagaagtggggcgcatccaagcctcgccattgcctagatctgttgatcttagtaacaatgaagcatcctctagcaatggcttcttgggaacaagcaggatctcaaccaacgataaatatgggatatcttctggtgatgctggaagtaccttcatggaaagaggtgtgaaaaacaaacaggactttatggatttgagtatctgtaccagagaaaaattggcacatgtgagaaattgtaaaacaggttccagtggaatacctgtgaaactggttacaaacctctttaacttagattttccccaagactggcagctataccagtaccatgtgacatatattccagatttagcatctagaaggctgagaattgctttactttatagtcatagtgaactttccaacaaagcaaaagcattcgacggtgccatcctttttctgtcacaaaagctagaagaaaaggtcacagagttgtcaagtgaaactcaaagaggtgagactataaagatgactatcaccctgaagagggagctgccatcaagttctcccgtgtgcatccaggtcttcaatatcatcttcagaaagatcctcaaaaagttgtccatgtaccaaattggacggaacttctataatccttcagagccaatggaaattccccagcacaatgctgatgtgagttacaaagtcctccggaatgagacggttctggaattcatgactgctctctgtcaaagaactggcttgtcctgtttcacccagacgtgtgagaagcagctaatagggctcattgtccttacaagatacaataacagaacctactccattgatgacattgactggtcagtgaagcccacacacacctttcagaagcgggatggcaccgagatcacctatgtggattactacaagcagcagtatgatattactgtatcggacctgaatcagcccatgcttgttagtctgttaaagaagaagagaaatgacaacagtgaggctcagctcgcccacctgatacctgagctctgctttctaacagggctgactgaccaggcaacatctgatttccagctgatgaaggctgtggctgaaaagacacgtctcagtccttcaggccggcagcagcgcctggccaggcttgtggacaacatccagaggaataccaatgctcgctttgaactagagacctggggactgcattttggaagccagatatctctgactggccggattgtgccttcagaaaaaatattaatgcaagaccacatatgtcaacctgtgtctgctgctgactggtccaaggatattcgaacttgcaagattttaaatgcacagtctttgaatacctggttgattttatgtagcgacagaactgaatatgttgccgagagctttctgaactgcttgagaagagttgcaggttccatgggatttaatgtggactaccccaaaatgtgagaatacattgaattttgttcatatattaatttggtttggttagaaggaaattcatagttacagtgagtagaaatgttttcagagttcattccctcagtgagaattggaatcaattgggtgagtcagtgtgaagatatgttttcagaggaacagcaaagccatttccttagattttcatatttattctcattaggaaggaaaatgacataaaattagtttatatctaattagaggatttaaagacttgaagacactaatatttgatttt

SEQ ID NO: 460085 - DNA, 1660 bp, Homo sapiens
gtcctgggcaccgggcgagagtgtgagaggagcggacgcccaggagggagccgaggacgcgcggcgggtagggggttgggtcggacctgaacccctaaaagcggaaccgcctcccgccctcgccatcccggagctgagtcgccggcggcggtggctgctgccagacccggagtttcctctttcactggatggagctgaactttgggcggccagagcagcacagctgtccggggatcgctgcacgctgagctccctcggcaagacccagcggcggctcgggatttttttgggggggcggggaccagccccgcgccggcaccatgttcctggcgaccctgtacttcgcgctgccgctcttggcttctgggcactctccgcccggcggaccgctgaccatggctggcctgccccgcgcccagcgcgcgcccggtgcccagtccgccgccgcacttctcctcggaaagcgcctgagtttcagccgggcggagcgggtggctggagccgggggtggcccgggagcccgggtcgttgctcaggccaggatgccccggggcggagggccgacggggcgggaaaatggactcccggatggtcgagaggtggacccgctcccagagcagggcgcccccgaaggctggtcaagcatccctgacccgggcgcgcgccctcgcccggagcaggggcggccggggtccccgcccgccgcactcaggctccctcccctctgccccgcagacttgctcctgtcggccgaagtgagcggcggagaccgcctggattgcgtgaaagccagtgatcagtgcctgaaggagcagagctgcagcaccaagtaccgcacgctaaggcagtgcgtggcgggcaaggagaccaacttcagcctggcatccggcctggaggccaaggatgagtgccgcagcgccatggaggccctgaagcagaagtcgctctacaactgccgctgcaagcggggtatgaagaaggagaagaactgcctgcgcatttactggagcatgtaccagagcctgcaggggacaacggcagctggtgtttgctgggctgaccagcattgttgggcctgttgttggaaaacccatgaggaggacgggggctggggggagggccacccccgggaccccgctgacctctctgaaacctggtcggagcatgggaggaggatcccactaaagggccccaaggaacccacaacttctttccaaggagagccagcctggggctttcgctggcctctcaataataataggaaggcttgccctgcatctggaaatgatctgctggaggattccccatatgaaccagttaacagcagattgtcagatatattccgggtggtcccattcatatcaggggcctggaacatgaagcgagcgggaggacacacaggagaaagtgcgccggtgcaagaggatgtcggaggagaggcaggaacacagaagtgtcctaggatcccagagggcagagctgtgtgggcgctcagaggctcagaggcagaagccaccgtctctggcaacaagaactagtggctggaatgttaattttcatatttcttggcacccttcagggttgtctgtaaggaaaagtgagaaattatttgttgcgttaagccctcagattttttttaaagataatctttcattcagag

SEQ ID NO: 460086 - DNA, 1669 bp, Homo sapiens
agggctggctagggagctgccgccgccgccaccgagggctcggactccaggcagctgcaggctccgctcgcgacgctcggaaagttgggtcggacctgaacccctaaaagcggaaccgcctcccgccctcgccatcccggagctgagtcgccggcggcggtggctgctgccagacccggagtttcctctttcactggatggagctgaactttgggcggccagagcagcacagctgtccggggatcgctgcacgctgagctccctcggcaagacccagcggcggctcgggatttttttgggggggcggggaccagccccgcgccggcaccatgttcctggcgaccctgtacttcgcgctgccgctcttggcttctgggcactctccgcccggcggaccgctgaccatggctggcctgccccgcgcccagcgcgcgcccggtgcccagtccgccgccgcacttctcctcggaaagcgcctgagtttcagccgggcggagcgggtggctggagccgggggtggcccgggagcccgggtcgttgctcaggccaggatgccccggggcggagggccgacggggcgggaaaatggactcccggatggtcgagaggtggacccgctcccagagcagggcgcccccgaaggctggtcaagcatccctgacccgggcgcgcgccctcgcccggagcaggggcggccggggtccccgcccgccgcactcaggctccctcccctctgccccgcagacttgctcctgtcggccgaagtgagcggcggagaccgcctggattgcgtgaaagccagtgatcagtgcctgaaggagcagagctgcagcaccaagtaccgcacgctaaggcagtgcgtggcgggcaaggagaccaacttcagcctggcatccggcctggaggccaaggatgagtgccgcagcgccatggaggccctgaagcagaagtcgctctacaactgccgctgcaagcggggtatgaagaaggagaagaactgcctgcgcatttactggagcatgtaccagagcctgcaggggacaacggcagctggtgtttgctgggctgaccagcattgttgggcctgttgttggaaaacccatgaggaggacgggggctggggggagggccacccccgggaccccgctgacctctctgaaacctggtcggagcatgggaggaggatcccactaaagggccccaaggaacccacaacttctttccaaggagagccagcctggggctttcgctggcctctcaataataataggaaggcttgccctgcatctggaaatgatctgctggaggattccccatatgaaccagttaacagcagattgtcagatatattccgggtggtcccattcatatcaggggcctggaacatgaagcgagcgggaggacacacaggagaaagtgcgccggtgcaagaggatgtcggaggagaggcaggaacacagaagtgtcctaggatcccagagggcagagctgtgtgggcgctcagaggctcagaggcagaagccaccgtctctggcaacaagaactagtggctggaatgttaattttcatatttcttggcacccttcagggttgtctgtaaggaaaagtgagaaattatttgttgcgttaagccctcagattttttttaaagataatctttcattcagag

SEQ ID NO: 460087 - DNA, 3896 bp, Homo sapiens
gccacctgggatgaatgggggtcatggcatgtaagcagaaattcatcatcctgctcaaccatcctaggcttcaaggggagaaggagctgggggagctgggccagctccagacccaggccagcgacacgtctgtggtgctgtccatggacaacaaccgctacctggacttcagcagcatcatcactgaggtccgcgcccggtacgaggagatcgcccggagcagcaaggctgaggctgaggccttgtaccagaccaagtaccaggaacttcaggtgtctgcccagcttcatggggacaggatgcaggaaacgaaagtccagatctctcagctacaccaagagattcagaggctgcagagtcagactgagaacctcaagaagcagaacgccagcctgcaggccgccatcactgatgctgagcagcgtggggagctggccctcaaggacgctcaggccaaggtggacgagctggaggctgctctgaggatggccaagcagaacctggcccggctgctgtgcgagtaccaggagctgacgagcacgaagctttccctggatgtggagattgccacttaccgcaggctgctggagggcgaggagtgcaggatgtctggggagtgcaccagccaggtcactatctctatgaggtcctccgtctctcggcaaacatactccacaaaagggggcttcagctccaactctgccagcggagggagtgggtcccaggcccgcaccagcttcagctcagtgacggtgtctcggagcagtggcagtggtggcggggcccactgtggccccggcacaggtggctttggcagccgaagcctctataacttggggggccacaagagtatctctgtcagtgtggccggaggggccttgtcggggcgggctctggggggctttggctttggcagcagggcatttatgggacagggggctggcaggcagacgtttgggcctgcttgtcctcctggggggatccaggaggtcactgtcaaccagagcctgctgacccccctccatgtggagattgaccccgagatccagcgagtgcgcactcaggagcgggagcagatcaagaccctcaacaacaagttcgcctccttcatcgacaaggtgcggttcctggagcaacagaataaggtgctggagaccaagtgggcactgctgcaggagcagggccagaacttgggtgtcaccaggaacaacctggagcccctctttgaggcctacctgggtagcatgcggagcacgctggacagacttcagagcgagcgggggaggctggactcagagctcaggaacgtgcaggaccttgtggaggacttcaagaacaagtacgaggatgaaatcaacaagcacactgctgcagagaacgagtttgtggtgctcaagaaggatgtggatgcagcatacatgggccggatggatctgcatggcaaagtgggcaccttgacccaggagattgacttcctgcagcaactctatgaaatggagctgagccaagtgcagacccacgtgtctaacaccaatgtggtgctgtccatggacaacaaccgcaacctggacctggacagcatcatcgccgaggtcaaggcccagtatgagctgattgcccagaggagccgggctgaggccgaggcctggtaccagaccaagtatgaggagctgcaggtgactgctgggaagcatggggacaacctgcgggacaccaagaacgagattgctgagctcacccgcactatccagaggctgcagggggaggctgatgcagccaagaagcagtgtcagcagctgcagacggccattgcggaagcggagcagcgtggggagctggcactcaaggatgctcagaagaagcttggggatctggatgtggccctgcaccaggccaaggaggacctgacacggctgctgcgtgactaccaggagctgatgaatgtcaagctggccctggacgtggagattgccacctaccgcaagcttctggagagcgaggagagcaggtggtggcccctcctgcccgacccagaaagctgggtcgggcctgccctgggggagagcccagggagtctgctccgggctgtgactggcaactccaccactgtgtgcggaggtggcgcagccagctttggaggtggcatctccctgggtgggagtgggggggccaccaagggtggattcagcacaaatgtgggctatagcaccgtcaagggagggccagtctctgcgggcacctccatcctgcggaagaccactacggtcaagacgtccagccagagcccccacatccagtcggcaagaaaaatccacacttaattgggttttgtggtttacacatacattactttgcctgtgaccatcaccacagccctaggttcagtagtgggcatgtggtgttccagtttacagggtgtaaaggcgctcttgcataggaagttcttccttaggtctaccttcggtttctcaggctcagtttgaagattttgtgagcttcttgcaattctgatttaataataaggacacagaatgtggctctagactagaactttcttcttgtttggattgggtttatggtagggtttgtcatgaaattaatttggatttagttaattggaggatacaaaactggcccctcaggacagtgtcataccttattgggtacttgtaaggacagggccacatcaaccaagcaactgaccatgtgctgagggtaaggacaaaaaggagcggagctgcatctgcagagcttgcagcctgctggccagaccccatggctgtcttggtggaccatgaggtacagggctgtataagttgctgtgtatttttttccctgcatattctgtgtgggccagtcactcatataaaacattatacctaccgttttatacattgtaaggtcacaagctttgaagtcagacagatagtactgacttcctatctctaccacttcctggctgtgtgatctcaggcaacttacatacccctctgagcctcaatatctgcagctccaaactggacatagcaaagcacctctttgactgggttgttggaagaagcacctagtgttcagcatataacagtagttccaagagagaatcccttctacccaagaggcaccgctgcctttccttcatcttccttcttgtatcagcgatggcacacctcaagtcaccttcatgagaagtacctcaatcgtagctccatggtttgggtgccccacaggcacaaaataagactgattacatattctatattgtttccctgaaaatccccttggctcctggcttgctttttgttctaagcagtagacacaactctaggggcagtgaacccatgccattttctcctagtgttggagtgttacagccatagagtaaaagacccaataagcacactatgagccatctcagggattcacttgtgctcaggcaaagcctaccccggcctgtgatagtccccatcaaatcccaggggctaccagagaagaaagcagtgaacggcaggtgcagaggctgaggtgaggcagccggggggtgagctccagccatcactcagggtgagatcctgatggccctgccacgtcctctggggcaggtaaccagtcaattggacctcagcttcccaagtgggaggctcacatgtctcctcagctcctgcagctgcagcccgcaaagacctgcagtagctcccaccctccttccaagccatgcccaccttaggagcaacagtggaaatcgatagaccctgggatgctagtgcccccagagcccctttgacccgaacagtcagttccatcagatttatttgggtgcacattctggattggttgtgacacaatttagacagagtggctttataccaggcagaacagtgtgagtgagaggctataga

SEQ ID NO: 460088 - DNA, 1554 bp, Homo sapiens
cgccgcccgtcggggcgcggccgggcgcgggccccgggcgatggccgcggagctggcgatgggcgccgagctgcccagcagcccgctggccatcgagtacgtcaacgacttcgacctgatgaagttcgaggtgaagaaggagcctcccgaggccgagcgcttctgccaccgcctgccgccaggctcgctgtcctcgacgccgctcagcacgccctgctcctccgtgccctcctcgcccagcttctgcgcgcccagcccgggcaccggcggcggcggcggcgcggggggcggcggcggctcgtctcaggccgggggcgcccccgggccgccgagcgggggccccggcgccgtcgggggcacctcggggaagccggcgctggaggatctgtactggatgagcggctaccagcatcacctcaaccccgaggcgctcaacctgacgcccgaggacgcggtggaggcgctcatcggcagcggccaccacggcgcgcaccacggcgcgcaccacccggcggccgccgcagcctacgaggctttccgcggcccgggcttcgcgggcggcggcggagcggacgacatgggcgccggccaccaccacggcgcgcaccacgccgcccaccaccaccacgccgcccaccaccaccaccaccaccaccaccaccatggcggcgcgggacacggcggtggcgcgggccaccacgtgcgcctggaggagcgcttctccgacgaccagctggtgtccatgtcggtgcgcgagctgaaccggcagctccgcggcttcagcaaggaggaggtcatccggctcaagcagaagcggcgcacgctcaagaaccgcggctacgcgcagtcctgccgcttcaagcgggtgcagcagcggcacattctggagagcgagaagtgccaactccagagccaggtggagcagctgaagctggaggtggggcgcctggccaaagagcgggacctgtacaaggagaaatacgagaagctggcgggccggggcggccccgggagcgcgggcggggccggtttcccgcgggagccttcgccgccgcaggccggtcccggcggggccaagggcacggccgacttcttcctgtaggcgccggaccccgagcccgcgccgccgtcgccggggacaagttcgcgcaggcctctcggggcctcggctcggactccgcggtacaggacgtggacaccaggcccggcccggccgtgctggccccggtgccaagtctgcgggcgcggggctggaggccccttcgctcccggtccccgttcgcgcgcgtcggcccgggtcgccgtcctgagcctccctttccttgccttttttaacttcccctccccgttttaaaatcggtcttattttcgaagtatttataattattatgcttggtgattagaaaagaaaaccttggaggaagccccttctttccccagccggggtccgccctcagtcgcgagtcacagcatgagtcgctcgccaggaggggcccggcccctgcctgccccctccccgcttgcccccgaccctgctaccggcgttccttggag

SEQ ID NO: 460089 - DNA, 1743 bp, Homo sapiens
cgccgcccgtcggggcgcggccgggcgcgggccccgggcgatggccgcggagctggcgatgggcgccgagctgcccagcagcccgctggccatcgagtacgtcaacgacttcgacctgatgaagttcgaggtgaagaaggagcctcccgaggccgagcgcttctgccaccgcctgccgccaggctcgctgtcctcgacgccgctcagcacgccctgctcctccgtgccctcctcgcccagcttctgcgcgcccagcccgggcaccggcggcggcggcggcgcggggggcggcggcggctcgtctcaggccgggggcgcccccgggccgccgagcgggggccccggcgccgtcgggggcacctcggggaagccggcgctggaggatctgtactggatgagcggctaccagcatcacctcaaccccgaggcgctcaacctgacgcccgaggacgcggtggaggcgctcatcggcagcggccaccacggcgcgcaccacggcgcgcaccacccggcggccgccgcagcctacgaggctttccgcggcccgggcttcgcgggcggcggcggagcggacgacatgggcgccggccaccaccacggcgcgcaccacgccgcccaccaccaccacgccgcccaccaccaccaccaccaccaccaccaccatggcggcgcgggacacggcggtggcgcgggccaccacgtgcgcctggaggagcgcttctccgacgaccagctggtgtccatgtcggtgcgcgagctgaaccggcagctccgcggcttcagcaaggaggaggtcatccggctcaagcagaagcggcgcacgctcaagaaccgcggctacgcgcagtcctgccgcttcaagcgggtgcagcagcggcacattctggagagcgagaagtgccaactccagagccaggtggagcagctgaagctggaggtggggcgcctggccaaagagcgggacctgtacaaggagaaatacgagaagctggcgggccggggcggccccgggagcgcgggcggggccggtttcccgcgggagccttcgccgccgcaggccggtcccggcggggccaagggcacggccgacttcttcctgtaggcgccggaccccgagcccgcgccgccgtcgccggggacaagttcgcgcaggcctctcggggcctcggctcggactccgcggtacaggacgtggacaccaggcccggcccggccgtgctggccccggtgccaagtctgcgggcgcggggctggaggccccttcgctcccggtccccgttcgcgcgcgtcggcccgggtcgccgtcctgaggttgagcggagaacggtgatttctaaggaaacttgagccaggtctaacttctttccaagcgtccgcttgtacatacgttgaacgtggttctccgttcccaccttcgccctgccagcctagagggaccgcgctgccgtcccttcccgggtggcccctgcctgcccccgccctccttcgttctcttctcagcctccctttccttgccttttttaacttcccctccccgttttaaaatcggtcttattttcgaagtatttataattattatgcttggtgattagaaaagaaaaccttggaggaagccccttctttccccagccggggtccgccctcagtcgcgagtcacagcatgagtcgctcgccaggaggggcccggcccctgcctgccccctccccgcttgcccccgaccctgctaccggcgttccttggag

SEQ ID NO: 460090 - DNA, 1094 bp, Homo sapiens
cgccgcccgtcggggcgcggccgggcgcgggccccgggcgatggccgcggagctggcgatgggcgccgagctgcccagcagcccgctggccatcgagtacgtcaacgacttcgacctgatgaagttcgaggtgaagaaggagcctcccgaggccgagcgcttctgccaccgcctgccgccaggctcgctgtcctcgacgccgctcagcacgccctgctcctccgtgccctcctcgcccagcttctgcgcgcccagcccgggcaccggcggcggcggcggcgcggggggcggcggcggctcgtctcaggccgggggcgcccccgggccgccgagcgggggccccggcgccgtcgggggcacctcggggaagccggcgctggaggatctgtactggatgagcggctaccagcatcacctcaaccccgaggcgctcaacctgacgcccgaggacgcggtggaggcgctcatcggcagcggccaccacggcgcgcaccacggcgcgcaccacccggcggccgccgcagcctacgaggctttccgcggcccgggcttcgcgggcggcggcggagcggacgacatgggcgccggccaccaccacggcgcgcaccacgccgcccaccaccaccacgccgcccaccaccaccaccaccaccaccaccaccatggcggcgcgggacacggcggtggcgcgggccaccacgtgcgcctggaggagcgcttctccgacgaccagctggtgtccatgtcggtgcgcgagctgaaccggcagctccgcggcttcagcaaggaggaggtcatccggctcaagcagaagcggcgcacgctcaagaaccgcggctacgcgcagtcctgccgcttcaagcgggtgcagcagcggcacattctggagagcgagaagtgccaactccagagccaggtggagcagctgaagctggagggagaaggagcaaggtgaggaggcttctccaccgtgagtctcagacggagagctgtgccctcattcacctttggaacctctgacctgaggcaccttgagacgcaataatattaataccttaactgcaagactccgcgactcacagagagatgtaagt

SEQ ID NO: 460091 - DNA, 2661 bp, Homo sapiens
acatctgtttcctttacctggaggctggagcatccccagggtcagccagcctctgagatgttaagattttgtggccttggagtcagggaccaggggtggtggtggtggtggtaatgatgataagtagttgatggcagccatggtgatgctgtttatggtggtggtggtgttggtggcggtcatggtgatgatcgtggtgatgctggtggtggtgctcatggcgatgatggtagtgatgctggtggtggtggtcatggtgatggtcatggtgatgatggtgttgatgctggtggtggtggtcttggtgatgatggtggtgatgctggtggtggtggtcacggtgatgatagtggtgatcctagtggtggtggtcttggtgatgacagtggtgatgctggtggtggtggtggtcacggtgatgatagtggtgatcctagtggtggtggtcatggtgatgctggtggtgatgctggtggtggtggtggtcatggtggtcatggtgatgatggtggtgatgctggtggtggtggtcatggtgatgatggtggtgatgctgctggtggtggtggtcacggcgatgatagtggtgatcctagtggtggtggtcatggtgatgatgttggtgatgctggtgttggtggtggtcatgctggtggtggtgatgctggtggtggtgatcttggtgatggtggtgatgctggtggtggtcatggtgatgatggtggtgatgctggtggtggtggtcatggtgctgatggtgatgctcatggtggtgatcttggtgatgatggtgatgctggtgatggtggtcgtggtgatgctggtggtgatgctggtggtggtggtcatggtgatgatagtggtgatgctgtttttgttggtgatgatggtagtgattctattgatggtgatagtcatggtgattgatggtggtagtgatgtgactagcaatgatgctggtggtgatggtgtcagaggttttaagatgataaagggatgatgctagtcaagtctggcactccaccttggtgaacgctactgctctggccatgaacaaatattcttcctcatcccagccctgtgcagccttccctttgtttggaggaggttcctggctttccccttctagttcttgaaatttcatttctttcctcacatcccctcttgatgtaaagaaatcaacaccacacttggtgcccttgagaaaaattattttacccttgtatgtctcagctttctcatctgtaagttggatttatatgccctgcagatagacacgccctgcagggttgttgcagtggctcacagagaagaatgtaaaggtataaaagtccatacgcatacaagaattgttaccaacagcactgatggaatgggcttcctgatagtaatacctgggaacaccagcaccaccaaggctctggccatgcagggcactgtggctacagtagcaggtcattgtcactcctgctctgccctcacctccacccagcccctgcccatctgcttccctgctttgtgaggcttggtctaatagactgtcctacccccagctccattgtaaaaggaggccaggccagagacagcccagggtggctgcagaggagaaaggcacagaagcaaaggacaggtgcaaaggtcataattccactttattgccccgtcatttataagccctgtgctgcccgtgccagctgtgtttccacttgaaagttactcctggtgtttgttggaaattctggcacggtcccgcttaccctgagaggagacttgggctgcagtgtgggaacctctacactgctagaggtctggtcccgggcccatctgtgcatagcaggtaggacaccagcccatcagtggtcccaggcgaccaccctcagctgatagtggaacccctcctctttgagcccctgcttagaaaccaaagagtccctgaagcggacagagcatccccatgtccactccctcgacctggtgcaaattaatctcggcttttgtttgggcagcctggtgcccgagatgggggatgatgcccaaggccgctgttacctctcttgctttgtcactgcaccccctgtcctggaacatgtgagcccctggaaggtgtggcagggtccagcaccacctggaagcctgagactaacggcagctccggccacctggaacaccctctagagacctcccttcaccccactgacaggccctgcccagcccctggggggtgctggagagacagaggtagtggcattcactgggaacagactcctctccctgcaaccggcaggctgcctctgctccactgagcgggtgatggagcttggcggggttgtggggagcagggccagctggcaaaaaaaaggagagaggagacttttggagagaggagagttaggtaaggggatgggccaccaccctggacaggagagctttggggggcatctggagcaatgcaggtttaaagcagagatctgctttgatgagtgagggcccctccccctcgggtcaccccaacacttttagcagcaaacctcatgcctcctcaagtctgggggtaagatggtgtgtggacgagggtaggagggggcccaggcgcccccaggggtctgtcctgtgtggtgtgcaggtctcctgtcccctcctggccatgcccattgggcccat

SEQ ID NO: 460092 - DNA, 1417 bp, Homo sapiens
  misc_feature (1)..(2): n is a, c, g, or t
  misc_feature (5)..(5): n is a, c, g, or t
  misc_feature (10)..(10): n is a, c, g, or t
  misc_feature (13)..(15): n is a, c, g, or t
  misc_feature (18)..(18): n is a, c, g, or t
  misc_feature (21)..(21): n is a, c, g, or t
nnganattgnctnnnaancanatggttcagacatcgaaccatttctgcatcagctggtaaacagctgtggcctggagggctccttttggacctccctatgctgacccagcaactaaagaggatatttggttataaacagtgtgctctgaaggttaaagaacctccagggctccaggaactggacttctactgctgtaccttcaagtaccctccttggacagaactgggggctgaggccaaatcacagttcctgatctggattggcctgacctttgaacatgagatagggcaatcaatggggacgggcactaaaatgaactctaagaccctcccctcattgccaaggcttctagcacaacaagaatggcttgttcaggcctgcattcataagtggcaaagtacccctgattttgaaacatgtatggtcgtgatatcaagagtgacaacctgggcaaaagagagccattgcaaagaagaaaggcctttagggaaatggagcagaaagaggaagcagtaagatattgtctttagcgcctacaaccatatatggattggggtgctcagggaaggggcatttttttccaaaacagaagtgcaagtcttgacttggttcctgagtgtgaatagtgtgagttatatagtgggttcaggtctctgtttaccctgcttctccagcctgagttccttttttttctccattctgcttgttgaactcctgccaaactccgattttgacatcaaagcccaccttgaatgctgcttgtcgctaaagccatcgctggcatttccagacattgtcaatatctactggactaaagaaattctctactaatcagaaaaggaattggtctgtattgaagctggaaagaaaatcagaggagccaatgctgtcagagtgcatccaaggaccatttaaagatgtcctggccggaggtctgggctgtcaggtcctgccagcaggtagattccttccagagacattccttgacctgataccatcaaatcactttagtaggacaagtaactttccttattctcatttcatgcttgctagacaactgattatactttagttttggaagtaaatttcttacatgaaggaaataatctggtctcaggatgggatgtttaaaccccttgcagttctagtatggtaataaattggcattctgggctgtacatcagtccctcatgaccttgattagtgagactccatccctgagatccttattcattcttagtggaataaaacaaaatcatatttcacaacctgtgaggctgtgaatgatatcctattactgtggtgaatataataatggcaataactagcattcatagagcattgctttggttatctgttgctggatagcaaatcaccacttagtggcctaaatcagaaacaatcattttattattt

SEQ ID NO: 460093 - DNA, 1683 bp, Homo sapiens
tgtgaagtagctgttaactatatctaaaattataagctgagaaatggagaactatcttaatagctttctgtatcctatagcaaccagagtgccttgcagacctcatggctgctaccctgtcggaagatgccagacccggaatgtaactcaaatggagccaaaggaagactttccagagcaacctacacttgagatgagtcgtggatctgtgtcaaaagtcatttccatgaagatgatttcccatcaatctgatgtttactgtatgtcatcaaggcatatatctgagaaacaaacatacagtagcccagctcagtacacagaagatacagacaagcacaagtccttggatgaaagaagatcctggcttcagtccacacagtacatagagaagagaccagtgaagaataatctttcctcatggcaacttaaacaagaggaattccactggcatgctaaaacaaaattgtaatgacttaaaaattcagtgaatatgagggttggagatattacagtatataccttttcaagatatttgatgatttcagatggtattagatttatccaggatgatcattaaattgagccaatggatgattgcctgacagaaagaagaatacacttttaggataactatgtgtgaagttgtttgggccaataagcaacacgaagaaagagttcccagccccatttcaaactgaagtgttttaagaatatgaaatgtacctgatggaatcttagatggctatttttcctctgacataactaaattgactcatgtgtggcaaaacttcttcaatataaaacaaatcactttctcaaaccatgtttttgtccattgttcctgttaataaatgtcagcgatagactagaaagccagttagatgttaaaatatgtaagataaactgtagcttcatcctgaggcatttaagtttcctggcttttgtgtacaatttagattatattttccatttttgaggataattaattttggaaaattcttaagaatatacattcagttataggttgtatgatgtaaaggagatttgaagaaatagaatttgacatcactattacattaggttcactgagttcttgtatgcaaagtatatatacagaaaggcatcatgatatcttctaggttgatgcttcccaatctactaaaaatatgctaaatattgaggattgaaggcaaggaacaaagagaaggcaatcctaaaaaaatagcacttcaccccttttttcatccactgaactctggatttgtggctttatattcagttttaattatagaatgagaactctaagtagcttctaagatctcttccaatgtaacactgacttacctcactatattcctattaaatttttagaaatgaataatattaatttttcaaatatgtagaaaatgaacatgttaaaaagaactaactctcggtagaattttgccaaaattaaaacgtcctgaaagaagagtaggaaaatacaaagggaaaatcaaacaggagacatcttaactatcttagtccattttgcactgctataacagaatatctgagactgggtagtttataaataacagaaatttattttatcacagttctagaggctagaaagtccaagactgaggtgctacaggtttagctatccaatacatatgtttaattctataccaatatctattt

SEQ ID NO: 460094 - DNA, 753 bp, Homo sapiens
  misc_feature (741)..(742): n is a, c, g, or t
  misc_feature (744)..(749): n is a, c, g, or t
  misc_feature (751)..(751): n is a, c, g, or t
aacccgctcaggcggcgacggagccatgtcgccgctgctggggctccggtccgagctgcaggacacctgcacctcgctgggactgatgctgtcggtggtgctgctcatggggctggcccgcgtagtcgcccggcagcagctgcacaggccggtggcccacgccttcgtcctggagtttctagccaccttccagctctgctgctgcacccacgagctgcaactgctgagcgaacagcaccccgcgcaccccacctggacgctgacgctcgtctacttcttctcgcttgtgcatggcctgactctggtgggcacgtccagcaacccgtgcggcgtgatgatgcagatgatgctggggggcatgtcccccgagacgggtgcggtgaggctattggctcagctggttagtgccctgtgcagcaggtactgcacaagcgccttgtggagcttgggtctgacccagtatcacgtcagcgagaggagcttcgcttgcaagaatcccatccgagtcgacttgctcaaagcggtcatcacagaggccgtctgctcctttctcttccacagcgctctgctgcacttccaggaagtccgaaccaagcttcgtatccacctgctggctgcactcatcacctttttggtctatgcaggtggtatagatcgtttcggatactcttactgaaaaatgatcctggctttacaaagttcctttcgatttaaagcacaaggcacatgattggttagtannannnnnnangt

SEQ ID NO: 460095 - DNA, 1069 bp, Homo sapiens
tgtgaatcttggacccatatggacactgctgtatgttactgtcatgattctctgctcttccatgagttcagacttggcgccttattttacttctgagccactctctaccgtccagaaacatggtggacctgcagaactacattgttctgccaaacctgataatagaaacgatgtcagctgtgatcgcacagaaaatccagaagagttcagcagaggagacagctgtgtctattcagaaacagacagcaacaatttacattggaatcctcttattttgccacctatctcagaggacggtgctgaaaagacaacatggcctccgcctggtgttcctttggacagcccctcaggggtcctccagcagccccaggaaactggaggatgtgcaaacaaccagtcatcttctgacttcaagcctggatggaagatacagccagtgggaaacttgggcatagcaaccctagacctgctgttccggggtggagattctaccctatcagtggaggttatgaaagatcgttacactgggaaggctgcccatagaaaaccataattgaaggcattgcatgttgatcccaccaagagggccacactcaccttggaagtggttgagcctgtccaccggtcctgtgatgcgccctgtagtgagctctggattcacaggctggggcatgtgcagcagcacggactcactcctgcaaggaagtatgtcatttatgctccaagcagccacagcaagtattcaggggagtcatttccaggagtttctaacgctctgtttgatattgaaaggaaagtggacccatgcgaggctaagggagaagtgaagagaaagctttgttgcaaccttcactgtgcaggcagcttcagaggctttgaaacaagaagcctaagaggattccttagagaacctatattgaatttgtgtggtatgtcactcagaaagagtcatgatgggtatattgatgtattttaaaattagtatattagaaataaagatggatagtatatacagttatgtgagtgttcatatatttgtctgtgtatatattttttcttttattttctc

SEQ ID NO: 460096 - DNA, 450 bp, Homo sapiens
gctggagggtgctggggaagttcaggctgtccccagaagtcaacttatacgaccttcatgctggactacacatgtcatctcccggagcagcaggcggtggctgggacggcagcacagagaaagcccggcacaggctccgctcagagcctcaggatgtggggaggcttctacagatgaccagcttggtggcgtcatcatccccacctggaggaaggagaccttatctggaaccaagaggcatgtctgtaagaaactcttatgaagttgtcggggttcaagttggccttcctgttgttcaacctggtggagaatgttcctgtgggccttggcagcaagtcagcattcttcgttggcatggagtcctaggaaaaagaggctctccaccctgaagccagtcgcatatcaccccaataaacagttacaacgcctctgccaacacaggatcccaaa

SEQ ID NO: 460097 - DNA, 556 bp, Homo sapiens
ggccagtagccatcggttgggatgagtttcaggtttgtttttgtttttgctttaaaatatagtgcaaaataatttgaagcaaaattcccaggaatatcatctggggcaaagacaatcgaatgcttaatgaagtctattcctgagcctgctatttttatcccccgttcatctttgccagtgtcatctcccggagcagcaggcggtggctgggacggcagcacagagaaagcccggcacaggctccgctcagagcctcaggatgtggggaggcttctacagatgaccagcttggtggcgtcatcatccccacctggaggaaggagaccttatctggaaccaagaggcatgtctgtaagaaactcttatgaagttgtcggggttcaagttggccttcctgttgttcaacctggtggagaatgttcctgtgggccttggcagcaagtcagcattcttcgttggcatggagtcctaggaaaaagaggctctccaccctgaagccagtcgcatatcaccccaataaacagttacaacgcctctgccaacacaggatcccaaa

SEQ ID NO: 460098 - DNA, 1179 bp, Homo sapiens
ctcaagttatgactgtgccacttatgagccatgtgacctcaggaggacacctctttgaatctaagttattttgcggccctgagaagaaagatgcccaggtgtcactggagagggtagttcttatttacaagaacacatggagcctggtgagcaggcagccctcctccttggccttgactttatcacagcaaacaggcctgaccaagagctttccttcagacacttgcagctggctgggaaatgagtgtgatagaacccaaacattatcattcaaaggccgtattcacaaacgaagtgggatggccataaaactgatgaccttgctgcttctggaatctcataaaaagtttccaagctgctcctccccagagcaaataagggcgttgcagttgctagtcccctggcagggttccagctggggctattacattcctccctcataaatacagacttgtcggcctgacagggtgcttaactctggaggtgctgctgtgtttggagcatttaaacccagaggcaggggcgacgcagaaaaaaaaaaggcatcagagttgtcggggagcagcaggcttactctcgagattctccctgctgacctgatgaagtaagcagccttgtcgggaaagcctacatggcaaggaactgcaaatggcctctaggaactgtgagtggcctttaggagctgaagttggcctccaatcagcaagaagccagggcacttagtcctactgcagcaaggaaatacattctgccaaccatctgaatgagcttggaagtggattcttcccaagccaagcctccatataagaatgcagcccacctgacacattcataacagctgagcagaggacccaattaaaccgtgcctggactcttcatccacagaaacttcgagataatcaatgcatgttgcgttaagccatgacgtttgtgataattcgttatgcagcaataaatgactaacacactcctttacacagctctagtcagcttttctttatgtgcagccaaactgatacatagttggtggatacacagatgatcatctagggagacctcccaaaatgggaggaacgggaactgatgcttagagaagaagaataatgcttatgcctagagatagaatgtgctttttctgtggtcacaccatgacaaggcaacaagcccagtgtttactca

SEQ ID NO: 460099 - DNA, 1154 bp, Homo sapiens
  misc_feature (1)..(1): n is a, c, g, or t
  misc_feature (4)..(4): n is a, c, g, or t
ntcnttccaggagcctctctttccaccagcggaggaggagacagatgccttccagctgctggctggtccccaggaccccactgccactgagagctgacgagtggtcgagtgcacgcaagtatgtgcagcttggagaggtgcagtgacgtgcctgaggtctacggccccaaatggcagatgaggggctcaattccaggcttgtctgtggggtgccctccctggacacaaggactgccaaccctgtgtgaatgtgagcctcatgaaggagacaggtgagaagcctgagcgctggtggctgtaggctgctaaactgtaaatacagataatgtccaaagcactggtggctgtgagctcctcaactgtaaatacaaataacgtccaaagcgctggctgcccctttgccttccgccacgattgtaagtttcctgaggcctccccagaagccgagcagatgctggcagcatgcttcatgtatagcctgcagaacctgcccaggtgtgactacgaggctgcctgggacacagactgtgtgccctgggaaccctgcccagtggtgggaacccaggcaaaggagatgctgaagaactgtgcccagtggttcagcctcctgggaccagcagacagcatcccctgggaggatgtgggcccagccaaggggtcctctggggagatggggagctgccggggtttgaggctcaggccccggactgaccactgcagagcccagtggatcccaccccctgggtgcaatgctcctgggggcagagcctggagcagacacgccctcaacagatgcccctgatccctgcatttatggagcatgttgctgtgggccacggccccggagcacagggactttttactacctggcctccagtaccttgggcctacacgaattttgacgtagttatcatttgagggctgcgtccaggactgatggcaggcggcagggctcagcacagcgccccagggctccagctcagactcctgatcgccccagcctccatctacccctgagcagtccccgcacctcagttctctgagagccagcgtgggtctgccttgggaacagggcttcagccctgagggtttgccaagggtcctaagctgcagttgttccggggcatctggcccgctcaggtcactgggagtcc

SEQ ID NO: 460100 - DNA, 2678 bp, Homo sapiens
ggagatgtattcccaggacatggtgtgaatgacagacggcagcgtgctccgagccgacgcctcctgggagcaggcactgtgcctcctgtcctgcccgtagcttctcatcctaatattcctaccaacttcgttcttcattcttcccctaggaccacgacattgaccaagggcccagggtctctgaggccagaagtcactccggagactcagcagcctcagacgttttacttggtgcaccagaggctgactgatcagattggatggctaggggcctgggcttcatggagtgactgtttcaaaacttgttcacaccaacactgatcacaagacgctcattaacaaaccccagtgccaatctgttcatgtgttggtaaatacactgctccattcaccaaaatgctatgtctgccagccaggccactccccaaacccaagatagttacaagaaagaaatttggccaggccatggggtgaacatcagcaccagttccggggccgtgccaacctgcatgtgtttgaagactggtgtggcagctctatccagcagctcaggaggaacctgcatttcccactgtacccccatattcgcacaaccctgaggaagcttgctgtgtcccccaaatggaccaactatggcctccgcatctttggctacctgcacccctttactgatgggaaaatccagtttgccattgctgcagatgacaacgcggagttctggctgagcctcgatgaccaggtctcaggcctccagctgctggccagtgtgggcaagactggaaaggagtggaccgccccgggagagtttgggaaatttcggagccaaatttccaagccggtgagcctgtcagcctcccacaggtactacttcgaggtgctgcacaagcagaatgaggagggcaccgaccacgtggaagttgcatggcgacggaacgaccctggagccaagttcaccatcattgactccctctccctgtccctcttcacaaatgagacgttcctacagatggatgaggtgggccacatcccacagacagcagccagccacgtggactcctccaacgctcttcccagggatgagcagccgcccgctgacatgcttcggcctgacccccgggacaccctctatcgagtgcctctgatccccaagtcgcatctccgccacgtcctgcctgactgtccctacaaacccagctatctggtggatgggcttcctctgcagcgctaccagggactccggtttgttcatctgtcttttgtttaccccaatgactatacccgcctgagccacatggagacccacaataaatgtttctaccaggaaaacgcctactaccaagaccggtgagagacactgagtggggcaggaaggtgaccttgcagagggctctgcgggagccaggagagctgcctggaccagggttcagctttcaggagtacatcaagattgaccagcctgagaagcaggggctggagcagccagaagagtcccagtatggggaagtggcagaggagacccctgcctccaacaaccagaatgccaggatgcttgagggaagacagacacctgcctccaccctggagcaagatgccactgactaccgcctccgaagcctgcggaaactcctggctcagccccgggagggcctgctggcccccttctccaagcggaactccacagcgtccttcccagggaggaccagccacattccagtgcagcagccagagaagaggaagcaaaaacccagccctgagcccagccaagattcacctcattccgacaagtggcctcctgggcaccctgtgaagaacctgcctcagatgagggggcccaggcccaggcccgctggtgacagccccaggaagactcagtggctgaaccaggtggagtcgtacatcgcagagcagagacggggtgacaggatgcggcctcaggcccctggaaggggctggcatggggaggaggaagtggtggcggccgcaggccaggaaggacaagtggagggagaggaagagggggaagaagaggaggaggaagaggatatgagtgaggtgttcgagtacgtacctgtgtttgacccggtagtaaactgggaccagaccttcagtgcccggaatctcgacttccaagccctgaggactgactggatcgatctgagctgtaacacatctggcaacctgctgcttccagagcaggaagctctggaggtcacgcgagtcttcttgaagaagctcaaccagaggagccgggggtaaggtaaagggctctcctggggccagggactggggcacgtggcagccagctggcctggaaggcaggggcctaagggctggtagtgggttcccccagccgcggaaatagctggaactttgcccccgactcaggctcctgggaaggacaagtgcccggggcccctgtccctggagaggatcttgaccaggcaggtgtttgtcccgccattaggcaaggttctgaaatccctgggtgcctggcccagtacgtgtgttgaggactggaaggactcagtagatgaggtcccctcctccgaggaaagagctagtaaatagacaaacaggcaaaacagaggctagaaaaatacaaattaagaccctgcatgtgggctggaagggttagggcgtgatgcatgactggagttctttgtgttttcattcatcca

SEQ ID NO: 460101 - DNA, 499 bp, Homo sapiens
  misc_feature (472)..(472): n is a, c, g, or t
tcggcgcagcgccatggggagcccccgggccgcgcggcccccgctgctcctgcgcccggtgaagctgctgcggaggcgcttccggctgctgctggcgctcgccgtggtgtctgtggggctctggactctgtatctggaactggtggcgtcggcccaggtcggcgggaaccccctgaaccggaggtacggcagctggagagaactggccaaggctctggccagcaggaacattccagctgtggatccacacctccagttctaccatccccagaggctgagcctcgaggaccacgacattgaccaaggggtgagcagtaacagcagctacttgaagtggaacaagcctgtcccctggctctcagagttccggggccgtgccaacctgcatgtgtttgaagactggtgtggcagctctatccagcagctcaggaggaacctgcatttcccactgtacccccatagtgtgcacaancctgacaactcgcgtgatggtaccggc

SEQ ID NO: 460102 - DNA, 1706 bp, Homo sapiens
tggttctgtaggggagatgtggaccaggggcttgactcagggttgcatttggtccatagggcctgggatcactagcataacaaggggaatgagagccccatctgcatcaccacgtttcattcggcgctcagagcaacccttctctccctgccaagggcgggtccctagcagccctatgtgatcccagccaggggcaggcttaaccctggctggctgatttcttaccaagatctcactctcttactcctgctgctgatttttccacttccaggttcatctgtcttttgtttaccccaatgactatacccgcctgagccacatggagacccacaataaatgtttctaccaggaaaacgcctactaccaagaccggtgagagacactgagtggggcaggaaggtgaccttgcagagggctctgcgggagccaggagagctgcctggaccagggttcagctttcaggagtacatcaagattgaccagcctgagaagcaggggctggagcagccagaagagtcccagtatggggaagtggcagaggagacccctgcctccaacaaccagaatgccaggatgcttgagggaagacagacacctgcctccaccctggagcaagatgccactgactaccgcctccgaagcctgcggaaactcctggctcagccccgggagggcctgctggcccccttctccaagcggaactccacagcgtccttcccagggaggaccagccacattccagtgcagcagccagagaagaggaagcaaaaacccagccctgagcccagccaagattcacctcattccgacaagtggcctcctgggcaccctgtgaagaacctgcctcagatgagggggcccaggcccaggcccgctggtgacagccccaggaagactcagtggctgaaccaggtggagtcgtacatcgcagagcagagacggggtgacaggatgcggcctcaggcccctggaaggggctggcatggggaggaggaagtggtggcggccgcaggccaggaaggacaagtggagggagaggaagagggggaagaagaggaggaggaagaggatatgagtgaggtgttcgagtacgtacctgtgtttgacccggtagtaaactgggaccagaccttcagtgcccggaatctcgacttccaagccctgaggactgactggatcgatctgagctgtaacacatctggcaacctgctgcttccagagcaggaagctctggaggtcacgcgagtcttcttgaagaagctcaaccagaggagccgggggtaaggtaaagggctctcctggggccagggactggggcacgtggcagccagctggcctggaaggcaggggcctaagggctggtagtgggttcccccagccgcggaaatagctggaactttgcccccgactcaggctcctgggaaggacaagtgcccggggcccctgtccctggagaggatcttgaccaggcaggtgtttgtcccgccattaggcaaggttctgaaatccctgggtgcctggcccagtacgtgtgttgaggactggaaggactcagtagatgaggtcccctcctccgaggaaagagctagtaaatagacaaacaggcaaaacagaggctagaaaaatacaaattaagaccctgcatgtgggctggaagggttagggcgtgatgcatgactggagttctttgtgttttcattcatcca

SEQ ID NO: 460103 - DNA, 1948 bp, Homo sapiens
tgaggatcccggagcgtgttcatgctggtgggcagtgtggacaagactggaaaggagtggaccgccccgggagagtttgggaaatttcggagccaaatttccaagccggtgagcctgtcagcctcccacaggtactacttcgaggtgctgcacaagcagaatgaggagggcaccgaccacgtggaagttgcatggcgacggaacgaccctggagccaagttcaccatcattgactccctctccctgtccctcttcacaaatgagacgttcctacagatggatgaggtgggccacatcccacagacagcagccagccacgtggactcctccaacgctcttcccagggatgagcagccgcccgctgacatgcttcggcctgacccccgggacaccctctatcgagtgcctctgatccccaagtcgcatctccgccacgtcctgcctgactgtccctacaaacccagctatctggtggatgggcttcctctgcagcgctaccagggactccggtttgttcatctgtcttttgtttaccccaatgactatacccgcctgagccacatggagacccacaataaatgtttctaccaggaaaacgcctactaccaagaccggtgagagacactgagtggggcaggaaggtgaccttgcagagggctctgcgggagccaggagagctgcctggaccagggttcagctttcaggagtacatcaagattgaccagcctgagaagcaggggctggagcagccagaagagtcccagtatggggaagtggcagaggagacccctgcctccaacaaccagaatgccaggatgcttgagggaagacagacacctgcctccaccctggagcaagatgccactgactaccgcctccgaagcctgcggaaactcctggctcagccccgggagggcctgctggcccccttctccaagcggaactccacagcgtccttcccagggaggaccagccacattccagtgcagcagccagagaagaggaagcaaaaacccagccctgagcccagccaagattcacctcattccgacaagtggcctcctgggcaccctgtgaagaacctgcctcagatgagggggcccaggcccaggcccgctggtgacagccccaggaagactcagtggctgaaccaggtggagtcgtacatcgcagagcagagacggggtgacaggatgcggcctcaggcccctggaaggggctggcatggggaggaggaagtggtggcggccgcaggccaggaaggacaagtggagggagaggaagagggggaagaagaggaggaggaagaggatatgagtgaggtgttcgagtacgtacctgtgtttgacccggtagtaaactgggaccagaccttcagtgcccggaatctcgacttccaagccctgaggactgactggatcgatctgagctgtaacacatctggcaacctgctgcttccagagcaggaagctctggaggtcacgcgagtcttcttgaagaagctcaaccagaggagccgggggtaaggtaaagggctctcctggggccagggactggggcacgtggcagccagctggcctggaaggcaggggcctaagggctggtagtgggttcccccagccgcggaaatagctggaactttgcccccgactcaggctcctgggaaggacaagtgcccggggcccctgtccctggagaggatcttgaccaggcaggtgtttgtcccgccattaggcaaggttctgaaatccctgggtgcctggcccagtacgtgtgttgaggactggaaggactcagtagatgaggtcccctcctccgaggaaagagctagtaaatagacaaacaggcaaaacagaggctagaaaaatacaaattaagaccctgcatgtgggctggaagggttagggcgtgatgcatgactggagttctttgtgttttcattcatcca

SEQ ID NO: 460104 - DNA, 2274 bp, Homo sapiens
aaggtgtctgtacggcccggattacgggatgcagagcagaccttgtccccaaggccaggccatggggtgaacatcagcaccagttccggggccgtgccaacctgcatgtgtttgaagactggtgtggcagctctatccagcagctcaggaggaacctgcatttcccactgtacccccatattcgcacaaccctgaggaagcttgctgtgtcccccaaatggaccaactatggcctccgcatctttggctacctgcacccctttactgatgggaaaatccagtttgccattgctgcagatgacaacgcggagttctggctgagcctcgatgaccaggtctcaggcctccagctgctggccagtgtgggcaagactggaaaggagtggaccgccccgggagagtttgggaaatttcggagccaaatttccaagccggtgagcctgtcagcctcccacaggtactacttcgaggtgctgcacaagcagaatgaggagggcaccgaccacgtggaagttgcatggcgacggaacgaccctggagccaagttcaccatcattgactccctctccctgtccctcttcacaaatgagacgttcctacagatggatgaggtgggccacatcccacagacagcagccagccacgtggactcctccaacgctcttcccagggatgagcagccgcccgctgacatgcttcggcctgacccccgggacaccctctatcgagtgcctctgatccccaagtcgcatctccgccacgtcctgcctgactgtccctacaaacccagctatctggtggatgggcttcctctgcagcgctaccagggactccggtttgttcatctgtcttttgtttaccccaatgactatacccgcctgagccacatggagacccacaataaatgtttctaccaggaaaacgcctactaccaagaccggtgagagacactgagtggggcaggaaggtgaccttgcagagggctctgcgggagccaggagagctgcctggaccagggttcagctttcaggagtacatcaagattgaccagcctgagaagcaggggctggagcagccagaagagtcccagtatggggaagtggcagaggagacccctgcctccaacaaccagaatgccaggatgcttgagggaagacagacacctgcctccaccctggagcaagatgccactgactaccgcctccgaagcctgcggaaactcctggctcagccccgggagggcctgctggcccccttctccaagcggaactccacagcgtccttcccagggaggaccagccacattccagtgcagcagccagagaagaggaagcaaaaacccagccctgagcccagccaagattcacctcattccgacaagtggcctcctgggcaccctgtgaagaacctgcctcagatgagggggcccaggcccaggcccgctggtgacagccccaggaagactcagtggctgaaccaggtggagtcgtacatcgcagagcagagacggggtgacaggatgcggcctcaggcccctggaaggggctggcatggggaggaggaagtggtggcggccgcaggccaggaaggacaagtggagggagaggaagagggggaagaagaggaggaggaagaggatatgagtgaggtgttcgagtacgtacctgtgtttgacccggtagtaaactgggaccagaccttcagtgcccggaatctcgacttccaagccctgaggactgactggatcgatctgagctgtaacacatctggcaacctgctgcttccagagcaggaagctctggaggtcacgcgagtcttcttgaagaagctcaaccagaggagccgggggtaaggtaaagggctctcctggggccagggactggggcacgtggcagccagctggcctggaaggcaggggcctaagggctggtagtgggttcccccagccgcggaaatagctggaactttgcccccgactcaggctcctgggaaggacaagtgcccggggcccctgtccctggagaggatcttgaccaggcaggtgtttgtcccgccattaggcaaggttctgaaatccctgggtgcctggcccagtacgtgtgttgaggactggaaggactcagtagatgaggtcccctcctccgaggaaagagctagtaaatagacaaacaggcaaaacagaggctagaaaaatacaaattaagaccctgcatgtgggctggaagggttagggcgtgatgcatgactggagttctttgtgttttcattcatcca

SEQ ID NO: 460105 - DNA, 2555 bp, Homo sapiens
tcggcgcagcgccatggggagcccccgggccgcgcggcccccgctgctcctgcgcccggtgaagctgctgcggaggcgcttccggctgctgctggcgctcgccgtggtgtctgtggggctctggactctgtatctggaactggtggcgtcggcccaggtcggcgggaaccccctgaaccggaggtacggcagctggagagaactggccaaggctctggccagcaggaacattccagctgtggatccacacctccagttctaccatccccagaggctgagcctcgaggaccacgacattgaccaaggggtgagcagtaacagcagctacttgaagtggaacaagcctgtcccctggctctcagagttccggggccgtgccaacctgcatgtgtttgaagactggtgtggcagctctatccagcagctcaggaggaacctgcatttcccactgtacccccatattcgcacaaccctgaggaagcttgctgtgtcccccaaatggaccaactatggcctccgcatctttggctacctgcacccctttactgatgggaaaatccagtttgccattgctgcagatgacaacgcggagttctggctgagcctcgatgaccaggtctcaggcctccagctgctggccagtgtgggcaagactggaaaggagtggaccgccccgggagagtttgggaaatttcggagccaaatttccaagccggtgagcctgtcagcctcccacaggtactacttcgaggtgctgcacaagcagaatgaggagggcaccgaccacgtggaagttgcatggcgacggaacgaccctggagccaagttcaccatcattgactccctctccctgtccctcttcacaaatgagacgttcctacagatggatgaggtgggccacatcccacagacagcagccagccacgtggactcctccaacgctcttcccagggatgagcagccgcccgctgacatgcttcggcctgacccccgggacaccctctatcgagtgcctctgatccccaagtcgcatctccgccacgtcctgcctgactgtccctacaaacccagctatctggtggatgggcttcctctgcagcgctaccagggactccggtttgttcatctgtcttttgtttaccccaatgactatacccgcctgagccacatggagacccacaataaatgtttctaccaggaaaacgcctactaccaagaccggtgagagacactgagtggggcaggaaggtgaccttgcagagggctctgcgggagccaggagagctgcctggaccagggttcagctttcaggagtacatcaagattgaccagcctgagaagcaggggctggagcagccagaagagtcccagtatggggaagtggcagaggagacccctgcctccaacaaccagaatgccaggatgcttgagggaagacagacacctgcctccaccctggagcaagatgccactgactaccgcctccgaagcctgcggaaactcctggctcagccccgggagggcctgctggcccccttctccaagcggaactccacagcgtccttcccagggaggaccagccacattccagtgcagcagccagagaagaggaagcaaaaacccagccctgagcccagccaagattcacctcattccgacaagtggcctcctgggcaccctgtgaagaacctgcctcagatgagggggcccaggcccaggcccgctggtgacagccccaggaagactcagtggctgaaccaggtggagtcgtacatcgcagagcagagacggggtgacaggatgcggcctcaggcccctggaaggggctggcatggggaggaggaagtggtggcggccgcaggccaggaaggacaagtggagggagaggaagagggggaagaagaggaggaggaagaggatatgagtgaggtgttcgagtacgtacctgtgtttgacccggtagtaaactgggaccagaccttcagtgcccggaatctcgacttccaagccctgaggactgactggatcgatctgagctgtaacacatctggcaacctgctgcttccagagcaggaagctctggaggtcacgcgagtcttcttgaagaagctcaaccagaggagccgggggtaaggtaaagggctctcctggggccagggactggggcacgtggcagccagctggcctggaaggcaggggcctaagggctggtagtgggttcccccagccgcggaaatagctggaactttgcccccgactcaggctcctgggaaggacaagtgcccggggcccctgtccctggagaggatcttgaccaggcaggtgtttgtcccgccattaggcaaggttctgaaatccctgggtgcctggcccagtacgtgtgttgaggactggaaggactcagtagatgaggtcccctcctccgaggaaagagctagtaaatagacaaacaggcaaaacagaggctagaaaaatacaaattaagaccctgcatgtgggctggaagggttagggcgtgatgcatgactggagttctttgtgttttcattcatcca

SEQ ID NO: 460106 - DNA, 343 bp, Homo sapiens
atgagacgttcctacagatggatgaggtgggccacatcccacagacagcagccagccacgtggactcctccaacgctcttcccagggatgagcagccgcccgctgacatgcttcggcctgacccccgggacaccctctatcgaggtaaggcctcggccagcgcttggcgtcctttctggggacactgcactgccaggtccactgctgatggtggagaaggcttgagagacctgccaagtatcccaatcaccgtagaactttttatcgtccttgtaacatagaacatgcatacagaaaagagagcatgtaaataagtataaaatatttacgtgtaattttacaa

SEQ ID NO: 460107 - DNA, 562 bp, Homo sapiens
ttattactatatgtcaagttaagtaaatgtgagcaggcttcagccaaaccaactgacaggcggtggaggggaaagattaagattctggatgtaccaggcaccattgtgagaggtaaccagttggctgagttgtgtggtcatggcatttgtggtgtcatagccaaagaattgttatgctgtgctctgtgctggggctcccatttgcactttcccagacctttccttcccacggcgctgctctgtaattagatgtagttccctcagagcggaccaccgagagcccaggccaaggccgaaatggccgagccttcctctgcatctgggcagcctgtgatgcaccaggtcaggcatggcgggaatgggaggacttctgcatactgcattcttcactcttaaaaaagcaggcatcggccaggcgcggtggctcacgcctgtaatcccagcactttgggaggctgaggcgggtggatcatgaggtcaggagatcgagaccatcctggctaacaaggtgaaaccctgtctctactaaaaatacaaaaaaaaagtcgatgcggtggcgggc

SEQ ID NO: 460108 - DNA, 1418 bp, Homo sapiens
ttattactatatgtcaagttaagtaaatgtgagcaggcttcagccaaaccaactgacaggcggtggaggggaaagattaagattctggatgtaccaggcaccattgtgagaggtaaccagttggctgagttgtgtggtcatggcatttgtggtgtcatagccaaagaattgttatgctgtgctctgtgctggggctcccatttgcactttcccagacctttccttcccacggcgctgctctgtaattagatgtagttccctcagagcggaccaccgagagcccaggccaaggccgaaatggccgagccttcctctgcatctgggcagcctgtgatgcaccaggtcaggcatggcgggaatgggaggacttctgcatactgcattcttcactcttaaaaaagcaggcatcggccaggcgcggtggctcacgcctgtaatcccagcactttgggaggctgaggcgggtggatcatgaggtcaggagatcgagaccatcctggctaacaagacatgaaaacccctcatggaccattccggagccatgccagaaaattacccttgctaattacaatgaaataaagagtacttctgtgccaagcagcaagcctatgctatctctacagcaactgtcagggaaaaagcaatccagagtcgcattaaaagagagaactcagatgtctttaccttggtggatgccctttctgcctgcagatgggtcagcagagcccagcgggaagcccatggatagtcagagaagagatgagcaggaagctcgcggacttgttgctacagcaccagccacagggagtcattttcagcacacatccaacatcacccatgaccagaacctggcgcggccaggaactctgcagggtgctctaaaaggccacacccctccttcggcacttgtattcttcatcacgctctcagccccggatggtttctgtctacttccaaagaaagagaaaatcagccattataagaacagtcgaacaaatgagcatcaagctttgaagcctgttccaaaaagaagacagtgaggattcaattacaaaaaatttacctgtcttgcctgtcccattcatgaggtcccagctctgtggcccagtgtttgctctgcttatgagaggcattggcagaaggccctgcccaggctgggttctgatgacaggcacccctcgtcacactccagtggactcttctgacagagtcaggacccctgggggcagaatcctgtgacctaattgagtggcaaccccatttcagccatgtcactgccaccagcagggccccgggctctgtatagccacctcagacagtctctctcaaagcagggcttgggtccccatagcctctcttggctgaggtcacgtctccatttccctccaatgctcctccccaactaccacctctgcaca

SEQ ID NO: 460109 - DNA, 558 bp, Homo sapiens
acttccttttctcaatactatatgaggttcctggctttgcccaggaaacaattcaagggcaagctggaagtgaaagtaaacaggccaggcatggtgggagttactacccctttccatggcaatgaccccacgacccaaaattgtgagagaaggtctgctgtggacaaaatgctaccaaacagcatcgcgtgctacggagaaatcttttgtgaaaggaagaagctcaatgtggccagctttattctgggcataagagcaaaactccatctcaaaaaaaaaaaaaaaaaggaagaaattgccacagccacctcagccttcagccaccaccaccctgatcagtcagcagccacaaacaagaccttccaccagcaaagagatcccaacttcctcaagcctcaggtgattgctggcactttctatcagtatcttagttttttgtttgtttgttttttaatttttgagacagagtctcactctcttgcccaggctggaatgtatgagccgagatcacgccactgcactccagcctggatgacagagcaagactccgtctcaaaa

SEQ ID NO: 460110 - DNA, 905 bp, Homo sapiens
acttccttttctcaatactatatgaggttcctggctttgcccaggaaacaattcaagggcaagctggaagtgaaagtaaacaggccaggcatggtgggagttactacccctttccatggcaatgaccccacgacccaaaattgtgagagaaggtctgctgtggacaaaatgctaccaaacagcatcgcgtgctacggagaaatcttttgtgaaaggaagaagctcaatgtggccagctttattctgggcataagagcaaaactccatctcaaaaaaaaaaaaaaaaaggaagaaattgccacagccacctcagccttcagccaccaccaccctgatcagtcagcagccacaaacaagaccttccaccagcaaagagatcccaacttcctcaagcctcagcactaccgaggttgacgcagctagatggttttctccccggctggttgctgcttctcacccacagaggcggtggagcccttggaactgggcagaacacagggctgccttgtcaccactgcctggctgaacctgaaattgggccgtttgacagaaagacttgaaagggccaccagtaaattcttttttcttttcattgattttcctcttcttactttcctcctcctgaagttggggtcatgtcccaagaagacccacaaggcctggcctgtgggtgcacatgtggggagggtcaggtctgtcggctgaggagggcattggtaggggactttgagcagtgctgctccggagacacgaatgatgggatgggaggctctcccatatctgccgagagcacagcaccccatgactcctgggagcttgtcatagatgctgcagatgagtccttcctcagacgggatatttgctaatgcctctgccagcctgggcttgtcttctcagggcctttc

SEQ ID NO: 460111 - DNA, 1201 bp, Homo sapiens
tgggcttggaatcagacccagctgggtttgagtctttttttattttaatttttgtttttattttttggagaagctcccattctctgaaaaggtctcactaggttgtccaggctggtctcgaactactgagctcaagggatcctcccgccttggcctcccaaagtgctgggattataggtgtgagccactgtgcctggcctaaaactcattattgaattattcactggtgttggctttggggttacctgtctacatcctgtgacctacctaaaggaagccacagcacctggcctgggtttgtcttaactctgttggggtctcagttatctcatctagatatataatgggatgattggcttagatgatctcccagccccaacatcccagcccatcctatgggcttcgtcattgctgggctgcctgcacccatccccttgggctcccatatccttcacctttggaccttctgctcctcattccaccccattccttagggaaactggctgactgtgctcagctgctggacgtggatgacatggtgcggttggctgtgcccgactccaagtgcgtctacacatacatccaggaactgtaccgcagccttgtgcagaaaggactggtgaagaccaagaagaagtgaggaggtgactggctctgtgggcagagatgggcagggtgcccagctcagcagccacggcccgggggttcccttctgctccatggaggcaccagagccaggggcttaggcaagggtgtgtggcgttggttttaactgcattaaaagtacttttgtaaaatcctgtctggcccctcagtgctctctccatacttggcccaggaacctctgcactctgggataataaactctggccataggggattcctcacctgctgaggtctcaataactgcgcaaggtgtttgggaaaggacaatggcctggttcccaccactaaccagctgtgtgacacatacagttaacctctctgggccccagtttacagtctgaaaggggataatgagagttccaaccttatgaaggtgttgcaagagttaaacgagataatgaaatgggcaaaaagctttgcccagtcctgccactcaagtgttcagtaagtggtcgccaaaaataaaaaacttacattttgactctggtggcacttcttctggttatcttcccctcttttcacacttcttctcagg

SEQ ID NO: 460112 - DNA, 2196 bp, Homo sapiens
agcctggagggtggaaagctgaggtgataaacacgcaggatagccgaggagccaagactgaaccacggacttcctgactcccaggccagagctctctgagggtggggtcttcacctcatgctgggctggggcatgaccaggtctgcttgtcttctctttccagagatggagcagaaggaagggaagctctctgaggatgggaccaccgtctccccagctgcggacaaccctgagatgtcaggaggtggagcccctgcagaggagaccaaaggcacagctggaaaggccatcaatgaggggcctcccactgagtcaggaaagcaggaaaaggcaccagccgaggacggcatgtcagcagaactccagggggaagcaaatggattagatgaggtcaaagtggaatctcagagggaggctggtgggaaagaggatgctgaggctgaacttaaaaaggaggatggtgagaaggaagagaccactgtgggttctcaggagatgactggcaggaaagaagagaccaaatctgaacccaaagaggctgaggaaaaggagagcacgctggcctctgagaagcagaaggctgaggagaaagaggccaaacctgaatctgggcagaaagccgatgccaatgacagagacaagcctgaacctaaggcaacagttgaggaggaggacgccaagacagcctctcaggaggagacaggccagaggaaagagtgcagcactgaacccaaggagaaggctactgatgaagaggccaaggctgaatcgcagaaggctgttgtggaggatgaggctaaggctgaacccaaggagcccgatgggaaagaggaggccaaacatggtgcaaaagaggaggctgatgcaaaagaggaggcggaggatgcagaggaggcagagccaggcagtcccagcgaagagcaggagcaggacgtggaaaaagagccagagggaggggcaggggtgattcccagctccccagaggagtggcctgagagccccactggggaggggcacaacctcagcacagatgggctgggtccagactgtgtagcttccggacagaccagtccttcagccagcgacgtgccccagagtccccctgagtccccttcctcaggggagaagaaggagaaggcaccagagcgcagggtatcagcccctgctcggccccgggggccccgggcacagaaccgcaaagccatcgtggacaagtttggcggggcagcttccggccccacggccttgttccgcaacactaaggcagccggggcagccattggtggtgtcaagaacatgctcttggagtggtgccgagccatgacaaaaaaatacgagcatgtggacatccagaacttctcctccagctggagcagtggtatggccttctgtgccctcatccacaagttcttccctgacgcctttgactacgcagagctggatcccgcaaagcgccggcacaacttcaccctggccttctccacagcagagaaactggctgactgtgctcagctgctggacgtggatgacatggtgcggttggctgtgcccgactccaagtgcgtctacacatacatccaggaactgtaccgcagccttgtgcagaaaggactggtgaagaccaagaagaagtgaggaggtgactggctctgtgggcagagatgggcagggtgcccagctcagcagccacggcccgggggttcccttctgctccatggaggcaccagagccaggggcttaggcaagggtgtgtggcgttggttttaactgcattaaaagtacttttgtaaaatcctgtctggcccctcagtgctctctccatacttggcccaggaacctctgcactctgggataataaactctggccataggggattcctcacctgctgaggtctcaataactgcgcaaggtgtttgggaaaggacaatggcctggttcccaccactaaccagctgtgtgacacatacagttaacctctctgggccccagtttacagtctgaaaggggataatgagagttccaaccttatgaaggtgttgcaagagttaaacgagataatgaaatgggcaaaaagctttgcccagtcctgccactcaagtgttcagtaagtggtcgccaaaaataaaaaacttacattttgactctggtggcacttcttctggttatcttcccctcttttcacacttcttctcagg

SEQ ID NO: 460113 - DNA, 824 bp, Homo sapiens
acagacaagttgcattcactgctaacttaatcatggtccagctcactgtaaagagtacatgtcagagaggaggtagcagagccatgtgcgtctgtcatggaggtggggggaggatgcaagggctttttccagtgaagaaaatgaaaactgattcaaactgtgagcagtgttttgtaaacatgtctcatggcaaggatgataatgatagagacaggaaacagccaagggtccccagcgaaaccccaccttcaaacctaaaacagcctgaaggctggaaaattggactgccgccggctttgctcgtctttgagccttcagctcagatgtcacttcctggaggagcctttcttaatggtacagaatgtggaattggagctggtaatgacgacgtcaggacaggttcaaaggaagcccatcacttgagtaaaaatttatagccctgcttgtgctgtgctgtgctgtgctgtgagtttcagttccgggccagcaaaagatttatcaaaggaaagcaacaaggtaagaaaaattaatttcagagaggaaaataaagttgcttgaggggctcttcaatgaccaaaggccataagagactggaaggcaaaaggacccattaatgtaatccaaacatcagtctcctgcagcaaagaggtgaatggagaagggtggagagtagctgtggacgagtgaaaaagacatcgcaccatgtcttcaaattacatccagcaacttcatatgaactatgaaacccttgttgccacaatagtccctctttgtttgaactactacaagaataaagaaatttctttctaatcttttgcagaaga

SEQ ID NO: 460114 - DNA, 366 bp, Homo sapiens
tttggacacagactggtacagaaggaagaccatgtgaaaacacaagatgtcaaagcaagtaagaaaaattaatttcagagaggaaaataaagttgcttgaggggctcttcaatgaccaaaggccataagagactggaaggcaaaaggacccattaatgtaatccaaacatcagtctcctgcagcaaagaggtgaatggagaagggtggagagtagctgtggacgagtgaaaaagacatcgcaccatgtcttcaaattacatccagcaacttcatatgaactatgaaacccttgttgccacaatagtccctctttgtttgaactactacaagaataaagaaatttctttctaatcttttgcagaaga

SEQ ID NO: 460115 - DNA, 1036 bp, Homo sapiens
ggacacttctgagcactagcacagcccactgcttcagtctggcttgctctgcctttctacagcagtgctatggtttccctgcctctgattttgattcaaaaccttttcattgctctgtccatccctgtcgattcaagtatagctgtcgactggagcacaacatctacaagccagggaggacccctggagggtggcaggggccactcttggaagacagagaagtgggcatcatttggaatggatgtgagaactatcctcattgcaacttcacagagtgctgaggaaaggcaacaaaaagggagtatggagaaaaataagaattttaataacagtgttcagaaccttcaggagtccatgttcatgcagtgcagggattggcagacttctctaaaggaccagataataaatatctcaggctttgccaacctatacctacaatctagttgcaactactccactctgacatcgtaagacaaaagcaggcataaacaaatgggcatggctgtgttctgataaaactttatttagagacaatgacactttaatttcaaataatttgcacaagtcatgaaatatgattcttctttaattttttcaaccacttaaaaatatgaaattcattgtgagcccacaagctattcgtaaacctacctgccttaatctgctgatccctagtgacatgaaatgagacaataagagtcaacactggctttgagatatttttcatcctggctgtagtgcagtggcgcggtcttggctcaccacaacctctgcctcccaggttcaactgattctcctccctcagcctcccaagtagctagaattacaggtgtgtaccaccatacctggctaattttattttgcatttttagtagagacagggtttcaccatgttggccaggctggtcttgaactcctgacctcaagtgatctgcctgccttggcctcccaaagtgctgggattacaggcgtgagtccccgtgcctgtctggccccattctaaaactggtatcaatcccgttgttccttttgccca

SEQ ID NO: 460116 - DNA, 3321 bp, Homo sapiens
cagtgactttctgtgtcattcagaagcaaaaacattagtaatgctaacacagtgttttgaaaaaggacggatcagatgccatcagtattggccagaggacaacaagccagttactgtctttggagatatagtgattacaaagctaatggaggatgttcaaatagattggactatcagggatctgaaaattgaaaggcatggggattgcatgactgttcgacagtgtaactttactgcctggccagagcatggggttcctgagaacagcgcccctctaattcactttgtgaagttggttcgagcaagcagggcacatgacaccacacctatgattgttcactgcagtgctggagttggaagaactggagtttttattgctctggaccatttaacacaacatataaatgaccatgattttgtggatatatatggactagtagctgaactgagaagtgaaagaatgtgcatggtgcagaatctggaccagatacttgatcttaagcaggccacatatccaggtgactaacagatttattggttaaacatattttaaatgcgctgatgatgtatagatatgctgactcacagatttcaaaagtaaatttagcatttgtattccaacagtcattctaacaagaaaactgtaagagaatttaccaattaggtctaacaggaaaaaaactcataaacaaatttatgtaatataattttctacttcttatgataacagcaagaaagaatatattaatacttggtgtttagtgacaagtgttagaaaaaaacttgaagcttcaagagaccacaggaatttagaaagcctcctatttgaaatggtagaaaatcatatctatactatgataaattctgtgtctgtaacttagctatttatttgatgaattcagtactgcttttagctttaacaatataactccctttatgaaactcttcatcaatatatttgtttaaccactctgtctttggtgtctaggcacagtatatctttttacaccagtgcattctggatctcttatcaaataagggaagtaatcagcccatctgttttgttaactattcagcacttcagaagatggactctttggacgccatggaagcaaaaatgtatcaaaagagtaataaaaacactgtgcgtgtttcaagcttgtaaaccaatgatgtgctgctgtggtgccaacagagacttccaaatggattatgttaaatggccgtcatttcatttcccaaggttgattttgagcagtatacttggtggaactgaaaacaaagaaattaaccatgtatagcaaattcaaggtttctttatagaaaatctttcagcctccatcttattaaatagtgacaatgtggtaagttttgaattacatgaactcattttgtcatagatttcaattaagagtaataaatagtattaattattctcttctatgataagaagtatatcttatgcttatttccgctggaacatatatatataagaaatgctatggccaataaaattgaattttaatgaattatcttgcagcataatttcagaagttcctatataaataaaaatttgattttgtatctcctattaagacataataattatactaatcctcacataaaatacataaaataaagatatacctacaagtataatatgacataatttatgtaatataatataaataattaagatataattatttcttaagacatccataagtaattttaatgtgggatatactatccaagaaattaaagaccttagtctcacagtctctagaaaagtgtaaaatttacttcctttttttttcatggcaaggaagtacaaataaatacaatccactactgttccagctaataagtttatagaaagttaccgaaaacaataaaaaatgatgagaactctaaaagattcaagttggggttatacgttctttagtttcctttatgtcaattatggaaaatatatggcaagccagtatggggttttgtactcgttaaagacaaataacataaccggtgggaagtattggtgaggctgctccttgttagaaaagaaataatttgggggctgctttttattagaagggaaatcttgccaaggactcttttaccttccctatttgcctaaataatttctttctagctcctgtgtcaatattgatagcagttatgatgtttttttctgtaagaattcaaatatgccaaaaatatgacctattgattcacacagccacttgaaaaatatacagaatacagaattataatcataatgattagtttcaaattagcctagtgggaatagagggaattcttccttggtttttagtggaatttcacattcagtatttttcttttaactttaaaaaaggaaaacaaagtaaatatgattattgactttgaggcatttccaacctaattccttgttatataaaccgcatttttctaaattttaatctttataatattcaaataaagtttttccaagcaaaaataatatttttaaaagaagtacagcacttttaaatttttttatatcttcatttcaaacccatatatctcttggttaaaaaaaagataattacagttttaagtaaaaataaatgattcaatagatgataaatataacctcaaaatactgaaatataccaaagaaatttaatgtatttattacaaactagacatacctgtaaaataatagaagttttagatcaggaagataaattaatgatatgaaaataaaataaatgaattagaaaatctacacatatgaattaatatttctctagggagagaaattcttataccctaaaaaaagaacacgtattcttttgacgttctcatggatcagtcacaaagaatgactgcttcctgtgtcacaaagaaagttgaaaataatttcagactcagtatcatacatagccatttatctgactacaagacagttaagtaaaacatttacaaaaaaataatttttaatctatatttgaaactaaattaatacatatctaaatatcacacagattaatatgaagaatctcaatgaaaactatataacagaattgaatgatatcaaagcaccttttataaaattttgataaagttacataaaggtaaggttagaggcctaaaatatatatcctcaaatataaacatagtaagcatttacttgagaagctggaaaaagtacaatagagaaaatctaatgacataatgagatctcatttgtgaccaaattatgtgtgagctattcactggcaggcagagaggatatttatgtgcatgaaacacttttggagaaaatatggaattgac

SEQ ID NO: 460117 - DNA, 977 bp, Homo sapiens
actgtaggaattttgaaagtgcaaaaggccaacccaaaattctaccaacaaaggtaacctactggcatttgggtatattttttctctgggccttgtcctccgcctttatctgatgctgcagatgtaattctgtgttccgcttgtttgcttcatgttgtgttatgaacatgtccccctcaaatctccctgggagccttccagcgatcagccccctttgactgtgtggctctggccttggggaagagctgagggtctcctgccctaacggatggtttcagggtgtgaaggtcaaaggcctcatcctcatcagcccccagaaccctctgggtgatgtatactcccctgaagagctacaggagtacctggtatttgccaagaggcacaggctgcatgtgattgtggatgaggtctacatgctgtccgtgtttgagaagtctgttgggtaccgcagtgtcctaagcctggaaaggtgaggctccctgacacagctaactcccccagtccctattatcccacggagccctggccactttctggctcagcccacagggcatggcctgcccagagcaattccatttccacccagctggtcccactggtcctcagatctaatgagaagcagggacggttgggctagattagtgattttcaagttgttctgtggaatttctgagaactccaagaagaggcctcaggatcccttaagttagggctgagtggatggcaaattggcctctttgctgtttcctttacctccagagtcgctccagttttattcattcattcatttactcattcatgctctcattcactcagcacctctggagccccttacacacagagtgtgccaaacacctctggatatttaaatgttgggctttttcattaggtttactgtaagcaaagcatttgtggccaaaatacctttgggaacacttggagcagatcatcctcaaggcacactggcccatgcctgt

SEQ ID NO: 460118 - DNA, 1485 bp, Homo sapiens
actgtaggaattttgaaagtgcaaaaggccaacccaaaattctaccaacaaaggtaacctactggcatttgggtatattttttctctgggccttgtcctccgcctttatctgatgctgcagatgtaattctgtgttccgcttgtttgcttcatgttgtgttatgaacatgtccccctcaaatctccctgggagccttccagcgatcagccccctttgactgtgtggctctggccttggggaagagctgagggtctcctgccctaacggatggtttcagggtgtgaaggtcaaaggcctcatcctcatcagcccccagaaccctctgggtgatgtatactcccctgaagagctacaggagtacctggtatttgccaagaggcacaggctgcatgtgattgtggatgaggtctacatgctgtccgtgtttgagaagtctgttgggtaccgcagtgtcctaagcctggaaaggctccctgacccccagaggacccatgtgatgtgggcaaccagcaaggacttcgggatgtctgggctccgctttggcacgctgtacacagaaaaccaggatgtggccactgccgtggcttccctctgccgctaccacggcctcagtggcttggtccagtaccagatggcacagctgctccgggaccgtgactggatcaaccaggtgtacctgccggaaaaccatgcccggctcaaggctgcccacacctatgtctcagaagagcttagggcattggggatccccttcttgagtcgtggggctggcttcttcatctgggttgacttgagaaagtacctgctcaagggcacctttgaggaggaaatgctgctctggcgccgctttttggacaacaaggtgctgctgtcctttggcaaggccttcgagtgtaaagagcctggttggtttcgctttgtcttctcagaccaggtccaccggctttgcctggggatgcagagggtccagcaggtgcttgcaggcaaatcccaagtggcagaagacccccgtccctctcagagccaggagccaagtgaccaacgcaggtgagctggtcattgtctcgtggccagagggcccagcagccactgtggacctggggcgttctggggctgcagaagactgactgtggatgtgccatttgccaggaaggtatctaacttggctttgtgcctgaagaactgtttcttgtctttcgctgtagcagtgggaaactccttaagctgtggttcagcctgggccctccctctctcctattaaacaaaactaggagagtccatatgtctccattatatgtgccattttcttcatctctcctctccctctcttaacttctctttcctatatttaattcgtttcctgtctttcagatcgatcgttgttgtttctaacctactatttaacttatgcattgacttttcaatttcaatgtttatatttagtacattttcagtctccttggtcttttaaaaatataacatct

SEQ ID NO: 460119 - DNA, 2216 bp, Homo sapiens
ggcgatgatggtcattaagttcaagatggggaggggttggggtgagggctggcctgtctgaggaggggcatttgcagtgctggagcaagccatggaggacaggaattgctccagtcagaggaacagcaaggacaaggggcccaagacggcatgtactagaggctccacgcatagaaaaagccagccatccccagcgctgtaactgagtggccagtggtgggaggtgaggtcacagacgcggagggggcatacatgggtctttgtaatagttaattttatgcatcaacttgactggatcacagtgtgcccagatatttgatcaaacattattctgagtgtttccgtgacaatgtttttggatacaatcaacatttatttaattggttgaagacctgaatagaacaaagagttcaattctctcaagtaagagaattcctcctgtctgactacttcagaattgggacattggctttttcctgcctctacactacaactacaccatcaagccttcagacatggaaaggaaccacactattggctctcctcggtcttcagcttgccaactcaatgcagatctttgcatttgtcagccttataaccatgtgagctaattccctaaaataaataacagcggtaaacatgggaagtaattatttgtgcataattaaacagttgaggaagggaccttggcccaaactgatgatgctgtttcgagtgtgcacccttctgctggcccatatctgctggcccagcctggagaccaggaagctgcccaaggtgattgagtcactcgaacagctgcccctgccagggaaggaatgtgccagattccactcccccagcatcctccagggccccagtactggaaggcaaggctgcctccagaccatactccaagtttctgagtccccctactcattctgtctgtcctgcccttcctggctctgtggtcgctggagaggagagggcacgcctcagaatgccagcaccagaggggcctgcaggatcttccagcccacaggaatcccaggccccaagaagcaaagtgaccagccagaagccccagggccagcgctgggcaggctggacccccgagtgactgggtcataacactcctctgctctccgtaccttctactgtccatgaggggagccacactggcagctgattagatggtgcccacccagattgagggtgggtctgcctctcccactccactgactcaaatgttaatctcctctggcaacaccctcacagacacacaatactttgcatccttcaatccaatcaagttgacactcatattaaccatcacaggtatattaatgtataaaatatatgtagatgctaggctatttatgtattaatcaactgtctatgttattgagaagacttctggttggcagtaggctattagtagttaagcttttgggaagtcaaaagttatatgcagatttttaactgcaagagggattggtgcccctcaccctggagttgttcaaaggtcaaccttgtatatattctgtggttatgttcctgtggagaaccctgagtaatataccagataatggtaaatgatcataaaagagcccaatgaatttggtggatgctatgtgccggacactgtcgagtcctccttactgccaccccatgcatggggaccatcattatccccattctagagagagacaggaaagcccaaagtggcaagaaacttgcccaagagcacagaagcaaagctggggtcctaacacagtcaaatgattcccttcgaggggctggctttcctgaaatcatgggggaggggctaccctggaaccgcccccaccatggcagctccgaggtcctcagaacatagtttgaaagccccccgtcctgccccaccccaccaccctccagcactgtcctgtgtcatctcaccagcttagctctgcaaaggaaaccctctctgcttgcgttttaaattctgtgtgtgacatcagatcgtgtgcattcttccaccatgaggtttttttcactcagcattgttgatgagatttatctgagttgacacgtgtagttctggttccagcatttttactgctgtatagtattccattatatgacatttccacattgtacccattctcttgggtaaaggttgatttttaaaagttgacattgataaaatccctaatagctcttttcagctccatatagggtgtctttttctcccc

SEQ ID NO: 460120 - DNA, 1570 bp, Homo sapiens
atgtaaaaatcctgctcagtagtttaattggccatcataacggccgatgtctcattgcattgctgaaaggaaagcagatccccatattcctttcttgaagaacaaagttactgtcatacatgccttctccgtcctatttatcactaccaaggacaggacactgaagaccagttttccaatcccggaaaacgtgtgcagaacattctgcctgaggttcctgcggcctgagaaatggaaacttattgagcaatgtcatgtcatcagcatccagttagccctgatgtctaatgagtgtctgcttgtttgcataatgcagaactggcctgtgtgtgccctgcatgtgggcatgggtgcctgccctggccgtgagcatcagcaggctcagggtagcgtcggggaagagacttatcatggccccacccatatccatctgctcatctagaggaacggggccctggtagggcccgtccttcccctcttgcatacccttgcccagggacaagccctttctaatggagccctgccccaaaagagcttcagaaagacctttccgcatctccccctgtaggtgtcacccccacacccactgcttccacttctttctcgggcttactctcagccccacctctcctgttggcattcatgagttgcctccaggctccctactgatggagggagcttgcttttggttggggtcggggttaaccctttagctccctgtctacccccttgtgatggacttgcgccatccgctgggttgagcagtctccacccagttacatctgtaggcgggcaacgttcgtttccacacgagcaagcagtaagatgtggagtgatgggtgaggtgaatctaactcatttggggccgacgatactactcccagcgtagatcagcagatgattggaacagattctggagatatatatcgggctcccttgccatttaccatgaagtgatgtgtgtgcacgtggcacattatctgcaattttactcagtgaaataaaactcttagcatagtgccttgtatatgataagcactcggtaaaggtgagctgctatgaatattgccattattacaactacttaggagcaaaagcaatacatcctgccgtgtaccttcggtaaaggtgagctgctatgaatattgccattattacaactacttaggagcaaaagcaatacatcctgccgtgtaccttcggtaaaggtgagctgctatgaatattgccattattacaactacttaggagcaaaagcaatacatcctgccgtgtaccttcggtaaaggtgagctgctatgaatattgccattattacaactacttaggagcaaaagcaatacatcctgccgtgtaccttcggtaaaggtgagctgctatgaatattgccattattacaactacttaggagcaaaaacaatacatcctgccgtgtaccttcggtaaaggtgagctgctatgaatattgccattattacaactacttaggagcaaaagcaatacatcctgccgtgtaccttgtaaaatgccctgttgggcattggcagaagtttgagcgttgctatgtctt

SEQ ID NO: 460121 - DNA, 3447 bp, Homo sapiens
gggtgctgtcctttctccactcaaagctacaagcaggacaggaggggacgcgtgaatgccactggcaaacacagatggcatttagagcacggttctccctaaggcttggtgggtacccatccgtggctgcaggaagcagttccgcgggttctgcctctggtgcccagcagaagcgcggaggatatgggctccaggagttcaaacattcctcacagccggctttgcagggctgccaagggcgtgacttgctgttgaagaccacagagttctttgtttccatctctgctagaagcggtgcacacagtccccctcgcactcactgctgctccctcaaagctagagaaccagagctgagaagcagaaaccctctcagtggcctggcccgtgctgcagacagacagagcggtcaaggaaggcctcaggaccagaggcagagagaggaatggagtgagagagatcaatgctggacccaagatgattaacgtgccaacctggggcactggcgctagggagatggtcagatcgatggattccaagcaaatgaagagcctggcgcattcggcagccaagctgtgaagttaaacacagcgacggggccaggcgtttggtgagcgatgagggtgatgaaacaggacacatatatcttgggaaacaacactgagaggccagatctggttctgaaaaatgtctttgctccttgtcacctttcaaaggcaaaatcacagctctgacaaataccaagaagaattcaagaattcccaggtgtgtctgcagccgtgaaaatgtgacatgagtcacagtgtcttcggaggaaatgaaagaccacaggacggggacatggcatcatgaaaaaagatgctttgtgattttcaacatatggtgacacttttcctaatttagagggggaagctgggttttgagttttcttttatcctccctctttgttaaaagcaagagaaagaagatttaaagaacatctgtgtattcaaatgatagaaatagaattatacactttcaaaaacaagttctagtatttttgtctctttcaaagatttccgaagcctatagatttctctcgtgtttgtgagagcatttcctctgagaccttagacatagtgttgaagttgaaatggtttttgtctttttcccctttctgttaacccagcccccacttcattctgttaatctcctttaattggacttaagataagactgagtatgttcaatatttttattgaattgagttttatgtttccagtctggatttatagactgttaaatagaatgttttacgtttctctctctcgcaaagaaaataacaaatacgtgtgggacagagccatcagtcaattatatcagtggattgttggcaactcacagggggaaaaaaaagagcattttcactctactcttaggggaaagcaattatatttaagagcagtagaaagccaaaactagcctggaacttcaaaacgcctttcttgactgaccaagaaaaggtacagtgactacaatgacaaaccagcccccagctcttttagaaatctaccctgcctcatgctaaagagaaagtaagtgatgtttcagcctcggcgaccaggcaggaatagaaaaatacattgacagtagttggatagaccttaaaattaagtaaaaatttcttaatatacaagatctcagttttcccacaaacctcctttctgtccagaaatttccatgccatttactgcctgatcatgtcaggaatgacgttcttccttgttcttgattttccttcctggaatgttttaatcctgcctctccagaacacttttccctacttcttctaggccctactcacagcaatgtagctgacacatagcattagcgtgcaaaacctcaaatcctttctgacttggaacttcacccaggaaagacctctagcaaaagtgctggccattgtgtcacaggacaaacccctttcaaagaacaaagccatcatcatctcaaaagccacagtcaccacctggaccttccgtcctgaggaaaggaatctccaccgaatctagggggaagacccccccaccagtctgtgcaaaagatgaagaattgagtatgcacctacctgtgcccttccatttccacctcttcccaccttccccgtttctttttccgttcatttttttttccactttaaaaacatccaactttgccttggggatgagcagaatgaaatgtcacttacctataaaaagagacagaagagaaagccatgcatcacattacacacaagttctttgaaatcaaggccagcttccgactttgaaactgtaacaatgagtgaatattattttttcatcctacctttctatatttaatgaaactcaggagttcgcaagtagcctatccccagggcccagtctcccttcgtgattttccttttgtttctttgcctcctccgtccctcttcaccaccctagccccacaccctctgtccccgcttcatggatgaaaggtcaggaaggaataaggggggaggggtgcacagacccagagatcaaggccagccctcagatgtgggcagcaaggtttcgaggcatgaggagccgcttttcacctcttttctcacaggccacagagatgggacccagggtcagtgccggctggtgcctctcgggaggagggaggaaggtcagctccctgcagggtgattttccacctggtggcttctgggctctttcaaatgactctgctctgagtcttcctcctctctccctccctcaccctcaccccctccgccctcctggtttgggtgtgaatgaattcacccaaggtctccatccccctcttcatcctgcagcatctgtctttcagacctgcttctacagaaaacctcattattgcagcaccctgaggccaacaaccacctgaatgggtcattgtgttcagtcccctgcctcaatacatgatgcaaactggcccacccgagtcctacgggacactttgagaaccctgagatactgagtccccgccttgcccggctcctggccgcagaggctccctgtcttcatgcaacaagctccttgtggccgactgattcggttctgtcggctgtaaggaagccaggctctgagcattctacttgcaagaacagcccctcacccaccacgctatgtagcggatccttcacgtgctcacatattggaaaattggcttcagggtcctgccagtgtcttcttcttcttatgcctgaataactcatttccttttagactcttcttaaaggtttcagttttccatctttcctcctccaagctcctctgagaccctccgtggaggacagctcagagctaagccctggagagaaaagcagccacgtgtcccccgattctgttgctgcatcccccaaagagatttccaaccaagatgctctgccagaaatggaattacggtcaaatattgcatccc

SEQ ID NO: 460122 - DNA, 1542 bp, Homo sapiens
cccaggggatggcagcactccgggacagcttgggggaggaagatgagagttcaagtagcatccaaggtggctgtggacagccatatggagctgttaagtcaggcggctggatggacatgtggctctggagctcggagatggcttttccctgccgcaggtccctgactgccaagactctggcctgcctcctggtgggcgtgagtttcttagcactgcagcagtggttcctccaggcgccaaggtccccgcgggaggagaggtccccgcaggaggagacgccagagggtcccaccgacgctcccgcggctgacgagccgccctcggagctcgtccccgggcccccgtgcgtggcgaacgcctcggcgaacgccacggccgacttcgagcagctgcccgcgcgcatccaggacttcctgcggtaccgccactgccgccacttcccgctgctttgggacgcaccggccaagtgcgccggcggccgaggcgtgttcctgctcctggcggtgaagtcggcgcctgagcactacgagcgacgcgagctcatccggcgcacgtgggggcaagagcgcagctacggcgggcggccagtgcgccgcctctttctattgggcaccccgggccccgaggacgaggcgcgcgcggagcggctggcggagctggtggcgctggaggcgcgcgagcacggcgacgtgctgcagtgggccttcgcggacaccttcctcaacctcacgctcaagcacctgcacttgctcgactggctggctgcacgctgcccgcacgcgcgctttctgctcagcggcgacgacgacgtgttcgtgcacaccgccaacgtagtccgcttcctgcaggcgcagccacccggccgccacctgttctccggccagctcatggagggctccgtgcccatccgcgacagctggagcaagtacttcgtgccgccgcagctcttccccgggtccgcttacccggtgtactgcagcggcggcggcttcctcctgtccggccccacggcccgggccctgcgcgcggccgcccgccacaccccgctcttccccatcgacgacgcctacatgggcatgtgtcttggagcgcgccggcctggcgcccagcggccacgagggcatcctggcccttcggcgtgcagcttgcctggcgcacagcagtcctccttcgacccctgcatgtaccgcgagttgctgctagtgcaccgcttcgcgccctacgagatgctgctcatgtggaaggcgctgcacagccccgcgctcagctgtgaccggggacaccgggtctcctgaggccagttgggcggcttcagccccgggcctccaaccatgtccatgctgagaaggcagctttcccgctctgggtaccttacgtcctgcccagctctgtgcacctgaaccccagctgcgcactgaaatcagctggggtggggggtgtggaaaatgcctacatcctggctccatctcccgaagtttcgatttgattagtctggggtggacccagacatgttaagtattttttaagttcctccagtgatgc

SEQ ID NO: 460123 - DNA, 959 bp, Homo sapiens
ctactgttctagaagcaggcttgcctctctctgcccacctgtgaccaggcaggtagtgggctgatctaggtagggaagaaccacgagatggagaagcggcagcccgatcacccccaaacctcgtcagcatccccacctggccccaacctgccagccttcaccaggctcttaacaagaggccagttctcagccagcctctctcctgtccttgagcggcaagtgggcagctgagcagaattgtagaagcagtttgtgaactacctttggagcccgtaaagtggagatgagccccatgcatgtcactgaactcagaacatggggagcctgggttacagatccacagaataaccaagaccagcgtggcaggggcctccaggggccgaaacctccaggagagaagtcagtaaatgctatagaaagcacagcctgtgtcgggaatggagatgaaatatttctttgttagacatgccatcaaaaagtcccgaagttgaggaagaacgcaggtttattttcaaataaatgctcacttggactttgtgccaaacttgcggcgtcggaagggtgggaaagcggtgtcgctctgcaggacccagaccgccagggggcaggccatgcctccaccagactgcggcgagttttgactccggaggactctccaagcttcgctccttccgaggcccagttcctggtggaggagacctcccagtcaccagcgactcaggtcccgctcaggacgagggcacagcagagggcgccttcgacaaatgcacagtgcgcgttgttaacgtggctacatttgccttcagaggcccatgtggtcaggaagcagacgaggatgagtgctgcagggcacagaagacctttgagactcttacctctgctacaccagccacaccatcagtggagcactgaggcccctgcattccaacatgcaaactctccattcagacctaaaacat

SEQ ID NO: 460124 - DNA, 2604 bp, Homo sapiens
cctgacgacagatgccccgcacgctggccgggaccgggaagggcggtcaagggtggaaaggggctggcggctgccaggcctggcggagtggagcggggcggggcgcagcggggcggggcgggcctggagctgcacctgcttctgggcggacgcacttggcgcgcggcgcgggctgcagacggctgcgaggcgctgggcacaggtcagacgtccgtacccgcagggggctcgaacctggaggagggctcgaagggagagggggccccgccaaggagcggggctgtgatggagaggaggttccgactcgcaggggacctgcgggggaggggacgcggacagggaggggctctgggacaggggtgaaggctgcgctaggggaggacgggaggggatggagggccctggtgtcgcggaagcccagctggggccccctccgggctgcggaaccggtgcgcacactactcccaccgcccccgagtgcctctgtccggctggccgcggccctggaacgaatattgctcagtcccccgcgagtcaggtctgccgcgttgcccggcgcagtgggggagaaatttgcgggggtggccctgtctagggccagagaaacaacctctgaagctttgatccagccctagagggaagaaagatgtgagtttcagccagggaaacgtagcactttaagaaatagaaaccctttcaaaatttgagggcagggtcgcatagccttccaaacaggcctgcctacagcattttacctgcaattttacactcattttaatagaaaggatggcttattgttcatgagagacgtgtactgtttttaaccagatgtgtaatatcttcagtataacctggatgttgtgcagtgggaagttatggaaagaatcaggacacgtggttaggtaggggcccaggggcgtcagacttagctctttgtgacagtgagcttcttggtttaataaggatattggctccctctgttcctggggtttctgggaaaagatatggaactgatatgaaggttttattgaatatggcccactgattttacaagtggaggtgactgagataagcagaaggccacacctgttcccatttattccatgagttcctcccacacccttctggttgatgttggttgtgatggtcgaggtaattgaatctcacatttggcaccagttatttctgtttctcatctcccccctacctgcagttaaacatcagctgctatacttaactgttcaaagtacagatgttacctgtgttgggtgtaatcaaaagattatctcttttcctcaaatgaaaaatggggtgtaatactcatcccagctttccgcatcctggattctttgtgttttaataattgtttactataatctatttcatatgttctaatgtatacaatgccaattgatgtttgcttttatgtatttgcagttttgatttcttctttgacccaaagttatttagtgacttaaaaaatgtttaagggcgagaccctgtctctaaaaataatagtaataataataaaccttatatttgacatttgctaagagagtagatcttaaggattctcattacaaaggaaaggaaagggtaccaggtaaggtgataactctgttaattagcttgatcataccaatcatttcacaatgtatacatatatcaaatcatcatgttatataccctgagtatatacaatttttatttgtcaattataccgcaataaagctgaaaaaatattaaaggacatccttcaggtcgaaagaaaatgaggttttagagttattaaaatggacagaaagaaatgaagaacgctggaaatggtaaatatgtgattaaatatcaaagaatatatatatattcatgctttgaaaaatgtaaaattgcttcaagaaataattgccacaccattagtttataacctagactttatatattcttaaatcttaaaaactttataacaagcccaaacataaatatgatatgtacatatatgtgtacacacacacgcacacgtctctgcctgtttattagagtggcttatttagtccattcatatatattaatggcttattttgtgtgtgtgtatgtatgtgtgtgtgtgtgtgtgtgtgtgtgtgtgtatgcatgaaggaaggggtaggaaatagagctattatatattggaacaaagtcactatattttatcagaattaagttactattaaaatagaccatggtaacttcaagatgcatactataatccctagactagagcatgcagtaggaaaaaaatatatatagcttaaaatatgaaaaaagtaattaaaatggtatactaaaattacttgttagacataaatgacagcaggaaatgaggcacggaggaacaaaaaaatgcatgagtgacagaaaacaaatagcaaaatgacaactataaatataaccacaccaataattacattaatatgaatggactaaataaaccgtcccaataaaaaggcagagattgtcaactatgcaaattctcaaggaatttcccttttatgcatagttttgggaatgctagacttatattaatggaaataagccaagaaagaaaaataaatggcatccaagaaa

SEQ ID NO: 460125 - DNA, 1554 bp, Homo sapiens
tggttcctgcttctgccgctgccgccgccggatcccagtggcccggcgtgctcggctcccacaggcctgcagccagcatcgcaccaaaccttcggggggccgcggctggagcgctcggccggcgtgggagcgccaaggccgcagatgcaatcttcttaccgcgaagaagccaggggaataggtagccacatcttgtttgcagataagaaaggaagctaacgcagtatctgcaaagccaggagtctgactcagtacttttctcactcatgcatacaaagcagctaaaaatgacacagcttatttaccatgcccctgacactgcactgagcactttatgagcttgaactctgttaatcctcacgaccacctcatgagactctccagaaagagcaacagtaatggagtacatgagcactggaagtgacaataaagaagagattgatttattaattaaacatttaaatgtgtctgatgtaatagacattatggaaaatctttatgcaagtgaagagccagcagtttatgaacccagtctaatgaccatgtgtcaagacagtaatcaaaacgatgagcgttctaagtctctgctgcttagtggccaagaggtaccatggttgtcatcagtcagatacggaactgtggaggatttgcttgcttttgcaaaccatatatccaacactgcaaagcatttttatggacaacgaccacaggaatctggaattttattaaacatggtacgtttctttccgatcagttgggtgctatgtgctcagctttcctgctgcagcttcatttaatgcagagtggtgtttgaatttggcttagatgggctggcaggcatgattttaaaaaatgtaatcatcagtaagaagtacttccatgttaaagatgcaaaaaaaaaagtcttcattaaaatttctatttaaagattcttgatcatattttagtagtatttctacaaataggtaattaagaagaatgtattttggccgggcgcaggggctcacgcctgtaatccgtgcacttggagaggccgaggtgggtggatcacttgaggtcagcaattagagaccagtctggccaacatggtgaaaccccgtctctactaaaaatacaaaattagcctggcatggtggcgggcgcctgtaattccagctacctgggaggctgaggcacgagaatcccttgaacctgggaggtggaggttgtgatgagccgagatcacaccactgcactccagcctgtgtgactgagtgagactctgtctcaacaacaacaaagaagaatgtattttaatttaacagttcactaaaaagtttattcatcagttatgcagaaaagaaaggcttaatgagactccttcgtctgagaggggaataaacactttgtcactaattaatcttgaaggctgaattatttgttcctttcttgtcacatcttgaaatgttattaattcatttcttgcaaaaatgtagtatgtaggcagtaaatagctatccacagattcactctctttcattggcaaagtatgaatggcaagtgatatatttgctt

SEQ ID NO: 460126 - DNA, 1957 bp, Homo sapiens
cataggtcctgagtgagtccccctggcccaccccattcagctgagatctgacaacatatgtttggggacaaacagccccagcagccaggagcaggccacatcatacatagtcagcatcagccatggtcccctcccactctcctgggggaaaaaggtgctttacaggcagcgtggcatccgagcatccccatggcgatgctgaggtcagacctcactgtggtgatctcacgctggggccaccggactcaggccaggctgggagtaggctgtctagccattgctggctgtcattgtcaccaagggaaggggagaagctgtgaagagttgctctggaaaaaacaaatctgctcataggacaatgggtctgggtgaacctatcccggccctcttggctgctgggccagggcctggtttttcacagggcaccattgagaccacaggaagtggcttcctgcctctgaagacagcacacaactgccctagaaagcgctcttgtcacccctgctgctggagtgcaattgcacaatctcggctcattgcaagctccgcctcccaggttcaagtgattctcctgcctcagcctccctagttgctaagactacagggtagagaatcagaggcttgtagatgtctttgccacttccacgggatctctgggagctggaaactgagctttaagaaataactatagtgcaaagggaactaagggaaaagggttcagcccaaagcagaagggactgtgatgatcacagtgacctcctgaggccagcatggtggtagcagccagagacagcagctgagtgagaccctaagggagggatgagccaggcagtgtgtggttggagttctccctacacatctcgttttcctcacctccagatcacacacatgcacacacacatatgcacccacacaccccttacacactccggcccgaaggtttctgcaggactccttcctggcactctctccagtgctgccagcgtcgcaccacactgcaaggctttgcaaactttccttccaaagtgaaggagaccctctggccatctgaggctcggtctgaagcaacagcctcagagcgcaatctcaggcatgcaggaagtgcaggaaggccacgtgccacatacgttatctcacttaatctcattagcaggaaatgtctttaaagtcttatgttggtgcttaaaaattcctgagcagtttagcccttaataaagccaggctttttaaaatttgaaatgaggttgagaaaactgtggtcatcggaattcccttcagagacaacacttagctgagtctcttggttgtagggaggaggctgatggcggcagagggggcagtggggatggcagagagtggggggagcatgccaaggggacatttaagtgagaaaaggtgatactaaatcgctccatattatgtggagtgaggaggaaagaggccctgcagatgagagagtttccaaacccacccgcctgcagggttgtttccagtccaaccagaccaaaggcctctcacggccctcaaaccgcctgagcccctgcccctggctgcctgtgtcggagccgcctgctgtggaagccaccttcccacacagttcagtcttcatcatgcctcgcttcccaaatgccatactccaccccaatctccaaaaatgggttcagcctcttccccaagtaaccctcaagcccgcatccctggagcagcagacccaggtgagaggtcaacgccggcaaccccgggcctctcctttcctgcgaggcccagccttcagcaaaggctgtgaagctgactgcagttgcctcggcagcagcctggtgctgaggaagacgcccagcctggcacaaccttcggttctgactcccatcacctcctgttgacagcgtctggctggcatcctaatcgctcattggacaaattgccagggcagcggtagacagctggcatgtgttaactc

SEQ ID NO: 460127 - DNA, 806 bp, Homo sapiens
cataggtcctgagtgagtccccctggcccaccccattcagctgagatctgacaacatatgtttggggacaaacagccccagcagccaggagcaggccacatcatacatagtcagcatcagccatggtcccctcccactctcctgggggaaaaaggtgctttacaggcagcgtggcatccgagcatccccatggcgatgctgaggtcagacctcactgtggtgatctcacgctggggccaccggactcaggccaggctgggagtaggctgtctagccattgctggctgtcattgtcaccaagggaaggggagaagctgtgaagagttgctctggaaaaaacaaatctgctcataggacaatgggtctgggtgaacctatcccggccctcttggctgctgggccagggcctggtttttcacagggcaccattgagaccacaggaagtggcttcctgcctctgaagacagcacacaactgccctagaaagcgctcttgtcacccctgctgctggagtgcaattgcacaatctcggctcattgcaagctccgcctcccaggttcaagtgattctcctgcctcagcctccctagttgctaagactacaggtgcgtgtccactatatctggctaattttttcatttgttttttgttttttgagacagagtttcactcttgtcacccaggctggagtgcagtggtgcaatctcggctccctgcaatctccgtctcccaggttcgagctattctcctgcctcagcctcccgagtagctaggattacaggcgcccaccaccacaccatgctaatt

SEQ ID NO: 460128 - DNA, 1687 bp, Homo sapiens
tcttgcctagattgagcttgagcccttgtaaatccttgcatttatcaatagtacattccatgaatggggttcttatttccaactctgtgaccttaggcaagcagcttgaccttgctggaccatgtgtcatgaggttgttatggggcatgagtgagttagcggatgggaatataaagttcctatcgcagtccagcacagggcagaaggtgttcaggatatggaggttcccttcccctctctgctcaatgcccaggcaccgcggctgacccttggtcagtagagcgcacccagacgaatgcccaggtggacacttgtgtctttgtggttatcttagggtagagaatcagaggcttgtagatgtctttgccacttccacgggatctctgggagctggaaactgagctttaagaaataactatagtgcaaagggaactaagggaaaagggttcagcccaaagcagaagggactgtgatgatcacagtgacctcctgaggccagcatggtggtagcagccagagacagcagctgagtgagaccctaagggagggatgagccaggcagtgtgtggttggagttctccctacacatctcgttttcctcacctccagatcacacacatgcacacacacatatgcacccacacaccccttacacactccggcccgaaggtttctgcaggactccttcctggcactctctccagtgctgccagcgtcgcaccacactgcaaggctttgcaaactttccttccaaagtgaaggagaccctctggccatctgaggctcggtctgaagcaacagcctcagagcgcaatctcaggcatgcaggaagtgcaggaaggccacgtgccacatacgttatctcacttaatctcattagcaggaaatgtctttaaagtcttatgttggtgcttaaaaattcctgagcagtttagcccttaataaagccaggctttttaaaatttgaaatgaggttgagaaaactgtggtcatcggaattcccttcagagacaacacttagctgagtctcttggttgtagggaggaggctgatggcggcagagggggcagtggggatggcagagagtggggggagcatgccaaggggacatttaagtgagaaaaggtgatactaaatcgctccatattatgtggagtgaggaggaaagaggccctgcagatgagagagtttccaaacccacccgcctgcagggttgtttccagtccaaccagaccaaaggcctctcacggccctcaaaccgcctgagcccctgcccctggctgcctgtgtcggagccgcctgctgtggaagccaccttcccacacagttcagtcttcatcatgcctcgcttcccaaatgccatactccaccccaatctccaaaaatgggttcagcctcttccccaagtaaccctcaagcccgcatccctggagcagcagacccaggtgagaggtcaacgccggcaaccccgggcctctcctttcctgcgaggcccagccttcagcaaaggctgtgaagctgactgcagttgcctcggcagcagcctggtgctgaggaagacgcccagcctggcacaaccttcggttctgactcccatcacctcctgttgacagcgtctggctggcatcctaatcgctcattggacaaattgccagggcagcggtagacagctggcatgtgttaactc

SEQ ID NO: 460129 - DNA, 3208 bp, Homo sapiens
ggtatccctatcgggcactgatatggctaggatttgtgtcccctctcaaatctcctgccgaattgtaattcccagtgttggaggagccccgtgggaggtgatgtcatgcctctttgtaacccaccccttcctcaccggcccttccaggaatcttgggtgggtccttgttccactcgtcctgaagcttcttgagtgcacactatctgccaggcaccaaggaggcacagtgaaggaaactctgctgtctcaaggctcctattcctgggggaggctgagatcaggtcctgaggcgcagggcccttcatgggattgggccacaagacacaaaagtgaagctaaagacagagcaggtgtagatctgtgcctcgacctggctggcagtcgagaaggtttcccaaggagtagtatttggggtgacaccagcatagaccccggaaaacgcatgtgaggttgttggtgattctatggcctcaaattttctattttgtgcattgcttttcctcatttcttgctatctatctagggccatgttttataaactaaacatttctcatgatgcgcaatcagaatctcgtgtattgaattatgaaatacttgacacatgcaaaatattacataacatacatggaaggcatgtgaaccagccactcagccaaaattataattaaaccactcatcccgtgtgcgagagcattagttttttcctcaccactttctattttattttttaatttttaaaaatgaaggttacttattaatggtagaacccttttgctatgaataaaattattgtgactaattttataagaaaaagatgtggttcattacattttaaaaagcaagtttattgatataacaataaactgcctctacttaaagtgtaagttatgacatatgtatacacccgtaaattcatctgtgccatcaagataatgaacatgtctatctccccatggtagcccctccctcatctccttgaacctccatctgttttctgtcactaaacattagcttgcattttctagaatttaatataaaaggaattatatggtatggattcctttttggctggcttcttccatgtagcataatgattttgagattcattcctgttgcagtgtgcatcagtagttctttttattgctgagtaatattccattatatggatatatcacaatttgtctatttatctcttgatggacatttgatttgtatccagtttgggtattacaaattaaagctgctatgaacattcatgtacatctctttgtttggaaataggcttttatttttctgggtaattttattttattataactttcacctctttcatagtcagatatcgtctactgtatacccacggcttctgcacagaccaggcaggacaggaggctgagctatgaacctacccaaccagtgactaatactatgatcagtttgagctccatgaggctaaaattttactttctttttgtatccccagtgcctagtagactgtcaggcacttaatatgtatatagtccgtggttactgaataagtgataattgtgtaaatggaggttttaccttgccagaaatgataccataatatggtcaatgaattataatcgcagaattctacagtgccatagaaggagagaatctttttgtctagaacttttgatggcccattgaccatgaggacaccgtggctgggacagccagtcagttgttgggccaatgatgctcttctctatgcaggctttcttggaagctgtcttcctagagtggacaagcccacgtcttcataggaaaaagattcgtggaaagtggaatctcagctttggtattgtaccccgtccccccacacgcagccccacttttcatttttcacttcagcttcagcactgaggcaactttcccattattcaaatcctaggaactttgtccaggtctcaggcttctctgggacttacttcttgaagcatcgtagcatagtggaaaggactttgacttcaaggaagagtgttggggtttaaatcctgactcttgcaaggtaatttctgcatggccttgggcaggtcacttgcccctcagccagggctctcccctgggaagtgggaaagtgccgtgtgtctcacggggttgcttcggtggctagatgagacaaagtatatgtaagtccaaccagcaagcaacaagctgagcaggtctcttgatgtgagcacacaactgtagcccattggaatagtggcagttgtggcatctgtccttcagtgacttagctgataaggagcaaagaagccaaagtttcctcctccttatgagataactggcatggccagaatcagtgtggcgtgggactcagttcacaggtattgacaataagaacaataatgatagaaacttgcttcatacccttctccagcttcttcctgttcccaatccatagcccctcccccttcaaataaaagcagagctgctactcagccttcctgaatgaaggagaggtgaccttgtccagcgtgccctctggataccatgaaatgtcagcttccttcccaccgggttggggtggagattggctgtttagagatctgcaaacttgcttcactctcagaggagagaggaagtatgttttctcaggcattgggagatacccatcaaaattccacacaccttgtctgggctgaattttacaaagcatttgaaatgctttgtaaatttaattgtcttcagacagtgtattcagattgattaggtaatcagtgcatttggtacagtggtaactcgttttaatatctaagtagagctggtgggctttcttgtgcacaaagtgctccccaagcgtctgggggtgtgggctgttggcagctcatagttggattcttctctgagaaatgcacttggcctgcccagcccaaggtgaaatgcacatccagtgaatggtcagaaaccatcctgtgacagcagctcttcctcactcccctgcaatgagcaacttggagcccagtggggctagtgaggaagactttcctgctggggagataggaaggaagggagctgtggaacttggtcttgagctccagtgccttcctgaaggcagaggcagagctggaccactcattagaagaccttcaaggccctttgtgctctggcctccccttcacctttccggccccatctaagccagtgcctcagttctgtaccccacccatcaattctaacc

SEQ ID NO: 460130 - DNA, 1229 bp, Homo sapiens
catgtaattcataaatgaggaagctgacaggagtcaacttgccccagggaggacaagctctttggggctaccaaacagaagcagcaatgcctgttgtgtggccaacccttctggatctcagcagggatgaatgcaaaagaattcttcgaaaattggaattggaggcatatgctggagttatcagtgcacttcgggcacagggggatctcaccaaggaaaagaaagatcttcttggagaactatcaaaagttcttagtatgtctggacctaatagctcttcagaatggtccattgaaggtcgtcgattggtaccactgatgccccggctcgttccccaaaccgcctttactgtaacagctaatgctgttgctaatgcagctatccagcataatgcatctcttccagtgcctgcagaaacaggaagcaaggaagtagtggtttgctattcctacacaagtaccacgtcaaccccaacctctacccctgttccaagtggcagcatagcaacggttaagtctccaagacctgccagtcctgcctccaatgtagttgtcttgccaagtggaagtactgtttatgtcaaaagtgtaagctgttcagatgaagatgaaaaacccagaaaacgaaggcgaacaaactcttccagctcctctcctgttgttctaaaggaagttccaaaggccgttgttccagtctcaaagacgatcactgtgcctgtgagtggtagtcccaagatgagcaacatcatgcagagcattgccaactccttaccaccccacatgtctcctgtaaaaataaccttcactaaaccatcaacacagacaacaaacacaacaacacagaaggttattatagtcaccacatcaccaagctcaaccttcgtgcccaacattctctccaaatcccataactatgcagcagtcactaagcttgtaccaacgtcagtcattgcttctacaacccagaagccaccagttgttataactgcttcacagtcctctctggtcagtaatagcagcagtggcagcagcagttctacaccatcacctattcctaatacagttgcagtaacagctgtggtgtcctctacaccatctgtggtcatgtcaacagtagcacaagttccaaaatcaaatccacaaaatcaggtatgttctgagaagtctgtttatctatgactccaacagtctgttctgtcctccctgatagattcccctcacacaagcact

SEQ ID NO: 460131 - DNA, 153 bp, Homo sapiens
tcaagcttctaacgatgtacggggacatgtattttgagattcagaaaaaaatgtaaaatttgtgttctgtctttaagaaatatgaatataacatctcttaatttatttttaaaaagccaaaaaaataaaacgatgaaagattcttaccaaatt

SEQ ID NO: 460132 - DNA, 1407 bp, Homo sapiens
acctgtcgccatcttgccccttcagaggcaccgcaaacaaacccaattcctggtgtcccctagtcttggcggaggagccttttagatgagccccgaaaggccgggcagggaggacaagctctttggggctaccaaacagaagcagcaatgcctgttgtgtggccaacccttctggatctcagcagggatgaatgcaaaagaattcttcgaaaattggaattggaggcatatgctggagttatcagtgcacttcgggcacagggggatctcaccaaggaaaagaaagatcttcttggagaactatcaaaagttcttagcatctcaacagaacgccaccgtgctgaagttcggagagcagtaaacgatgaacggttaacaacaattgcacataaaatgaatttatccttatatttgggtgaaagaccaagttacagtatgtctggacctaatagctcttcagaatggtccattgaaggtcgtcgattggtaccactgatgccccggctcgttccccaaaccgcctttactgtaacagctaatgctgttgctaatgcagctatccagcataatgcatctcttccagtgcctgcagaaacaggaagcaaggaagtagtggtttgctattcctacacaagtaccacgtcaaccccaacctctacccctgttccaagtggcagcatagcaacggttaagtctccaagacctgccagtcctgcctccaatgtagttgtcttgccaagtggaagtactgtttatgtcaaaagtgtaagctgttcagatgaagatgaaaaacccagaaaacgaaggcgaacaaactcttccagctcctctcctgttgttctaaaggaagttccaaaggccgttgttccagtctcaaagacgatcactgtgcctgtgagtggtagtcccaagatgagcaacatcatgcagagcattgccaactccttaccaccccacatgtctcctgtaaaaataaccttcactaaaccatcaacacagacaacaaacacaacaacacagaaggttattatagtcaccacatcaccaagctcaaccttcgtgcccaacattctctccaaatcccataactatgcagcagtcactaagcttgtaccaacgtcagtcattgcttctacaacccagaagccaccagttgttataactgcttcacagtcctctctggtcagtaatagcagcagtggcagcagcagttctacaccatcacctattcctaatacagttgcagtaacagctgtggtgtcctctacaccatctgtggtcatgtcaacagtagcacaagttccaaaatcaaatccacaaaatcaggtatgttctgagaagtctgtttatctatgactccaacagtctgttctgtcctccctgatagattcccctcacacaagcact

SEQ ID NO: 460133 - DNA, 939 bp, Homo sapiens
acctgtcgccatcttgccccttcagaggcaccgcaaacaaacccaattcctggtgtcccctagtcttggcggaggagccttttagatgagccccgaaaggccgggcagggaggacaagctctttggggctaccaaacagaagcagcaatgcctgttgtgtggccaacccttctggatctcagcagggatgaatgcaaaagaattcttcgaaaattggaattggaggcatatgctggagttatcagtgcacttcgggcacagggggatctcaccaaggaaaagaaagatcttcttggagaactatcaaaagttcttagcatctcaacagaacgccaccgtgctgaagttcggagagcagtaaacgatgaacggttaacaacaattgcacataaaagtaagccattagtcgtaccatccctgattttttatgacatagtataacacagttttgaaacagtcttcctattgtgtagcagattcctgagtcttttaagtaacaatatctctatactcagggatcctgatcatagcagtaaaagtgatattaactgtttattcagttgggtttttttttgcatttggttaggcaagctttaagtactcaggtcaaatcctgttacaatgtaatctctgtctaactaaaaatcaccacaatttagcagatgattcacttacttgaggccaagttcagtaacaaagtattgtgacccctaaaattgaaagccctttagaggttctttgtaatggtatttgatatgttattaccttataaataggcgttgtaacttttttgatatctgactcattatttcatgtattttgagattcagaaaaaaatgtaaaatttgtgttctgtctttaagaaatatgaatataacatctcttaatttatttttaaaaagccaaaaaaataaaacgatgaaagattcttaccaaatt

SEQ ID NO: 460134 - DNA, 366 bp, Homo sapiens
cttcgggcacagggggatctcaccaaggaaaagaaagatcttcttggagaactatcaaaagttcttaggtaaattattgtaaatgtttgtgagactctagaaatttcattttgggggattttattacttatcactctcaaattaagtaactgtcaaattaagttgaagaacagaggtgttcaaattgttggtgctaagagactccatcccagttgtgtgctctgttacagaaaattgtataatttaccatttattgtgtaatccagaatgaatataatccagaatgaagagcgtgcaaactcttcagaaagacttgaaggcagtttatcttacttttagcccacctggataagggaggtgcttttg

SEQ ID NO: 460135 - DNA, 1365 bp, Homo sapiens
acctgtcgccatcttgccccttcagaggcaccgcaaacaaacccaattcctggtgtcccctagtcttggcggaggagccttttagatgagccccgaaaggccgggcagggaggacaagctctttggggctaccaaacagaagcagcaatgcctgttgtgtggccaacccttctggatctcagcagggatgaatgcaaaagaattcttcgaaaattggaattggaggcatatgctggagttatcagtgcacttcgggcacagggggatctcaccaaggaaaagaaagatcttcttggagaactatcaaaagttcttagcatctcaacagaacgccaccgtgctgaagttcggagagcagtaaacgatgaacggttaacaacaattgcacataatatgtctggacctaatagctcttcagaatggtccattgaaggtcgtcgattggtaccactgatgccccggctcgttccccaaaccgcctttactgtaacagctaatgctgttgctaatgcagctatccagcataatgcatctcttccagtgcctgcagaaacaggaagcaaggaagtagtggtttgctattcctacacaagtaccacgtcaaccccaacctctacccctgttccaagtggcagcatagcaacggttaagtctccaagacctgccagtcctgcctccaatgtagttgtcttgccaagtggaagtactgtttatgtcaaaagtgtaagctgttcagatgaagatgaaaaacccagaaaacgaaggcgaacaaactcttccagctcctctcctgttgttctaaaggaagttccaaaggccgttgttccagtctcaaagacgatcactgtgcctgtgagtggtagtcccaagatgagcaacatcatgcagagcattgccaactccttaccaccccacatgtctcctgtaaaaataaccttcactaaaccatcaacacagacaacaaacacaacaacacagaaggttattatagtcaccacatcaccaagctcaaccttcgtgcccaacattctctccaaatcccataactatgcagcagtcactaagcttgtaccaacgtcagtcattgcttctacaacccagaagccaccagttgttataactgcttcacagtcctctctggtcagtaatagcagcagtggcagcagcagttctacaccatcacctattcctaatacagttgcagtaacagctgtggtgtcctctacaccatctgtggtcatgtcaacagtagcacaagttccaaaatcaaatccacaaaatcaggtatgttctgagaagtctgtttatctatgactccaacagtctgttctgtcctccctgatagattcccctcacacaagcact

SEQ ID NO: 460136 - DNA, 741 bp, Homo sapiens
agcagcagttctacaccatcacctattcctaatacagttgcagtaacagctgtggtgtcctctacaccatctgtggtcatgtcaacagtagcacaaggtgtaagctgttcagatgaagatgaaaaacccagaaaacgaaggcgaacaaactcttccagctcctctcctgttgttctaaaggaagttccaaaggccgttgttccagtctcaaagacgatcactgtgcctgtgagtggtagtcccaagatgagcaacatcatgcagagcattgccaactccttaccaccccacatgtctcctgtaaaaataaccttcactaaaccatcaacacagacaacaaacacaacaacacagaaggttattatagtcaccacatcaccaagctcaaccttcgtgcccaacattctctccaaatcccataactatgcagcagtcactaagcttgtaccaacgtcagtcattgcttctacaacccagaagccaccagttgttataactgcttcacagtcctctctggtcagtaatagcagcagtggcagcagcagttctacaccatcacctattcctaatacagttgcagtaacagctgtggtgtcctctacaccatctgtggtcatgtcaacagtagcacaagttccaaaatcaaatccacaaaatcaggtatgttctgagaagtctgtttatctatgactccaacagtctgttctgtcctccctgatagattcccctcacacaagcact

SEQ ID NO: 460137 - DNA, 1342 bp, Homo sapiens
ttaaaggaaaaatcgacaggattttctctaaaatgattgaaaaatctctggatgctgcagagcagccagaggattccgctgaaggagaggggaggctgctgacccaccccggaaaccagaggaaagtgaggtggcggcaggaggccacggccacgggcaggccacgggcaatcactagctaccttctcctaacctttttctcccacacactttcatttttaacaaactgagccacagaacaaggaaattccaacttctgcaggaacctctgggagcagagaactaggaaggaagaaggaaaccctcctttggaatgacactgttctctcgcctggtggtgctcaggcttcagcaggatcagaatcagagaggagcccagatagctgagactgactcaagttctgattccgcaggccagagtgaggcccgagaatctgcctttaacaggttcccaggtgatgctgatgttgctggtcctaaaatgaccttgggagccactgatcttatctacctcatccgtcagttgggtggtgctactgacctgggccagacctgtagggtctcagccgggctgactcagctcctgtggctgcagccacttgccacgtgggtggagggctgcctggtacaggctgttatcagcttagaccacctgtctctgctctacgcggtctctcatcttccagtagagaactgcgcttgccctcatgacatgagagggttctaagggtgggaatggaagcttgcaaggcctcctgagaactgaattcagaacggtcacttctgctgcattctgttagacattttgaggaaaggcagaggtggggtactactcaaggactctttaaacaaacatgaagtttaattcaattgtttcctgagaggttgacttcttccaaaagccaaagaaaatctcttactaatccaaaagctgtctaaaccactaaggccacatgttggacggaggcactttcctgctggaatccgataaatcaccacacccaaatatagaaagaaaaagggacacagatcatccacaccgtggccgaatgtgtgacatctttgctgaactctctccgttccaccttgtggtggaggcctccagtccaccaaacacagccctaggcgtgtgaaccctgccacaaacatcggtgctcttcctgcacagggcctgggaccaaccgtggccaggacatcagctgctggaagccgagagagttcatctgagtggcgattttatgatctgcagagtggaaagtaatcataatcccttgagaagtttgcagaatcgaaccgaatgttgaatgccaaagatcttcacaaagcaagttgagtttcttcc

SEQ ID NO: 460138 - DNA, 1178 bp, Homo sapiens
gtttatggtctgatttccggcctctcgcctgctcgccccgccgcccgcctgagaggggaccatgccggaacccgggccggacgctgccggcaccgccagcgcacagccccaaccgccgccgccccccccacccgctcccaaggagtccccgttctccatcaagaacctgctcaacggagaccaccaccggccgccccctaagcctcagccgcccccacggacgctcttcgcgccagcctcggctgccgccgccgccgccgctgccgctgccgcggcggccaagggggccctggagggcgccgcgggcttcgcgctctcgcaggtgggcgacctggctttccctcgctttgagatcccggcgcagaggtttgccctgcccgcgcactacctggagcgctccccagcctggtggtacccctacaccctgacccccgccggcggccacctcccgcgacctgaagcctcggagaaggccttgctgagagactcctcccccgcctccggcacagaccgcgactctccggagccactgctcaaggccgaccccgatcacaaggagctggactccaagagcccggacgagatcattctggaggagagcgactccgaggaaagcaaaaaggaaggcgaagcggcgccaggcgcggccggggcgagcgtaggggcggcggcggccactccgggcgcagaagactggaagaagggcgctgaaagtccagagaagaagccggcgtgccgcaagaagaagacgcgcacagtcttctcgcgcagccaggtcttccagctcgagtccaccttcgacatgaagcgctatctgagcagctcggagcgagccggcctggccgcgtccctgcacctcaccgagacgcaggtcaagatctggttccagaaccgccgcaacaagtggaagcggcagctggcggcggagctggaggcggccaacctgagccatgccgcggcgcagcgcatcgtgcgggtgcccatcctctaccacgagaactcggcggccgagggcgcggcggctgcagccgcgggggccccggtgccagtcagccagccgctgctcaccttcccgcaccccgtctactactcgcacccggtggtctcttccgtgccgctgctacggccggtctgaggccccagaggggtgggggagggagcgcccggcctccttgtcc

SEQ ID NO: 460139 - DNA, 4021 bp, Homo sapiens
tgaccttgttggatgctgcacctgaaggtggaggaagaggaagagccttgggggctaccattctggctggagaagcggcacgaggctccctcttgtggatgcagcaaggactgttaaaaaactcccaaagcagggactttcaggcccacatgcacttagcctcctcttcccacctcctgttcctctccgtgtctaatgttccactgccatcgctgccaggaagttctgcagagaagagtgaagaagaaccgtgtgatcctaaacatgttctctgaagatattatcaacccaccattggccttatttactggaatgtttttataaccttcatttgacacctcttcccatcatttaaaataaatctgaacgttcggcagatggcgctgtttccacacgagcgtaacggcggccacaagcgttctgccgccagggggcgccgcgttccgccggggaagcgtggctcccgggcgcgcggccgccgcctgcccagcaccggcgcagggcccacgcctccgtcgcggtgcgtcctttccctccaggtgggacgctgcaggcccagccgctccctgtgcctccagacagccagggctctcacgtggataggctgctggaccaagctcagtccaggaggccggcttcaacagcttctgctcagctctcccgggcagcacaggactggaggggcaggggcctcagaacagggaggccgcagggcggcctcggcagaaggtgagtgctggcagcccgtggcccgagacgttaagcactgcggggagaaaaggagaaagaagctcctcgaactttaggcccactctggtgtgtgaggagcccggccgagagctgagagcagcctggtcttcccttctcgtctccgctagcacaggaaggagttattcaaaagtatttactgagatcctattacttgccttcagtcattctgcacactgggaattgcaggcaatgcaaaggccggaaataaggcaggctgggtgggtgtgctcgggcatagacagccatggactgccctggagtttgctgggagcacaggacggtgcagaggggcagtggccatggttagtgccctggtggctgcagaaaatgattgagattttattctaattgcaatgggaattcgctgaagaatttttaagcaggagagcaatatagcttgatttatatgaccatggctgcagagaaataagtatactttcatttatatattaaaaattagagagaaatgtaagaaattgttaattaattaaaaataacatcgataaacctattatatgttaacactatattttatgaaaactattttccaaagcaaagaaattttagtgagaaaagtagtatcgctttacctttttgcaactcttgctaatgtttggcttaaaagaagatagttgaattctcatgtttgcttctgaataaaatgtgatgtgttattttagctaaaatatatgaagaaaatctggcttcatacagagatgtagttgtaaaggggagaggtgcttagtacataaatgtggatatttttctacatgaaaaattgacaagtagtttcttaaaggtgaatttcaatatggattctgaaaccacatcaatgcactccatacttacttacattaaaatccattgaccaatcttgcatttgaatggatctttcactcatgtatgatcttataacatcagcattggtcatttggaaaataatgacccgctaaattatgcagatctccaaatgctgacaaatatcattatacaagagaaaaataatcacatttgttagtaacagcactgatcgcactggaaagtctttaagggttggggagctgtcaagttttcagtgatggaaacaagttttccaagattataatttttgcttgaaagatcaaattttaccattggtgacaaatattgccagttgttttcattgaagtggcaggctcattttatttgtttttgtgaaaatgtctctaaatatccatatctaagtaaacagtttgcgtgtcagtccctcaagtaataatagcattccatgaaaaagtgtctagtttagctggcaattcaaataatcacacaatcattttatcctctagacagctgttgtacttcagtacacagcaaagtgttttgcatgcggtgtgtaacatttttagaaagtatgtactcaaggactgagatttaatagaattttttttactgtttcgtgaagaacattcttaagtgaaactgatacttttgtattttagttatgagtgcatgtaaaggaagaacacgatgactactagtaaagtgtattaggccgttcttgcattgctataaagaaatatcggagactgggtaatttataggaaaagaggtttaattggttctgcaggccgtatgggaaacttagtgctggcatctgcttctggggaggcctcaggaagcttatactcatgaagtgggagcaggcatgtctcatggcagaagcaggagcaagtgagagagagtgtggggggaggtgtcccacacttttaaatgaccagatcttgcaaaaactcaccatcatgaagacagcaccaaaccatgagagatctgtctccatgatcaaaacacttcccaccagtccccacctccagcaagataattcaacatgagattggagtgggacaagtatccaaactatcatcaggtttgctgctacagccttgatttgtgttaggcgccaacagttttactcatcactgcttttgcctcatcagtataaacacgaacacagtgaaaaagacaaataatgtcttagtgttattttgaaaatagagttgaccttgcagatccctgaaagaattttagagattccttagtggatcttacggacattggagggccctagacctgttctgactatgggtcccccgtcagaaagcatgagagagatgttggtattttatggaaagcccatgggattttgaaaggccattcatgtttcccagcagaactagggcgtccaattgagttcagacttgctccatgcaaccattgtcaggtcacatgacatctttaggtctcagcttttcatctgtaaatgcaggccgctgggctaggggatgcctaacacttcttccagatgcactggcactgaatgccaggaagtctggcgattgagggctggcaccaggaagaggcccagatgattttatgaaggtattaaatgccacctttagggggtgtgcgaggcctccccgcagtcctgaaaagttacgtagccaattcttcagcatttccaatgtttctgggaatctgagttcttaggtggaatggaattttctgtctagggaaccaatctgtggtggagctaatacagagatcaggaaaagtggccacagcagacattccacaggggaaagagcagaatagctaaactagtctagtgagattgaacaaaaggagggtgccaggtgctggacatgctgcttaccgcattgctggagtgcaagattagctggtctatgctcagagtgcctggggcctgagtttgctggagatgtggtcttaggattctccggggaggtgctctagcaagttcacaaggacaccaagcaatctcccagacttagactgtacactggctgctctggtactgttgctggagccttctcctctctcctccccttcccaatagttcccactgcaataggtgtagcagtgatacagacaggaaatggaggtgctgttgatgctgctgctgcacccttaaaattctatagaacttacagggtgtactctggaaaaatgattgccataaccttattcattgacttattggatgaaatatgtactgagtgtctactaggtgccaggcactgtaataggttcacggaataaatctgttaataaaataaagagcccttctcttgcggaggtttcattatagtgagagctgacaaacaataaatgtaatattttgactcttttgaaggacttcacccccaaatttagcccaatccattcgggaggacgcatccctctctcttga

SEQ ID NO: 460140 - DNA, 1580 bp, Homo sapiens
tggggctgggggctcgggcgaattcttccaccgaaacaagacagagcagcgggacagatggtgacaggtttttaagtgtggtgagaggtggaggcagttccctcgcagcaggttgcacctttttgtaagcagtccaacatcctctgagggccaaggaggaggaaacaagggcgagtttgatatgccttagaaagatgagcaaggagcctggcacaggaaagaaccacccaccccaatcttccccactttcaaagccatgctcgtgtgggggcagcggcttccaagggaaggcgtcagcaatggagagcatgtttcggagtcaacggcttccatgaaaaagcatcacaatgaagagcatgtttcggagtcaatggcttccatgggaaagcattgcaatgaagagcatgtttcagagtcaacggcttccatgagaaggcatcacaatgaagagcatgtttcggagtcaacggcttccatgagaaagcatcacaatgaagagcatgttttggagtcaatggcttccatgagaaagcatcacaatgaagagcatgtttcggagtcaacagcttccatgggaaagcatcgcaatgaagagcatgtttcagagtcaacggcttccatgagaaggtatcacaatgaagagcatgtttcggagtcaacggcttccatgagaaagcatcacaatgaagagcatgtttcggagtcaacggcttccatgggaaagcatcacaatgaagagcatgtttcggagtcaacggcttccatgggaaagcatcacaatgaagagcatgtttcggagtcaacggcttccatgggaaagcatcgcaatgaagagcatgtttcggaatcaatggcttccatgggaaagcatcacaatgaagagcatgtttcggaatcaatggcttccatgggaaagcatcacaatgaagagcatgtttcagagtcaacggcttccatgggaaagcatcacaatgaagagcatgttttggaatcaatggcttccatgggaaagcatcacaatgaagagcatgttttggaatcaatggcttccatgggaaagcatcacaatgaagaccatgttttggaatcaatggcttccatgggaaagcatcacaatgaagagcatgtttcagagtccactgcttccatgggaaagcatcacaatgaagagcatgtttcagagtcaacagcttccatgggaaagcatcacaatgaagagcatgttttggaatcaatggcttccgtgggaaagcatcacaatgaagagcatgttttggaatcaatggcttccatgggaaagcatcacaacgaagagcatgtttcggagtcaacggcttccatgggaaagcatcacaacgaagagcatgcttcccatgccatcatggccccattccttctttgagaaactagaactgtacaattgccaaggctgtcatttccaaaacaccttgtaaaaatatggcaaattctatcaaagttaaaaatgcacaaacgtttccagaagttaatcatttagctgtatgtgcacagttgcacagctgtatacataaggatattcagtagagcatttctgcaatagc

SEQ ID NO: 460141 - DNA, 978 bp, Homo sapiens
  misc_feature (1)..(1): n is a, c, g, or t
  misc_feature (3)..(3): n is a, c, g, or t
  misc_feature (6)..(6): n is a, c, g, or t
  misc_feature (8)..(8): n is a, c, g, or t
ncnccntngatttcctccccgcccctccccactgcctgcctgctgcaccaccttccacccagatcacccagatcgtctctaaagggagttcttggtttccttcgatttcttatgaacccaggatgggcagcaaagaagatgcgggcaaggggtgtccggcggccggtggcgtctccagcttcaccatccagtccatcctgggcgggggcccctcggaggcaccgcgggagcccgtcggctggccagccaggaagcgcagcctgtccgtgtcctcggaggaggaggagccggacgacggctggaaggcgcccgcctgcttctgcccagaccagcacggccctaaggagcagggccccaagcaccatccccccatcccttttccttgcctgggtacccccaagggcagcggaggctcgggcccgggcggcttggagcgcacgcctttcctctctccttcgcactcggactttaaagaagagaaagagaggctcctgcccgcgggctcgccctcgccggggtccgagcggccgcgggacggcggcgctgagcggcaggccggcgcggccaagaagaagacgcgcaccgtcttttcgcgcagccaggtgtaccagctcgagtccaccttcgacatgaagcgctacctgagcagctcggagcgcgcctgcctcgcctccagcctgcagctcacggagacccaggtaaagacttggttccagaaccgccgcaacaagtggaagcggcagctctcggctgagctggaggcggccaacatggcgcacgcgtcggcgcagactctggtgagcatgccgctggtgttccgggacagttcgctgctgcgcgtgccggtgccgcgctcgctcgcctttcccgcgccgctctactacccgggaagcaacctctcggccttacctctctacaacctatacaacaagctcgactactgaccggcccgccgccccgcgccgcccccagctgccc

SEQ ID NO: 460142 - DNA, 565 bp, Homo sapiens
tgatatctgtacaccagtgttcatagcggcattattcacaatagccaaaaggcggaaacaacccaaatgtccattgacgcatgaccagtgtgatagttaatttcatgtgtcaacttgaccagcccagggaatacccggatagctggtagaaaattatttctgggtatgtctgtgagagtgtttctggaagaggttagtatttgaatcagactgagtaaaaggatccaccctatccaacataggtggccatcatcgaatccactgagggcgcaaatagaacaaaaaggtgaagaaaaggtgaattctctcctttcttgagctgggacatccaacttctcagacatcagagctcctggaggccttcagactccgagacattacaccattggctcacctggtcctcaggtctttggacttggaatgaattacaccattggctttccaggtcttccagcttgcagatggcagattgtgggacttttcagcctccataactttgtcatccaattcccataataaatcgcctcttatatctgtaaaagtttggttctgttctggagatccc

SEQ ID NO: 460143 - DNA, 578 bp, Homo sapiens
aggtgttcaaaaaaaggtcctccaaggtaccagtattttcaagccactcaattattcctaacctggaggtcatgggcacaccgctataggtcctcagctgcagggccctctgcctcccaggttcaagtgattctcctgccttagcctcctgagtagctaggattacagatttataggagcattgtgactggaccaaggacaaagaagttcccaacctcctcagaccctcgctgctgcccagatgtctgccatggggtggccatcatcgaatccactgagggcgcaaatagaacaaaaaggtgaagaaaaggtgaattctctcctttcttgagctgggacatccaacttctcagacatcagagctcctggaggccttcagactccgagacattacaccattggctcacctggtcctcaggtctttggacttggaatgaattacaccattggctttccaggtcttccagcttgcagatggcagattgtgggacttttcagcctccataactttgtcatccaattcccataataaatcgcctcttatatctgtaaaagtttggttctgttctggagatccc

SEQ ID NO: 460144 - DNA, 535 bp, Homo sapiens
gagatggagtctcgctctgtcacccaggctggagtgcaatggtggaatctcagctcactgcaacctctgccttccgggttcaagagattctcctgcctcagcctcctgagtagctgggattacagatttataggagcattgtgactggaccaaggacaaagaagttcccaacctcctcagaccctcgctgctgcccagatgtctgccatggggtggccatcatcgaatccactgagggcgcaaatagaacaaaaaggtgaagaaaaggtgaattctctcctttcttgagctgggacatccaacttctcagacatcagagctcctggaggccttcagactccgagacattacaccattggctcacctggtcctcaggtctttggacttggaatgaattacaccattggctttccaggtcttccagcttgcagatggcagattgtgggacttttcagcctccataactttgtcatccaattcccataataaatcgcctcttatatctgtaaaagtttggttctgttctggagatccc

SEQ ID NO: 460145 - DNA, 515 bp, Homo sapiens
tgttgtgtaaatataccacagtttgtttattcatcctgaagataggcatttttatttttatttttttgagatggagttcctctcttgtggcccaggctggatgcaatagcaccatctcggctcactgcaacctctgcctcccaggttcaagtgattctcctgccttagcctcctgagtagctaggattacaggtggccatcatcgaatccactgagggcgcaaatagaacaaaaaggtgaagaaaaggtgaattctctcctttcttgagctgggacatccaacttctcagacatcagagctcctggaggccttcagactccgagacattacaccattggctcacctggtcctcaggtctttggacttggaatgaattacaccattggctttccaggtcttccagcttgcagatggcagattgtgggacttttcagcctccataactttgtcatccaattcccataataaatcgcctcttatatctgtaaaagtttggttctgttctggagatccc

SEQ ID NO: 460146 - DNA, 378 bp, Homo sapiens
aggctggcgtgccggtggctcggctagctcccgggtcccggccccgcctggaagggtggccatcatcgaatccactgagggcgcaaatagaacaaaaaggtgaagaaaaggtgaattctctcctttcttgagctgggacatccaacttctcagacatcagagctcctggaggccttcagactccgagacattacaccattggctcacctggtcctcaggtctttggacttggaatgaattacaccattggctttccaggtcttccagcttgcagatggcagattgtgggacttttcagcctccataactttgtcatccaattcccataataaatcgcctcttatatctgtaaaagtttggttctgttctggagatccc

SEQ ID NO: 460147 - DNA, 997 bp, Homo sapiens
cgttaaaatgtcctacccaccccaatctagatgcggctgtgggggaatgggagcggccggacctcccagcctgacagtgcatcaagagctttgcggagcctacagcccggatgggacgactgaggccctcccgctggcgagctggccgagggctcgtccctctccagctaaagcgccagcttacgatacagccaaactgccggctctcatcggctgtgggagcaggaggcccccaggggtaaatcccggagcctcgtctctgaagcctggcgcttgtgtctcagaaggtgcgggacccacaggacacttgaatcagcaggctcacgaccccccacccccctgcccccgcctcgtgtttgccctggacctccagctagggctgaccactaattctgtcatgtgaccccacagtgcagtttgtttattcatcctgaagataggcatttttatttttatttttttgagatggagttcctctcttgtggcccaggctggatgcaatagcaccatctcggctcactgcaacctctgcctcccaggttcaagtgattctcctgccttagcctcctgagtagctaggattacagatttataggagcattgtgactggaccaaggacaaagaagttcccaacctcctcagaccctcgctgctgcccagatgtctgccatggggtggccatcatcgaatccactgagggcgcaaatagaacaaaaaggtgaagaaaaggtgaattctctcctttcttgagctgggacatccaacttctcagacatcagagctcctggaggccttcagactccgagacattacaccattggctcacctggtcctcaggtctttggacttggaatgaattacaccattggctttccaggtcttccagcttgcagatggcagattgtgggacttttcagcctccataactttgtcatccaattcccataataaatcgcctcttatatctgtaaaagtttggttctgttctggagatccc

SEQ ID NO: 460148 - DNA, 713 bp, Homo sapiens
  misc_feature (2)..(3): n is a, c, g, or t
  misc_feature (683)..(683): n is a, c, g, or t
cnncccggctgcaggaattcggcacgatgttctctacttctgtgaatgtttgcaaaataaaaagttaaaaaaaaaatacataacatctacccatgaaacggaagtttgtctagttgtattttgtaaccggtttactattgtgaatccctcatcagtgctgcttctccccattcaggtggcaatcactgggcagcttggtgtgaagccccaaacaggcaacagcattccactcacagccactaacttccgcatccagggtaaggatgtattgcgtctgccgccctcttccatcaccacagatgccaagggccagacggttctgcgaatcactccggacatgatggccacattggccaagtcccaggttaccacagtcaaattgacccaggacctcttcgggacaggaggcaacactacaggcaaaggcatctctgccaccttacacgtcacttccaatccagtacatgcagctgatagccctgccaaggccagttcagccagtgccccttcatccactccaacaggtaccactgtggtcgtgactcctgacctcaagccaacagaagcctcaagttcggcttttcgcttgatgccagctcttggcgtgagtgtggctgaccagaagggacagggctctcagaacatacattacccgtgacctacgcagcaggagcctcgtgcantggtctgactgcatactacgttgctaccgt

SEQ ID NO: 460149 - DNA, 2200 bp, Homo sapiens
gttatttattacatttattcagcttctgggtgtcaggcactgttaggtgctgggggacacaatggcttctgagacagtgtgctcctctcgtagggcctaaggagcgttacaggtatagccaaccccataaggcgttcacctttcgcatgcacggctttgagtctgtggtggggccagtgaagggcgtgtttgacaaggagacctcgctcaacaaggctcgggagcactccctgctgcgctccgaccggcctgcctacgtcaccattctgtctcttgttcgggacgctgcggctcgactgcctaatggagaaggcacacgggcagagatctgtgaactgcttaaggactcccagtttcttgcaccagatgtcaccagcactcaggtaaatacagtagtgagtggtgcactggatcggctacattacgaaaaagatccctgtgtgaaatacgacattggacgaaagctgtggatctacctgcatcgtgaccggagtgaagaagagtttgagcggattcaccaagcacaagcagctgcagctaaagccagaaaagctcttcagcaaaaacccaagcccccatccaaggtggtgcgagtggtggcccagcctagccttcctgctgttccccagcagtcgggagggccggcacagacattgccacagatgccagcaggaccgcagatccgggttccagccactgccacacagaccaaagtagtgccccagacagtaatggccactgtgcccgtcaaagcgcagactacggcagccactgtgcagcggcctggacccgggcagacagggctcacggtgacaagtctccctgccacagccagccctgtgagtaagccagccacgagttctcctgggacctctgctcccagtgcctccacggctgccgtcattcaaaatgtcacaggacagaacatcatcaagcaggtggcaatcactgggcagcttggtgtgaagccccaaacaggcaacagcattccactcacagccactaacttccgcatccagggtaaggatgtattgcgtctgccgccctcttccatcaccacagatgccaagggccagacggttctgcgaatcactccggacatgatggccacattggccaagtcccaggttaccacagtcaaattgacccaggacctcttcgggacaggaggcaacactacaggcaaaggcatctctgccaccttacacgtcacttccaatccagtacatgcagctgatagccctgccaaggccagttcagccagtgccccttcatccactccaacaggtaccactgtggtcgtgactcctgacctcaagccaacagaagcctcaagttcggcttttcgcttgatgccagctcttggcgtgagtgtggctgaccagaagggaaaaagcacagtggcctcttcagaagcaaaccagctgcacgatcgcatcgtgcagggactgggagtgatgcctcccaaagcaggccagaccatcaccgttgcaacccacgccaagcaaggggcctcggtggccagtgggtctgggaactgtccatacttcagcggtgtccttacccacatcagcacaggagcccccaccgtgcggcaggtccctgtcagcaccacggttgtgtccacgtcccaggctgggaagttgcctacacggatcacagttcccctctctgtgatcagccagccaatgaagggcaagagcgtggtcacagcccccatcatcaaaggcaaccttggagccaacctcagtgggttgggccgcaacatcatcctcacaactatgccagcaggcactaagctcattgctggcaataagcctgttagtttcctcactgctcagcagttgcagcagcttcagcagcaaggtcaggccacacagaagtgtaacttcggcactatccagcctgtgggtggaatggcaatagcggagaatgggaacttcctattggagctgtttacggtgacagcccaggatttgtgccacacttgcttccttcatatgctggcttcaggtttctgatagatgaatggcacagctatgtttatactttaataccacatctaacaatgtttatgatagggttgatcacttccatgaaggcatcacaagccttgctgtgtgaagggcatctgaatacattttaatattttatatctgttcttcacaccttagcccctcactctggagaaaatagtaca

SEQ ID NO: 460150 - DNA, 1100 bp, Homo sapiens
  misc_feature (2)..(4): n is a, c, g, or t
  misc_feature (13)..(14): n is a, c, g, or t
cnnnttcattttnnagatgctgaatctgagcatcagagaagttaaggcactcgataaagacttcagtgatttttccagataatacaggggaagaattggaacttaaagccaggtcttctgtctccaaatcccatgacctttagagcatgtttgaaggagaaagttcacacattttcatctgagatacctactactctttctaaaactaaatgcggagtctcagctgcttctatgagctgggaggtcagtgctcctaacccccacattgttcaagagtcaactgtatcaggaaatacagagagaggcacgatgagaaggtggccatctgcagccaggaagaaaggcctcaggagaaaccaaacctgccgacaccctggtttcagactttcggcctccagaacttcaggaaaataaacttatgttctttaagccacttagtttggggtacatcttcggggtctgttatataggtaaactcatgtcacacgggtttgttgtacagattatgtcatcacccaggaagttcactgtgattaaaacaaatggccaaggactaagatggcccctgggggcaattaactgctttttggaagctttcaaactaatgaattatgagatgcaaaaatcaatggagacttactttaaaaaagaaacagcatccatcattagtgatgttagaaccagtctctggagtagaaggctgtgtttggaggcagcgcagcccagtggtggaggccgaagtctgcaagctcagattccctcgactgacatcccagatcttctactcactggctctgtgcatggagctaagctgactcctctttcaacagattccctcgccgctgaagtagggatgacaacagcatacctcttcagtttgttctgcagattagcaaacctgaagcaaagaaaaactgctgatttcagctgcattgccttggtccccaaaattccaactgcacagccctttgcgctacatggtgaagaaaacctcactcaaataccccgtaaagatgagctaggtcctctatttcattatttgtttgaaaatatctgagcctctgcctcacacaggagttactaggcacattctcagaaac

SEQ ID NO: 460151 - DNA, 1085 bp, Homo sapiens
gatgaggtcacacagtagagctaggatcttagcgaccatggggagctcagtgtccactctggctggggccagctggaggccttcagtacagccccagccaactctcactgaacagctggagcaccgacaccctgggcactcatttcaaatcatgaaatgctacttcacagatcacaggggagaacagtcacccaccgatgggaccaccctcagcttgaccagccctgagtccactgaggagagtgtggaagtgttctggccagggactatacagagagaagggtcgtccccacggccggggcctgccattccccgggaggagggcctctacttcgctgccagggaccgggggatgcgggactggagcagctccccatcctcagagtcctccgagtaccagtcctactcccagtaccagtcgtgctgctcctgcatgtgcgatgaggacaatgctgctccgcagagtgtgtgtgccttctacacgcacgtgcagactgtgcggggtgtggctgtggcctgggagacggaggccggcttcgagccggtcaccaggaagccccgcatccatgaagcccagttcatcaagaggcagaggtggaacggctcctccttcgaaatggcttccaacaccgatatgcgctgggacctggaagcctgcaagagcaactgcagccccgagcccgaggacatagacctgctggagtgctgcctgcaggagctgcgggagccgccggactggctggtcaccaccaactacggggtgcgctgcgtggcctgctgcagggtcttgccctccctggacgctctgctggagcacgcccagcatggcatccgggagggcttcagctgtcagatcttttttgaggagatgctggagagaaggcgggctcagggccaagcacatgaccaacagctggaggaggagcagagtccttcagacaacagcgaatgttcccggccccagggtgaggtgctctcagcacagcagcaggagaagcagtgagccagaggggagatacccaaccctgccctcacctccagggcctgggactgctccttccccagccagcagtatcagagccact

SEQ ID NO: 460152 - DNA, 988 bp, Homo sapiens
gacaaataggatcattatatccatgtcacagatagggaagcagaggcatgaatgtgacctgctcatggtcacatgggttgacaatcaaatctaggtcctctgactcctgtttttatatttcttttgcgtcaccgtaatttgtgtttttgtctttttaaagtaagaccgatagcccccctgggtggaaatggaggggagagctgccgccccgcgaggaatgccaagggctcctgagcgcgcagcacatgatccccgcctgccttcgttccccgggcactgctccgcagcgggcggggcgggcgggctgccaggacggcctggccagggagccgcttcatgatggctccgctgcagcggcacgcgggctccggcggtcaacgcagcgctgggcaggccccggccggggctagctgttgcggagccgctctgcctggttggcttggcttttcacaggcttacagcttcctagctcctcgagcacagcctgctagcacccctcgtcagcggcgccagcggcacctgggtgcccgcgcggtgccccagcatgttctagctcagtgcccttccggagccacgcatccgagcgcgtcgccccgggccttctgggcagaggctggggcgagcgctccgctagggagagggctgtctgctggcgaccgtcggcacgccagcctgcccgttctcggatcggtccaacccatttctttcctctgcccttctctcctgtcacctgcgcactttgctctcagagagaaagtctttcacttagttctggtttccccaagcaccgggctgtgggagatgttggaaattctggcaatagtttcctaggcacacagtcagcgtgattttctttaaaaaaaaaaaaaaattaaaagcgggagaggaaatctcctcctctccccacctctttaattaggcaaacaaggtactcaagcctgggtaacatagagagaccttgtctcttaaaaaaaaaaaaattacctga

SEQ ID NO: 460153 - DNA, 1383 bp, Homo sapiens
  misc_feature (2)..(2): n is a, c, g, or t
  misc_feature (5)..(6): n is a, c, g, or t
  misc_feature (12)..(16): n is a, c, g, or t
tnctnnacattnnnnnagctggaacagctggtacccttcaccatggggctgcacatgctcgtggcccagaactcacagaagagccctgtgctatcagccatggtcaaccccaccgtgttctttgacacggagcccttgggccgcatctcctttgagctgtttgcagacaagtttccaaagacagcaggaaactttcatgctctgagcactggagagaaaggatttggctataagggttcctgctttcacagaattgttccagggtttatgtgtcagggtggagacttcacatgccatgatggcactggtggcaagtccatctacagggagaaatttgatgacaagaacttcatccggaagcatacagtttctggcatcttgtccatggcaaatgctggacccaacgcaaacagttcccagtttttcatctgtgctgccaagactgagtggttggatggcaagcatgtggtcttcagcaaggtgaaagaaggcatgaatattgtggagaccatggagtgctttgggtccaggaatggcaagaccagtaagaagatcaccattgctgactgtgggcaactctaataagtttgacttgtgttttatcttaaccaccagaccattccttctgtagctcaggagagcaccctccaccccatttgctcgcagtatcctagaatctttgtgctctcactgcagttccctttgggttctatgttttccttgttcctttccatgcctagctagattgcagagttaagtttatgattatgaaataaaaactaattaacaacagcaacaaaaaaagtaccagagtctatcggttgtcaacatggcatcaatgaacacctcttgtaatcatatttaacttccagacaaaaactaaagagcaaaatcagacttctacctaacatgaagcagctgtcccttggacaattgtgaacaagctaattctacccaaaagaggatacaaaatccttttatccgtctttaggtgatgttattgcagcagggtaattggaaaagaagttagagacgtgttttgactgttaagatgtttaatgtagcatgattattaaaatatgtaaatatgtctaggaaaaatagaagcaagacagtctttagatttcaataattaaaaacccaatgtattagccaggttaacctgggctatctatttaaaattacttaatatttactgaacatctagttgagagtactgtgaatattttcaaagttctctttgacctctctttttttacattctcttcccagtaatctcctttactcccataggatcagctttcatccttaatgggaaaattctcaatcttttatttttcatattttagggtttcatttatttatttatttatttttattgac

SEQ ID NO: 460154 - DNA, 3667 bp, Homo sapiens
ctttcagcagtttttcatgatttttcctcacactgatcactatccaatcagaacaataaacttctaacactcccttactaaaagaacatggttaagggtgagaaaggccccaagggcaagaagatcaccctcaaggtggccaggaattgcatcaaaatcacttttgatgggaaaaagcgccttgacttgagcaagatgggaattaccaccttccccaagtgtattctgcgccttagtgacatggacgagctggaccttagccggaatcttatcaggaagatccctgactccatctccaagttccagaacctccggtggctggacctgcacagcaactacatagacaagctgcctgagtccattggccagatgaccagcctgctctacctcaacgtcagcaacaaccggctgaccagcaacgggctgcccgtggagctgaagcaactcaagaacatccgcgctgtgaacctaggcttgaaccacctggacagcgtgcccaccacactgggggccctgaaggagctccacgaggtagggctccatgacaacctactgaacaacatccccgtgagcatctccaagctccccaagctgaaaaagctcaacataaagcggaacccctttccaaagccaggtgagtcggaaatattcatagactccatcaggaggctggagaacttgtatgttgtggaggagaaggatctgtgtgcggcttgcctgagaaaatgccaaaacgcccgggacaacctgaatagaatcaagaacatggccacgacgacaccgagaaagaccatctttcccaatctgatctcacccaattccatggccaaggactcctgggaagactggaggtgacttggaacctgaccctgaggcagaagggaaagagagagggagggaagagggcagtgggctacctccacaggaaaccaagggctcccctgtggctgcagcagctctttcagccaagcccataaaactcctttccttactttctcggcgtgtgattgtgttgattgaagggcttttgattccttgccattccacacatttctctgtcctctgcacacacactcacaagtacaggcacagtgagtcaggaagggcctgtccatgtccatcctactcttgcccccagatctctcttgtctaccactgtggcctaagcagctaatgccgccacacactcactatcactggcatttcagagcccactgccagatcccaaatgtgaagttatttaatggaaatgttttgggtctgggcttcaaaggcaaggaatctcagagcatgagtttgtaagaaagtagatgagcacttggtgttgggtaggggacagagctggaccacagaaatgggcaggttttattattaaggcatcaataggcagatagcttcttaggcccaaagcaatgttttctctctgaactgagcttgcataacttgctctatgagctttcttggctaaacctgcagacctctgactggctgtgaatgaatgaagttgcactcccatcctattacattcagtgtttttccagatcctcataggagaaacgaaataatggtggcaagtatggattggtgcattcaataaatcaacaccttactcagcaccatgctaggtgcaggggccgtgtccctttggggaaagcttggcttgcctggtgcaagctggaggagagagcaactgaaatgagatggggcagagcaccactgtctgaggcattcaggagatcccagtcgtggatgtgcagggctggcctggcaaagagaaaagccaaagattctgaggttggacaggtctaggtccatggcagctctgcttctgacttggcatccccttgggcacctaacatagcttaggttccctcactcgtgaagtgggaataatgccacactgaactccaagtgttctgtgcctctaaaacaggcagcacatggagaacgtactcagcagaagccagttttcttccagaaccataacttagttcattgcaaagctgaaatactactttgaacagtggtgccagttacgctagatcttttggtagaaaatgacagcaaccaagtcaatcctcacaatagctgagaaccttctctggcctccctgtgtaccacactctcacaccttcatgtgggtaaaagaaaagatcaagaatgataccttgagggaggcttttttcccccaggactttcctatgttgttggcaagtttgctgagtggatgatgagaagcaccaagaggcatccatcagtgaagtggtattaacttattttctcctcacattgtcaaccacagcacacagcacatttcatttcttcaccccttgctgcttacttcctcttgtaatgcttagctatgacaaccctatcatatttctaaaaccttgggagatctagattcaaaattttcattttagtttttccctttattaagtgtttttcattgtagaagtaacagaaccacaacatactactaaatatagtagcttaaagcattcatcattctacagtatgtcagctgcaatgctggcagagttccttactagttatttttctgtatatatttttatacatagttaaaattatagcattcctgtcatttctgtcctgctttgaaacccatgctgttacctggtattaataaacacactttaaaacatctgcaagatagttattcttgtggatatacataactataagttactgttgtacctttaagttattttcagttttcactaatgggaatagtcttgtgatgagagcctatataactaaaacattttaaaatatttttaattatttccttggcatagcctcattattggaaatattgtgttaaagggtgtcttttaacaataatgttgatacatgccatcaaaatacgcttgacatcttcctagagtagctgtggcaaaatcttgaagactactcagctaacagaataaacgactctgaagaggagaagcccccagttaggagaagacagagtggcaagtgagatgttctggaaaccaggctcgccggagctggccaagccaccgacttgcttctcaaattcacttcacctcccttagctttagcccacctgtgtgtgaaaatgactttgggaaatatttgatgtggtttttaaaatgtatatagaaaaaaatttaagaaaattacagattatatattatagacaactaaatatttaagactttaagacttaaaaggcttactgcctctacatttcactcagactagtacatctcaatgccagtagtctgtgataaatttatgtaggtataatgagatactgatatggtttgggcatttgtctcctccaaacctcatgttgagatttgatccccagtgttggaggtggggcctaatggaaggtcatgggggtgggtccctcatgaatggcctggtgccatccttttggtaatgagtgagttctcactgtattagatcctgttgaaaattgattgttaaaaagaccttggcacctccctctcctctctctctcttcctctcactatgtgatgcctgctccccttcaccttccaccatgagtggaagcacctataccccaaagccctcaccagaaggaggtgccggcacctgtacagcttgtaagaaccatgactcaaataaacttcttttctttataaattaccta

SEQ ID NO: 460155 - DNA, 1696 bp, Homo sapiens
ccgccattgtcatcatggcccgttctcaatgagctgttgggtacacctcccagacagggtggtggccgggcagaggggctcctcacttcccagtaggggcggccgggcagaggcgcccctcacctcccggacggggcggctggccgggcggggagctgacccctcacctccctccgggacggggtggctgccgggcggagacgctcctcacttcccagacggggtggctgctgggcggaggggctcctcacttctcagacggggcggctgctgggcggaggggctcctcacttctcagatggggtggctgccgggcagaggtctcctcatttctcagacggggcggctgggcagagacggtcctcacctcccagacggggtcgcggccgggcagaggcgctcctcacatcccagacggggcggcggggcagaggcgctccccacatctcagacgatggaaacaggtctcgctttgtcgctgaagctggaatacggtggtgtaatcctagctcattgtatccttgaactcctgggctcaagtaatcctcctgcctcagtctcctgagtagctaggactacagtcatatgccaccatacctagctaatcttttttatttttattttttgtagagatgggggtttcactatgtagtccaggctggtctcaaactcctggcctcaaatgaccctactgcctcagcctcccaaaatgttgggattacaccatgagccaccgtgcctggtcccaacttctttttttctgcatggggctatccagttgttccagcaccatttgttgaaaatactatttgttgccccattgattggtcttcacagccttgtctaactcatattagttgaccacagacagatgggtttttttctaaactatcaactctattccattgatttatatgtctatccttatgccagtatcacactgacttgattagtgttgttctgtagtaagctttaaaattggaaagtgtgagtcctactttcttttttttcaagattgttttggctgttctgggtcccctgcaatttcctatgaatttgagaaacagcttgtcaatttccacaaagaagtcagctgggattctgatattgtgttgaaagataaacataggattttttccatgtatttaaatcttctttatttcaacaatgttttatagtttttgattttttatttttttgagacaagatctcactatgtcacccagactggagtgtagtaatcatggctcactgttgctcaagggattctcctgcctcagcctcccaagtagctgggactacaagcgtgtgccatcatgactggctgtttttctgcatctcttgagataatcatgtggtttttgttttttattctattgatatggtgaggccaggtgcggtggctcacgcctgtaatcccagctacttgggaggctagggcaggagaatcacttgaacccaggaggcagaggtttcaagcaattctcctgcctcagcctcctgagtagctgcaccaccacgcctggctcatttttgtactgttagtagagacagggtttcaccctgttggccaggctggtctcgaactcctgaactctggtgatccgcccaccttggcctcccaaagtgctgggattataggcgtgagcttttggagcctttgaaacacatgttctcccataacctttaaaacttc

SEQ ID NO: 460156 - DNA, 1993 bp, Homo sapiens
tgactgctgaggactgcgctgctgctgtgggttgagccatgcctgtaagcatcaacttatgggttcccgctcggggtcaaagtcgggattcctgtgaccattataaagtgatgaagaagctgcatttgaagagtttaagtgacttgcctggacttggatacattagcagaaaattcagggaagtttatggctatagaataacatcaacacagaatatccgccctcctaagcaaaagcttccagggtttaaacattttgcaattgatcattctgaggaaccagaagatgcagctccacctcatcacttcctgatctacacagactgggccaatcattacctagccaaatccggccacaagcgtctcatcagggatctccagcaagatgtgacagatggcgtcctcctggcccagattatccaggttgtggcaaatgaaaagattgaagacatcaatggctgtccgaagaacagatcccaaatggtaagtggtgcataggtagtaaatgtttgagttctgtcagcaagccctgcctctaagtgatattgaccatcttgaaaacattcataccagatgctttactccaggggattatattaataaactcacagctatttccaagtagctgtgttctgcttttctgacatttgttggcatttattgaaaaatggctatgatttttatgtagattgtgagacagttaaagtgaaatattgtccttgttcttagacacaaattatgcagaactggtacaaacatatacatgtttagtacttgaactgctgtggctcgttctgcttcctcaaagacccacatcaatatgtgtttgtgtatggagctgaggcacggatgaagtgatggtatcttactaatcagaaactggagcatgtggtcagattgcctttaaaggttggaatgatgtgaaatcagaactgtgacaggaaatgtgaaatgtgcagtcacatctgaagcttttcaacataacctttgcaagtgatattctctctggcatgatgcatttaagttctgatattatagctttatacataacccccaaaactaatcttttaaaaatctgttctttttcttattgcatgtcctgcacataatctttgaattaaaatttatcgtcattgttgagttcagaaaacattggcttagtttttcacttcaaaacaaatttcaagcatgaatatttacaaaaaaaagtatattttcagagtctgttaagataacactaataacctatttaaaacatgaaggtggcaacttaaggacaactattttttgctggatgttcatttgcttccagaaatctaaaaaaaaaaaaaaaaaagcttaatttgcttctgtaaccccatcctacctcctttgagtaggcacagtttgataggtctcatttcagaataaaccaaagtgattggcattccttgggcttactgtttagttttctgaattgttatcccagtgacttgggcaaataggcagccattttagttggctttttttaatgcacattttgaatataaagatgtcagtgtatgtatggaaggggagtcattttccagtttatattctgaaacaagtttttgttgttgttgttccactgaaggttttctttctttttgatccaaagaccaaccacttcttacataggaaagtccccaggctgacatctcatggctgctttgacttttggaaaagctgggctgctatttttgctgcagctactgcagctgtctagggtattaataattgagaaaatttggatgatagaagacttaattttagtgcaggcatgctgcacatgtagtcctatcttcatatgaaacagatgcattatttccctccaggatagatactgatgcaattgccccaggccattataatgtgtgtgtagaactggtatgtggaaattgtcaaccttttattctatttggtgcacctctattctaagcaccttctattggaggttttgcgtgttgttagagtct

SEQ ID NO: 460157 - DNA, 1042 bp, Homo sapiens
tccctggggtcctgaaattcactgccaagacttatagtagatagtaacttatggcatatatgttgctaatggtggatgaggtcatttcaagagctggaattgggaagaaggataaatacatacatggaggagcaatagaagtctaccttatggagcatgtggaagttcacattggttcatttcttgatggtggcaaaagggctatggcaattccaggcttcatgtcagctccttctagaaggagagagagagaggaaaagtttgcacaagtgagctactttcctacacccccagaaaacttcttattggctctcaagcagagccgagatctcagagacccaggagggcatcagacatatgaccacacaggttactgctgggatgtcactgtctctccctgtgtggtctttaagaggctcccctctcctgcctttgtgctagcctctggagtatgagaactgttgtgatgggttagataaaatccatcaactcacaatgtttttcctgtttccattcactagtgagtaacaaggttaaaagaaggaatgttctataaaataagatatagaatttgggttaggtttacaagtgaagagttcctctttgccctgcccccaaattatttttaggccccaggcctctgaagccaaggtaatctgcagggcagctttcacattttatcacaagtcagtggtctctcctcttccttgtccctcctatcttgccggcaaatggctctgtgggaaacccattctgcttcctgtttaaactgtagaaacaattcatttaattcaatatctagcttttgattctatttgcaaaaatacagttgtaaatagttccattcattagccaattttttttttggtctgttaagcatatttgggtcattttatagttaaccttggctgagggagagaagttctttgaagctcttacttacttacttgtgaatttttgggtctgatatggaggctttgcaggtcagaagcatggcttgactgacccaatgcccatttctggctctcttcatcctcgctga

SEQ ID NO: 460158 - DNA, 2608 bp, Homo sapiens
ttcttgagagtgatcttcaagttcaaaagatgttcgtgcagtttctgctttctcaccttctgagactctgagctctctagataacccttcctgctccctgagcttgcaggggacggtatggaggatcgtgtggcccgggaggatacagaggactgtggggcccgtcgctgtgtgtccagtgtctgcagtgtctcacacagagcaggtgcctgtgactgttcagtgaattcccaaatgcagctgtccatgatgttgctcaatatttgcagtgactctcagggcctggagggactcctctcaggaagtgagctgcagtctctgctgattgccacgacctgccttcgggagcacagctgctgcttctggaaggaacccaccttctgcgtgctaagggcaatctccaaggcccagaacctcagcatcatccagtacctgcaggccacagactgtgtcaggctctccctccagaacctctccaggctcacggacactctccctgcccctgaagtgagcgaggctgtaagcctgatcttgggattcgtgaaggactcctaccccgtctcctcggctctgttcctggagtttgagaattcagagggctatcctctgctgctcaaagtgttacttcggtatgatgggctgacccagagcgaagtggacccgcatctggaggagctccttgggctggtggtgtggctgacaacctgtgggaggtcagagctgaaggtgtttgacagcatcacttaccctcagcttgaaggcttcaagttccatcatgaggcatctggggtgactgttaagaatcttcaggccttccaggtcctacagaatgttttccacaaagccagtgactctgtcctctgcatacaagtcttgtcagtcatcaggaccatgtgggcctggaatgctcgaaacttcttcctgctggagtggaccctgcagcccatctcgcagtttgtagagatcatgcccctgaagccggccccagtgcaggaacacttcttccagcttctagaggccctggtgttcgagctgcactacgtgcctcatgagatcctgcgaaaggtacagcatctgatcaaggagagccctgggccatcctgcaccctcatggccctgcagagcatcctcagcatcgctggtggggaccccctcttcaccgacatcttccgggactcagggctcctgggcctgctactggcacagcttcggaagcaagccaagatcatgaggaagtcaggaaacaaagtgtccactcctggtgttcaggatccagaaagagaactcacctgtgtgatgctgaggattgtagtcacacttctgaaaggctcggtgaggaatgcagttgtcctgaaggaccacggcatggtgcccttcatcaagatcttcctggatgacgagtgctaccgggaggcctcgctcagcatcttggagcagctctcagccatcaacgccgaggagtacatgagcatcattgtgggtgctctatgctcatccactcaaggggagctgcagctgaaactggatctcctgaagtctctgctccggatcctggtgacccccaagggtcgtgctgccttcagagtctccagcgggttcaacgggctgctgtctctgctctctgacctggaaggctccctccaggagcccccgctgcaggcatggggagcagtatcccccagacagaccctggagctggttttgtacactctctgtgctgtgtccgcagcgctgcactgggaccctgtcaatggctacttcttcaggaggaatgggctctttgagaagctggccgaggacctctgcctgctgggctgttttggagccctggaggaagagggcaacctgctgcgctcttggcggctcactcccaccccggatacagagctgcctccagatccttggctttctggacagcatggccagcggcaccctccacttgcgtggggacctgaaggagtccctgaggaccaagcaggggccggttgtggatgttcagaagggagaaactggcagtgacccccaacgcaacttcaagcagtggccagacctggaggagaggtagcttcttctgccagtgtgtcatcagtgcatctctgtctcccattctcactctaacgtcttgcgcatgtgtactcagtaggaaggctcagctacagaatgggtgtgcagaaatgtcatgtgacctcaacttcctcaaatcaagttagctctgactccacactcttctaccttgggagctgatggaaaattcaatctgagtcagtactgggttggaggatgctgtcgagtcacataagaaccagggagggcaggaccctgctgctacactcaccttctcctttgggatctttactgtcctagggagccctggtgcctgggcctggcatccctgggtgtgccaggcagcctcggtcttctcaggttttatctcctccccaggatgctgccaggggtggggtgagatcctttgatctgcaggacacaaaccacagtgtccaccccaattatggaactctttctgttctttcttgctgcttctacaccccctaacaaagacaattgctctccttacttccgcaggccaaacacctcaatgagttcagac

SEQ ID NO: 460159 - DNA, 1767 bp, Homo sapiens
tttgtcagtgatggttcaagttttcctacccgagcactggtttccttagtggtttccatttgttaggctcattctgagattttttggttgccagctcatgataggcaatacgtcaggtccgtggctcctggttttcagcatagattataaagcagctaacatccatatcaacgtatacaccgtcaatgagccttggcttttctcactggcctggtgctccaggattaactcagtgaccacagacaacattgggctcctgagtcagcttgatcaccctcacttcttcatgggtcaggaccaggggaaaagggatccagagtcaaggcacagtcttacagggccagtaactgcatctaggccctctggtagacaggagaaatcgctgacttcttactatggtggcttggtcagcttcctggagatgaccctgaagggagctttggatggcaggtcactcagcacaggtggagcctttccacccacctagccccctgcatgtataagggtgactgttaggacacttgcagggactgtctgtgtttgagaatgccacatcaatcaaggttccttggcctgtctatcccctcttcctctcctcctccagccctggcagcagagcaagggacttagaccgtatgatccaaaatcccttctaactgtaaagttctttcactgtggtttatgtttttcagacaccaaagttctatgtgttcatgtggctccttgcagatatcatttctgtgctttttattgttgccatattttgttttcactgtctgctatgatgaagtctgtgtaatctatgatgaagtctatgtaatgtaatgtaatgtaaatcattggagtaattatcccagaacctttgtcatatagcataacctaatcaagagaggtaactatcctgaggtctgttccaagatgactgaatagaaacagctccggtctgcagctcccagcgtgattgacgcagaagacgggtgatttctgcatttccaactgagatactcagagtggaagtaagaatgaggaagatagatagatagatagatttgcacatagccatgaaacctcctgtccgagttgtggaaggtccttggactctagcagccctctacccggctctacccaagagtggaaaggaacaccaaggccatttcaattttgcagcaccatccaagaaactactacctatcaagaatgctgtcacacctttgaagcctggcaagcatgagattcaaccaccgatgcccaccgtggtctttgaactcacccaagcacccaccaggcaggctacaagtgaggctacctttcaaactacattgcccaccctgaaggtggataagccaaccatgccctccatagaggtcccctatccttaaataagagacctctaagagatccccatggctgaatactccaaataatcctatgtcacaatatattccattgcatctgacatagccttctgtgtttccaaagaagaattagccacatctcccctgcttcttcctctctctgcctaagggtggtgatggtggggagtggttgataaaggcacacagaagggccacggaggctctcaggggaaccattgtgctctcgctatcaagaatgcatctcaaggggctaggcaaggggaaaactgctgtgtgtggtcttggaactggttgctgtcaggtttatctcatcctaacacctccataatattttctgctaaaggagtgactgtgcatataagtaaaggcaacctctcaggaagccagaggt

SEQ ID NO: 460160 - DNA, 821 bp, Homo sapiens
aaagaagctcaccctttacagatgccccagagaggcccccatcctgccctgcagccagcttcctgggcaagtgggatcagcaggccgctggggacctgggagacatcctgctgctgcaggagtcctgtgcagagcagaggagagagcagtttggcaagtgcaggggtcccactcttcttttggttggtggcagggagcaggtggggcctaacctgggtggacagtgtctacctcccttctgtgcattttgcattggccttaattggttctcccgggatagtcacgaaagcccgacctttgttccagaaaagaacactgagcctcagagaggtcaagcaattggcccaagatcacacagcctgcaagaaacagagatgggactcagaccctggtctatttggctcccatgtgccttactactatgttatacccacccctccagtctccttctaggtcaccagctgggatgggaggccaactctccaaatcagaagagctttattgaaaaacaaatgacaaataaaagttgtatatattcaaggtatacaatgtgatgctttgatacattgtgaaatgatgacctcagtcaagctaattaagatatccatcacttcctggaggtacctttgtgtctatatgtgctccgagcccctggaacaatgttgttcattctgcggatgctcagcaagcccttgctgactgtctttatttcttcacctgcaataagatccccccaggcccatatggaaacgtaaatgttcttgagggactaattcagtgagactcttccaggggaagttcagtcctcctgggaagtgatt

SEQ ID NO: 460161 - DNA, 464 bp, Homo sapiens
cgggcttttccatagggatataagtgaaggagatacccacagaggagcaggcaggctgggactggtgcgccacaggggacacacagagataaatgcacgagagctggaggctagtctggccccagggtgaatgggagtggatctgaaccaagacccagggactgagggagagcctggacctccaggaataggtcctaggctcagagaacctgggaggggcataagcaaatgaattgcttatgaacttgctgcagaactttcagcaaattgctttgctgttttcagatttgggtcacagttcaagcaatgtagtcctgtaacaatgctgtccttatacctgcataaccaaagcttccagacacagagcacatttccatcatgtgctccaacacacctagccatcatgcctcctcatgcaggtttgcctacctgcagtgccctgcccacttgacccctgcaactga

SEQ ID NO: 460162 - DNA, 830 bp, Homo sapiens
aaatgtatccagggtgactctgtttctgctccccagaggcgaaaatgtggcaacatcaaggcagccaacgcctgggccaggatccaggagcagctttttggggagctgggcttgtggagccagggggaagaaaccaagccctgttccccatgggaactcgactggagagaaggaccagctcgaatgaggaaacgcatcaaacgcttgtctcctttggaggccctgagctcaggaaggcacaaggtggctcctgtcaacaccacgtgtccctttatgctgctgcagatgaactgacactgagggaggctgagggcgagccggacgaggtgggggtggactgcacccagctgaccttcttcccagccttacacgaaagtctgcactcagaagacttcttggaactgtgtcgggaaagacaagttattttacaagagcttcttgataaagaaaagagtagaaccgacctcagttctagtcccaacttggccacatattaaaccgcatgtcacctaaccgttgtcagcctcagttttctcatctttaatgtggagttctggccaccatctgataacattctgctcaggcttaaatgggccaatggaagtacagggactacttcagagctgggcataagagaggtgctcatcaaagatttgggtcacagttcaagcaatgtagtcctgtaacaatgctgtccttatacctgcataaccaaagcttccagacacagagcacatttccatcatgtgctccaacacacctagccatcatgcctcctcatgcaggtttgcctacctgcagtgccctgcccacttgacccctgcaactga

SEQ ID NO: 460163 - DNA, 1179 bp, Homo sapiens
ctttggcacagcgtagtttgtgtttatagagctgcctcccaggacctcgtgagagacagctcttttcaaaccagcgcagtcttaaaacgcaagctcagtctcgcagactgtgtggccatggaagaaagcccagagaagggagccagaccccgaactgctacactgtgggtatcagtgttgctcattcattcattgccattgccagttggcgattggtactgtgttcctagagtagatcataatgttgtgtttctgtcctttgcttcagtgcccatctacgtgccgttcctcattgttggctccgtgtttgtcgcctttatcatcttggggtccctggtggcagcctgttgctgcagatgtctccggcctaagcaggatccccagcagagccgagccccagggggtaaccgcttgatggagaccatccccatgatccccagtgccagcacctcccgggggtcgtcctcacgccagtccagcacagctgccagttccagctccagcgccaactcaggggcccgggcgcccccaacaaggtcacagaccaactgttgcttgccggaagggaccatgaacaacgtgtatgtcaacatgcccacgaatttctctgtgctgaactgtcagcaggccacccagattgtgccacatcaagggcagtatctgcatcccccatacgtggggtacacggtgcagcacgactctgtgcccatgacagctgtgccacctttcatggacggcctgcagcctggctacaggcagattcagtcccccttccctcacaccaacagtgaacagaagatgtacccagcggtgactgtataaccgagagtcactggtgggttcctttactgaagggagacgaaggcaggggtggattctcgaggtggaagtccgcacatgaccttttgtttgtgcagatgatacttgctgcttctttctagattttagttgctgtttagcaacaaacatttggtctaacagaaccaagtgaggatggcaaaggtttaaaatcaccagagctatcctaaaacaatttctttcactagtaaattgtaaagctaagcatgacccagagtggattttttctagcttttattcttaatgaattttcattttttgaccagggtaatatttctatattagttttagttttaagaaactttgtatctaatgaaaggc

SEQ ID NO: 460164 - DNA, 4479 bp, Homo sapiens
ggtgccttttctaagcactgacgctaccgctagaccatggtccgcttggcaacgggcgtcttcccaggcgctggcttcaccgctagacccaggagccctctggtggccctgtccgggcataacaggaggctcgcacttgtcttctggtcacttctcactgtgtcccctcggctcctatctctgtatggcctggtttttcctagagcccccgcctgaggcccgccttccgcgcatgcgcccaggccggtccgcaggactttctcgccccagccggcagccagctcgttcgcgctggggtcaccgcgagccggtccgcagcggggtcaccgcgatccccggcgcagacacagaggccgcccccagccccgccgcctcgtgggcccgcccccgctgcacgctcccttacccctcggacctcgcagggccgcggcggacacggcccgataggggacgtgaacgcgcagaactacatttcccagcgtcccgctcgcgctggaactacactttccggggggctcggaggagcacccgacggggactcggattgaaggttccggatggaaaaaccgcttggttctctcacagacatgttgggccagcagtgctggctccatcctagatttcttccagtcctccccagttagccgccaaggggcttttccaaccggaaacctccaatccgcgaccccggcgggtgcaccgccgagccccccgggaagtgtagttccagcgcgagcgggacgctgggaaatgtagttctgcgcgttcacgtccccgatcgggccgtgtccgccgcggccctgcgaggtccgaggggcaatagccctctggaacaagacaattcatgtgagataagaaagaagagcccacaagaccaaggatgtattctcagtttacagaccactgaccagaggccactccagggtgtcaggactaagagaagtcacaaaacagcagatttcccaagagcagcggaaaatgatccagtcacaggacctaagtgtgaaacaggctacctcatcatggaccccaataggtcagactttgacgggccgtgacaataaccaggtaaatcgtctgaggcaacagcagaccatggctatgacgccactccaagcaggatggtcgggcccggaggactgaacatggcctcagcagtcacctcggcagttgccatgccaggaaagacgccccacagcccactggagagacagaagaatctgtgtgaatcttctttacctggcctgaggcatcaattcaggcacagcagaacactggccaggaaactgaacgtgacctgaatgtcttccaggctgagacaggtcctgagtgcaatcccagagggcacacgtggtcccctagaaacaacgaattcacaaggtcaggtgccccagccgggcacgcacgcctcaggttgtgaggttaacagggatccaaggtggcttcccattgtcgggcctctgtccagtctggatcattgggtttaggccttgacttcagagggcctgcctgggactgagttccaaaccattctgtttatccatgacatgagtttgttagtcccaccttatcaagtgtggacagtctctggaggagttctgcacagagcccaggagccaaggcagtcctctgcctctcctcgtcagcaccgtgaggaagccgaggtgtgggctcagcagacggtccaagtccacagccgccacagtccatggaaaggcagcaagaggacctcttgtgtttggttttttaggaggaggagaaagcttttaggagcaggtctgaaaaataaagatcattattattttttccctttccctgagcctcccagatgccagttttgttttgtttttctgttacctgtgtgtcccatgtaaaaggggatgaaagggccttgcaccgtgccccgtggagtctgaggtgtctgtaactggagaagaagagtgcgtgatggagggcagcctggagaagaaggacgcgtgatggagggcagcctcgagaaggagcgtgacagagggcagcctggaaaagggcgcgtgacggagggcagcccggagaagagggacgcgtgacggagggcagcctggaggtacccgtgggaagtgccctgcggggaacggctgcgtgaggcctgaggtcgcttgcctgagctgcgtagtccaggctgcggttatctcgtcccctcccagcagccaccgaagctgtccgttacaacagtcagttaccctgttgctcgtgagcgatacggttcctcagacgccccatgattgggcctattgatgtgtagtttggactggggctgttctcagaagcactgcgctcaggaaacctgaacgggaagcagatctggtcatgtcgggcctggatagtgtggcccaagtcagtggaatgtgtggggttggctgggccaaaccacaaggaaacagcgaaacattgatctacctgccgagaatgtcatggccgattgacctggcaatctacctttgggcgctgctagccttgaccagagtctggaaagcaggacagctgtttcccgtggttcaccgtcttctgagagcagaagcagcacacgcggaggctcggtctaggccatctgtgttcggagtttcttccttctggtgggttcgtggtctcgctggctcaggagtgaagctgcagaccttcgcggtgagtgttacagctcttaagatatcatttgaggatgtggctgtggatttcacgctggaggaatggcagctacttaatcctactcagaagaacttgtacagagatgtgatgttggagaactatagcaatctggttttcttgggttttcaaattctcaaacctgatgcaatgttcaaactggaacaacaagatccatggataataggtcaagaaatcctaaatcagaacttttcaggagagaagccctatcaatgcagtgagtgtggaaaagccttttcacagaagtcactgctcacggttcatcaaagaactcactcaggagaaaaaccgcatgggtgcagcgaatgtcagaaagcttttagtaggaagtcactcctcattttacatcagagaattcatactggagagaagccgtatggatgcagtgaatgtggaaaagccttcagtaggaagtcgcagcttaaaagacatcagataacgcacacaatagagaaaccctacagttgcagtgagtgtgggaaagcattctcccagaaattaaaactcatcacacatcagagagcgcacacaggagagaaaccctatccatgtagtcactgtggaaaagccttcttttggaagtcgcagctgattactcatcagaggacccacacagggaagaaaccttacggatgtggtgagtgtcaaaaagccttcagcaggaactcacttctcattaggcatcagaggattcatacaggagagaagccctacgaatgcaacgaatgtggtgaagccttcatcagaaaaccacagctgattaaacatcagataactcacacaggagagaagaactatcgatgcagtgattgtgaggaggccttctttaagaagtcagagttaataagacatcaaaaaattcacttaggagagaaaccatatggatgcattcaatgtgggaaaaccttctttgggaagtcccagctcctaacgcatcacagaacacacactggggagaagccttatgaatgcagtgagtgtgggaaggccttcacccagaagtcaagcctgatatcacatcagagaacacatacaggtgagaaaccctatgaatgcagtgaatgcaggaaaaccttcagtgagaagtcaagtctcattcatcatcagagaacccatactggagaaaagccctttgaatgtagtgaatgtaggaaagcttttgcctggaagccacagcttcttaggcatcagagaattcatacaggggagaaaccctatgaatgcagtgaatgtgggaaagcatttgttcagaaagtgcagctcattaagcatcaaagaaatcacacaggagagaaaacctatggatgcagcgattgtgcaaaagctttctttgagaaggcacagctgattatacatcagagaattcatacaggagagagaccatataaatgtggtgaatgtgggaaatctttcacaagaaagtcacaccttatgaggcatcagaggattcatacaggagataaatactatggatgcaatgagtgtgggaccaccttcaacaggaagtcgcagcttatgatacatcagagaaatcatataatataaaaatcatgactttggcgaatgcagaaaggttgctatcaagtgtcatactttctgacacttttgaggatgcatgtgggagagaaaccctattgaggcagtgactgttgaaaaagcttgaattgaggagtcaagagtcactaagcagaatttagaaagagaagtttttaaaaagcaaacagtgtaaaaaaagtcatctcccagaagacactactcgttacatattggatgact

SEQ ID NO: 460165 - DNA, 905 bp, Homo sapiens
ctgtctttggaacgatgtgcacacacccgtatgcaaacttttcagacctgatgctaaagaacttccttccagacagtatcctcgcccaggtgttcctcgccaaaagttccattgtttataggggctacgtgctttgggttaaattatcatgtcctctccaggtggccttttcaaaggcagatatttggtggctaggtagcccagtcagtctggaagaagccctagaggggtcatgggtccttcctccaccagaccctaggggcctggagcccggcagctcagggagccaactatgcttgggcactagcgctttcacttccagagctccttcccatgctgaagaagaaggggctcagagacataataatctgaccatgcctccacagtggcagaggcaggagcctggaagcacatctcttctgaggggagaaggcaaggcattgctcgtcagtgggggatgaggctgctggaggagccacagcctcaaagttggctactcaacatgccagacatagagagaggagagtagaggcatgccttgactcctggagctaccacttggaagtggaatccctgtcttctgttctcacttcagtggccaaggaagagggcatgaggatgcacagtcctatcacacgccctgatggcagagaggcagagtgctcgcctctgctgatgaccaccagacattgtaaatggggacctctattttatggtatcttacactgtgagatgatgttatgtcaccacatctgtgagcacagggtgcacactatttctgattcatctttgcagctgacacatagcatgaaataaaaaatgtttgctttacagactaagttaattaattggtggacaataaaggagggaagccacaggactttgtacaatgacatgatgaggga

SEQ ID NO: 460166 - DNA, 1904 bp, Homo sapiens
gactacacattaggctggggcttcctgtcctgctgtcgtcatgccaggaggcagaaggcttgtctgctttcaggcatactgggagagtgggtttgcctacgagtccccaagcagcgatggtctattcggagctgtgggcaagggcatgcagacctgggcccaaaccctgactctggccctttccagacacatacaaggtcctggctaccttcatacaaactgcttcgaactgtccatctacgtgggctgtgataaatacccacatgagagccagctgcccgaggagtgggagaataaccgggaatctctgatcgtgttcatggagcaggttcatcgtggcattaaaggcttggtgagagattcacatggaaaaggaatcccaaacgccattatctccgtagaaggcattaaccatgacatccgaacagccaacgatggggattactggcgcctcctgaaccctggagagtatgtggtcacagcaaaggccgaaggtttcactgcatccaccaagaactgtatggttggctatgacatgggggccacaaggtgtgacttcacacttagcaaaaccaacatggccaggatccgagagatcatggagaagtttgggaagcagcccgtcagcctgccagccaggcggctgaagctgcgggggcggaagagacgacagcgtgggtgaccctcctgggcccttgagactcgtctgggacccatgcaaattaaaccaacctggtagtagctccatagtggactcactcactgttgtttcctctgtaattcaagaagtgcctggaagagagggtgcattgtgaggcaggtcccaaaagggaaggctggaggctgaggctgttttcttttctttgttcccatttatccaaataacttggacagagcagcagagaaaagctgatgggagtgagagaactcagcaagccaacctgggaatcagagagagaaggagaaggaggggagcctgtccgttcagagcctctggctgcatagaaaaggattctggtgcttcccctgtttgcgtggcagcaagggttccacgtgcatttgcaatttgcacagctaaaattgcagcatttccccagctgggctgtcccaaatgttaccatttgagatgctcccaggcgtcctaagagaatccaccctctctggccctgggacattgcaagctgctacaaataaattctgtgttcttttgacaatagcgtcattgccaagtgcacatcagtgagcctcttgaatctgtttagtctcctttttcaacaaaggagtgtgttcagaaaaggagagagaggctgagatcattcaggagtttgttgggcagcaagcatggagcttcttgcacaaattctgggtccataaacaacccccaaagtccctgctgatccagtagccctggaggttccccaggtagggagagccagaggtgccagccttcctgaagggccagaaaatttagcctggatctcctcttttacctgctaggactggaaagagccagaagtggggtggcctgaagccctctctctgcttgaggtattgcccctgtgtggaattgagtgctcatgggttggcctcatatcagcctgggagttatttttgatatgtagaatgccagatcttccagattaggctaaatgtaatgaaaacctcttaggattatctgtggagcatcagtttgggaagaattattgaattatcttgcaagaaaaaagtatgtctcactttttgttaatgttgctgcctcattgacctgggaaaaatgaaaaaaaaaaataaagcaaatggtaagacccttctggtgtgtgtgacttttctgggtaggcttgcagccaccccactacctctttctgaggttggtcagcctagacaaggtgcctgcttaggggtgg

SEQ ID NO: 460167 - DNA, 1878 bp, Homo sapiens
gactacacattaggctggggcttcctgtcctgctgtcgtcatgccaggaggcagaaggcttgtctgctttcaggcatactgggagagtgggtttgcctacgagtccccaagcagcgatggtctattcggagctgtgggcaagggcatgcagacctgggcccaaaccctgactctggccctttccagacacatacaaggtcctggctaccttcatacaaactgcttcgaactgtccatctacgtgggctgtgataaatacccacatgagagccagctgcccgaggagtgggagaataaccgggaatctctgatcgtgttcatggagcaggttcatcgtggcattaaaggcttggtgagagattcacatggaaaaggaatcccaaacgccattatctccgtagaaggcattaaccatgacatccgaacagccaacgatggggattactggcgcctcctgaaccctggagagtatgtggtcacagcaaaggccgaaggtttcactgcatccaccaagaactgtatggttggctatgacatgggggccacaaggtgtgacttcacacttagcaaaaccaacatggccaggatccgagagatcatggagaagtttgggaagcagcccgtcagcctgccagccaggcggctgaagctgcgggggcggaagagacgacagcgtgggtgaccctcctgggcccttgagactcgtctgggacccatgcaaattaaaccaacctggtagtagctccatagtggactcactcactgttgtttcctctgtaattcaagaagtgcctggaagagagggtgcattgtgaggcaggtcccaaaagggaaggctggaggctgaggctgttttcttttctttgttcccatttatccaaataacttggacagagcagcagagaaaagctgatgggagtgagagaactcagcaagccaacctgggaatcagagagagaaggagaaggaggggagcctgtccgttcagagcctctggctgcatagaaaaggattctggtgcttcccctgtttgcgtggcagcaagggttccacgtgcatttgcaatttgcacagctaaaattgcagcatttccccagctgggctgtcccaaatgttaccatttgagatgctcccaggcgtcctaagagaatccaccctctctggccctgggacattgcaagctgctacaaataaattctgtgttcttttgacaatagcgtcattgccaagtgcacatcagtgagcctcttgaatctgtttagtctcctttttcaacaaaggagtgtgttcagaaaaggagagagaggctgagatcattcaggagtttgttgggcagcaagcatggagcttcttgcacaaattctgggtccataaacaacccccaaagtccctgctgatccagtagccctggaggttccccaggtagggagagccagaggtgccagcctggatctcctcttttacctgctaggactggaaagagccagaagtggggtggcctgaagccctctctctgcttgaggtattgcccctgtgtggaattgagtgctcatgggttggcctcatatcagcctgggagttatttttgatatgtagaatgccagatcttccagattaggctaaatgtaatgaaaacctcttaggattatctgtggagcatcagtttgggaagaattattgaattatcttgcaagaaaaaagtatgtctcactttttgttaatgttgctgcctcattgacctgggaaaaatgaaaaaaaaaaataaagcaaatggtaagacccttctggtgtgtgtgacttttctgggtaggcttgcagccaccccactacctctttctgaggttggtcagcctagacaaggtgcctgcttaggggtgg

SEQ ID NO: 460168 - DNA, 847 bp, Homo sapiens
gactacacattaggctggggcttcctgtcctgctgtcgtcatgccaggaggcagaaggcttgtctgctttcaggcatactgggagagtgggtttgcctacgagtccccaagcagcgatggtctattcggagctgtgggcaagggcatgcagacctgggcccaaaccctgactctggccctttccagacacatacaaggtcctggctaccttcatacaaactgcttcgaactgtccatctacgtgggctgtgataaatacccacatgagagccagctgcccgaggagtgggagaataaccgggaatctctgatcgtgttcatggagcaggttcatcgtggcattaaaggcttggtgagagattcacatggaaaaggaatcccaaacgccattatctccgtagaaggcattaaccatgacatccgaacagccaacgatggggattactggcgcctcctgaaccctggagagtatgtggtcacagcaaaggccgaaggtttcactgcatccaccaagaactgtatggttggctatgacatgggggccacaaggtgtgacttcacacttagcaaaaccaacatggccaggatccgagagatcatggagaagtttgggaagcagcccgtcagcctgccagccaggcggctgaagctgcgggggcggaagagacgacagcgtgggtgaccctcctgggcccttgagactcgtctgggacccatgcaaattaaaccaacctggtagtagctccatagtggactcactcactgttgtttcctctgtaattcaagaagtgcctggaagagagggtgcagaagctacagaagaaaagtttgaagcctgcagcaaggt

SEQ ID NO: 460169 - DNA, 747 bp, Homo sapiens
gactacacattaggctggggcttcctgtcctgctgtcgtcatgccaggaggcagaaggcttgtctgctttcaggcatactgggagagtgggtttgcctacgagtccccaagcagcgatggtctattcggagctgtgggcaagggcatgcagacctgggcccaaaccctgactctggccctttccagacacatacaaggtcctggctaccttcatacaaactgcttcgaactgtccatctacgtgggctgtgataaatacccacatgagagccagctgcccgaggagtgggagaataaccgggaatctctgatcgtgttcatggagcaggttcatcgtggcattaaaggcttggtgagagattcacatggaaaaggaatcccaaacgccattatctccgtagaaggcattaaccatgacatccgaacagccaacgatggggattactggcgcctcctgaaccctggagagtatgtggtcacagcaaaggccgaaggtttcactgcatccaccaagaactgtatggttggctatgacatgggggccacaaggtgtgacttcacacttagcaaaaccaacatggccaggatccgagagatcatggagaagtttgggaagcagcccgtcagcctgccagccaggcggctgaagctgcgggggcggaagagacgacagcgtgggtgaccctcctgggcccttgagactcgtctgggacccatgcaaattaaaccaacctggtagtagctcca

SEQ ID NO: 460170 - DNA, 1805 bp, Homo sapiens
gactacacattaggctggggcttcctgtcctgctgtcgtcatgccaggaggcagaaggcttgtctgctttcaggcatactgggagagtgggtttgcctacgagtccccaagcagcgatggtctattcggagctgtgggcaagggcatgcagacctgggcccaaaccctgactctggccctttccagacacatacaaggtcctggctaccttcatacaaactgcttcgaactgtccatctacgtgggctgtgataaatacccacatgagagccagctgcccgaggagtgggagaataaccgggaatctctgatcgtgttcatggagcaggttcatcgtggcattaaaggcttggtgagagattcacatggaaaaggaatcccaaacgccattatctccgtagaaggcattaaccatgacatccgaacagccaacgatggggattactggcgcctcctgaaccctggagagtatgtggtcacagcaaaggccgaaggtttcactgcatccaccaagaactgtatggttggctatgacatgggggccacaaggtgtgacttcacacttagcaaaaccaacatggccaggatccgagagatcatggagaagtttgggaagcagcccgtcagcctgccagccaggcggctgaagctgcgggggcggaagagacgacagcgtgggtgaccctcctgggcccttgagactcgtctgggacccatgcaaattaaaccaacctggtagtagctccatagtggactcactcactgttgtttcctctgtaattcaagaagtgcctggaagagagggtgcattgtgaggcaggtcccaaaagggaaggctggaggctgaggctgttttcttttctttgttcccatttatccaaataacttggacagagcagcagagaaaagctgatgggagtgagagaactcagcaagccaacctgggaatcagagagagaaggagaaggaggggagcctgtccgttcagagcctctggctgcatagaaaaggattctggtgcttcccctgtttgcgtggcagcaagggttccacgtgcatttgcaatttgcacagctaaaattgcagcatttccccagctgggctgtcccaaatgttaccatttgagatgctcccaggcgtcctaagagaatccaccctctctggccctgggacattgcaagctgctacaaataaattctgtgttcttttgacaatagcgtcattgccaagtgcacatcagtgagcctcttgaatctgtttagtctcctttttcaacaaaggagtgtgttcagaaaaggagagagaggctgagatcattcaggagtttgttgggcagcaagcatggagcttcttgcacaaattctgggtccataaacaacccccaaagtccctgctgatccagtagccctggaggttccccaggtagggagagccagaggtgccagccttcctgaagggccagaaaatttagcctggatctcctcttttacctgctaggactggaaagagccagaagtggggtggcctgaagccctctctctgcttgaggtattgcccctgtgtggaattgagtgctcatgggttggcctcatatcagcctgggagttatttttgatatgtagaatgccagatcttccagattaggctaaatgtaatgaaaacctcttaggattatctgtggagcatcagtttgggaagaattattgaattatcttgcaagaaaaaagtatgtctcactttttgttaatgttgctgcctcattgacctggaaagtgctactctggaaagtgctactctggaaagtg

SEQ ID NO: 460171 - DNA, 1126 bp, Homo sapiens
ggctgctgagggtgtgctgggtcccccagcagtgccagcccaccggcgctgcgctcgatttctcgccgggccttagctgccttcccgtggggcagggctcgggacctgcagcccgccatgcctgagcctcccaccccctccgtgggctcctgtgcggcccaagcctcctccacgagccccaccccctgctccatggtgtccagtcccatcaacgacccaagggttgaggagtgcaggcacagggcacgggactggcaggcagctccatctgcagccccggtgcgggatccactgggtgaagccagctgggctcctgagtctgctggggacctcaaggtttgtgaacacaccaatcagcaccctgtgtctagctcagggtttgtgaatgcaccaatcgacattctgtatctagctactctggtggggccttggagaacctttgtctgcagcttcactcctgaagctagggagaccaggagcccaccaggaggaacgagcaactccagacgcgccgccttaagagctgtaacactcaccacgaaggtctgcagcttcactcctgagccagcgagatcacgaacccaccagaaggaagaaactccgaacacatctgaacatcagaaggaacaaactctggacacgccacctttaagaactgtaacactcaccgcgagggtccgcggcttcattcttgaagaagagctggtagtgtttaagagtctagtccagaacactgtctcaacagcatcattagatcagggctcctaatccctagaaccctgtgtaacactgcaaccctggccaggcatagtggttcaagcctgtaattccagcacttttggaggccaaggtgagaggattgcttgagcccaggagttcgagaccagcctaggcaacatagtaagaacctatctttacaaaaaacaaaaaattagccaggcatggtggtgagcacctgtagtcccagctcctggggaggctgaggcgggaagattaattgagcccgggagtagaggttgcagtgagcccagatcatgccactgcactcccacctgggcaacagagtgaaattccatctcaaaaaaaaaaaaaaaaaaaaaaaaaaaaaaggccaggtgtggtggtg

SEQ ID NO: 460172 - DNA, 1540 bp, Homo sapiens
gagagacagcaggtagttgagacatggctttattcagcagcccctcacagggcaagggagtactacctgtgctgttcaaattacgtcttgtgggtggccaactacctcatctgaatgcagaatcttcagaaaaatacacaaaatcccatgaaactttgatggtggttgtggatttatctgtgctttctaataaaattttaattttgaggaggattaattctcagctaaaacatggcagccaaaatttaatagtgaaaaggagtgagattgaaaaacaaggaaaaaagtcagtgtcttggtccattttctgttgctataacagaatgccacagattaggaaaccagttccaaggctactgtatcaatccaaagaagaaacaatagtggttgaaaccagagatgtagcattggagggattggcacatgcagatatggtggctgagaagttccacaatcagttgtctgcaacagcagtctcaggtatgtctttatcagcagtgtgaaaacatactaatatagcaggaaagccagcccaggtggagatccagcccaaacctgaaggccagagacccaggggagccaatggcgacaatctccatctgagccagaaggcctaacaatagggagtaccagtgtctgaggacaggaggagatggatgtcctggctccagcggagagagatgccattccaagaaaaccatggaagcagaaaagaggaaagcagaaacacagatgaagcaagaggctatgtcctctgtgcatggagacagcagatctattagtagacaggatgaagagaaaaggtgtgaagaaaagccacatggctgatgtgacaaggaagaaagtgggtctctcagctcttcccttcttgtttttgcccttttcccagtaccaagaaatgtatttttgggggccacattcttcccaccataatttagaaggatgctgttgccaggtttgaagaccacttgaaacaataattgttgttattctgctatactcaccaagaatgacaaaactatttacatactggggatagcgtgctagaaaaattgctaaacaaatagtattttttccttccataaaatcagagttgtaaagagcaatatattaggcattttctttgccagagaactttagctatgattttctgcttctttaaaattcatattaatgatcgtagataccaggtatctaagggaaagactctttgcaacatcttctatatataccctgggtgtttctgtattgaatttacttaagatttaggctctacagtttgatctcaatcatgtaaaaatatatagcaagaaggctcctgggacaaaaactgaaatgtttattattaattttctctgggcattgaaattctggatgattttattttttcatacttctttctattttccatatattttacaatctgtattcatagcttcaaaaataaaatagttgctgtgaataatcactctatttcatgtttccacccctcctccatgcagcccatgtgcctcaagagaggctaattgatctgagctgt

SEQ ID NO: 460173 - DNA, 646 bp, Homo sapiens
cccctactgggaagtgaggagcccctctgcccggccacgaccccgtctgggagcaggcctccatgatgtaatactcgaaggaagctcttggaacaaaagaagggaacttctgatatgcaagaaagaatgaagagctcaggaatagactacatcacaagaaggtcagggtgctttctgctgagtatcgatgaaagcggacaagaatatatacagcagagctcttttcgctctgtcttcttcagtaagcaatgctggtggattcttctgcatcaacttggttaaactgaaacaacttatcccagaatttcttctgtatatatttccaagctcatcatcagacacctggctgcagacccacagaggctatagctgcatagaagcaacatttcccatggtcctccaagatgccccctttatggttgacttcagagactggacacagtctcagattgtccattggctactgactcatattctgttcctccaactcgttgcgtggacctctgctacccagttccttctcaattgtgtaaggtctaattgccatcataaacatcttacccacacttaccatgactctgattccctggctgaatcatgacttataacacagcaaccctttcatctctgatgctgaatctgattc

SEQ ID NO: 460174 - DNA, 1519 bp, Homo sapiens
tccactttccatagagccagaaagaactgccaattagtaatgtattcccctttgaagaagtctccctgtactaatatccgcaactcttcagaagggccagaccagaccctcatgtgcacagcacaggatccactcatccacaacgtggccttgctggccctgagctcagctcagaacttaaatgaaggaaatccacaaggagcacccccacaaggaggcaacaaacctcaaggtcccccatctcctccaggaaagccacaaggaccacccccacaaggaggcaaccagcctcaaggtcccccacctcctccaggaaagccacaaggaccacccccacaaggaggcaacaaacctcaaggtcccccacctccaggaaagccacaaggaccacccccacaaggagacaagtcccgaagtccccgatctcctccaggaaagccacaaggaccacccccacaaggaggcaaccagcctcaaggtcctccacctcctccaggaaagccacaaggaccacccccacaaggaggcaacaaacctcaaggtcccccacctccaggaaagccacaaggaccacccccacaaggagacaacaagtcccgaagttctcgatctcctccaggaaagccacaaggaccacccccacaaggaggcaaccagccccaaggtcccccacctcctccaggaaagccacaaggaccacccccacaaggaggcaacaaacctcaaggtcccccacctccaggaaagccacaaggaccacccccacaaggagacaacaagtcccaaagtgcccgatctcctccaggaaagccacaaggaccacccccacaaggaggcaaccagccccaaggtcccccacctcctccaggaaagccacaaggaccacccccacaaggaggcaacaaacctcaaggtcccccacctccaggaaagccacaaggaccacccccacaaggaggcagcaagtcccgaagttctcgatctcctccaggaaagccacaaggaccacccccacaaggaggcaaccagcctcaaggtcccccacctcctccaggaaagccacaaggaccacccccacaaggaggcaacaaacctcaaggtcccccacctccaggaaagccacaaggaccacccccacaaggaggcagcaagtcccgaagtgcccgatctcctccaggaaagccacaaggaccaccccaacaagaaggcaacaatcctcaaggtcccccacctccagcaggaggcaatccccagcagcctcaggcacctcctgctggacagccccagggaccaccacgccctcctcaagggggcagaccttccagacctccccagtgacagcctccccagtcatctaggattcaatgacaggaagtgaataagaagatgagagtgattcaaatgattcaaatgccatgacattgggaaataggtcatcatagctctaacttctgtataccaataaaataattagcttgcaatttctgattgtggtgtctgtttctcaatatttgtgaat

SEQ ID NO: 460175 - DNA, 1040 bp, Homo sapiens
gtttccaacttccggaggctgcccacatgcctctgctcatggctccttccatctttaaagcctctcactccaacctcagctttcgtggtcacagtaccttctctcaccctcttatctccctcttatcaggtccattcctcctggaggaatgtaaaggcattctggaaaaacctgattctcattccaaggagttggaactgagcagaagaaggcgcaaaaggcccagagagtcagggcatagttcaagggaacctggtgatgtactcttacatgtcagcaggtcaggaagcaagcaagcctggaatttaagtccagggaagcagggagaaagcactttgctaaggaatcagcccagaagacagtccagacaggaacctaggttaaggaagtgcaatgggaagaccacccccgactctgatgccacccaggaaatgagtttgctgtggcctaacagttgttttctgagtatattttcatgtcaaatagcaaaagtagaacttttggaggaggtgtgaagaaatgaagagtgactagaggaaaatagagagtcagaagttgcagtaggaagcaccaaagaagaaaactctgccttcactgagctctggaagaggtggaagagatgggagacttacagttacatgctgaccttttcagtcatttggaggcctcatgttctaggctcttaactgatggtgatgaagccaccaacaggtgtgaaaggtgtcctcttatttacacactattcctttgaatagtgtgattaagttttcattcttacagttctatgctacgaccaatttgataaaagattctcatttaaccatgctgtcttcatatatgtaagcttccttgatatctaaagagtgtgagctcctgagccaagtccagtggaaaatttgcagtctcttctaggattagatgaagacccaagaattcatcttgctacagtgcgacaagacttgtcacagatagcttggatttatgggtgctcttccacagcagaaatcgtttcaccttttcaggtgacctttacagaatca

SEQ ID NO: 460176 - DNA, 2618 bp, Homo sapiens
tgtggtggcgtatgcctgtggtcctgcctactcagaaggctgaggagggggtgatttttccccaccccaaccccatgagacatttacagtgtctggagacatttctcggttgtcacaactgggaacgtgctactggcatctggtcaaaaaaagatactgaaatacaaggtagtttatatcagcccagtagtaagccaaaatctgataccagcatcagtgatttcctcagtgaagaggatgatatcgtcccttctaaaaaaataagccagtcaacagctcttgccagatcatctaaggttctggagtcaagtgatcataagctgaagaagaggtcagcaggcaagagaaatagaaatttggttgaacaacagatgctctcagaaactccagaagatgcccaaacgatgacactaagtgtggatagactggcccttttgggtagaacacattcagtcagaatcatcatcgaaaccatgggagttcctccagatagtcctcagatgacccctggcaaaaaaagctatgctggtccaccacctaaggtgactacagcaaaaaagcgcactttctttgtagaatatcactttcctgtgggcttttcggaaagcggattgggaaagacagctttgatcactgaggttgttcgactcgcctccagtaaaattacagatggaaaggtgaagttccagcagcgatttgtgtttccagtacagtttggtggcccaatgatagagcactggtggaattccaacctcactttccaaatttatgtaaagaaaactccacagaaaaagccagaagtcattggatctgtgtcactttctttgcgagctgtcattcaatcagagctgctttctttcagtgatcagcttccagtgcaacaagaaaatggtcagtctccatttggccccctcaaggtaaccatggagcttattacagataacaaagatttcactggtatcaatactaagttaagtggcaacacccattataccccactttgtgctcctacaagtccaaataaggcactaccagaacttaaccaagatatgacctgtaccaaaaatccacaaaacttaaaccaaattcatgaggaaactgcaaagaaagcacagaacttggtgctccccaaccgaaagtcaccaagccctgtagcaccacatccttcaaccttcgtagctacgccagcctcccataatttagtcaatcagacaaatgggacaacaaaagagagtgctttgctgttgcatgtgctgttgatggtgccagatgggaaagattttattagtggagaatctgagaaacaatcaccatgcaatgtttatttaaattgtaaactcttcagcacagaggaagtcaccagatctgtcatcgcatggggcacaacacaaccggtctttaacttttctcaggtgattcctgtctctctgtcttccaaatacctggaaaggcttaagaacaatgtgatggtaattgaaacttggaataaggtgcggagcccaggacaggacaagctgctcgggctggtgaaacttcccctccaccagttttacatgtcattcaaagatgctaagatttctcgcctgctgctggatgcccagtacccagttgttgctgtcgacagctacatgcctgtgattgatgtgttttcaggccaccaaaatgggagtcttcgagtctttttagctatgggttcttcaaatcaaataatggcactacaaagattaaagaatgaagaaggaacactccctcccttcagccctaggccagcccatttcctggaccagccaactgcagcatctgttgctatggcagaggaccgaggaaatggactgatggagcactgctttgagatccatatagagatggttaaagggctagcccctcttcaggcaacagtctggggagaagcagattgttatgtccagtactactttccagttcaacactctcaatccagtgtgctgaaaggacctgagttccttgaaaatgatcccatctttaatagtgaacaccatcactctctcctgttgccagctgaggttccagtgcaaaggctcctactaagtgctttctctgcacagggcctcgtgcctggaggtggagtccagtttgaaatctggtgcagatactattatcctaatgtgagagaccagaaggtcgccaaaggaaccttgccattatcaaggatctgtgctatggtaaccacccagcatcgtgaggatgtgggaatacagacctttaatctccctttaacccccaggattgagaacaggaaagaattgaggaaccagtcatcaggtttactggatgtgggcctaaggtacaggcgtagtccaagaacagcagagggagttcttgctgcccgaactgtttccatctcagtccagattatcagagcctgtggtctgcaagcagcagccaagcataatatatacttcatggtatactattgtatggatgcacattaatcttctgttaatgataaatcatctattaatgatcattaacgataatgaaaaggaaaaagtttttctttttttcttagaaatgaaattgcagtaagcatccaaatatataatatacatctttagtatttatatactatcttatgttaa

SEQ ID NO: 460177 - DNA, 348 bp, Homo sapiens
agatggcaacaggacaagaatgggagcaggtagaccctcccagtccaggcaaatattaccagtggctaagagtaaggtagtatcagtgaagaagtgatcctattattgatagatcttaaagcagagtagacaagacttgctgattaattaaatgttacgcgtgagagaaatataaaagttaaggatgaaaccaaagtttttaacctaaacaacttggaggatggagggggaaacaaaggaactagttgcaagcaaaaaggcctgagagaatctcattgacgcttccaccatgagaagacatggtgagaaagcaccatccatgaaccagaaagtgtatccccttaccag

SEQ ID NO: 460178 - DNA, 1081 bp, Homo sapiens
agatggcaacaggacaagaatgggagcaggtagaccctcccagtccaggcaaatattaccagtggctaagagtaaggtagtatcagtgaagaagtgatcctattattgatagatcttaaagcagagtagacaagacttgctgattaattaaatgttacgcgtgagagaaatataaaagttaaggatgaaaccaaagtttttaacctaaacaacttggaggatggagggggaaacaaaggaactagttgcaagctgccatttagcaagctgccatgaagatagccatctccatctgattcatttggggctacaattcatgtattaaggttaaatccatatcttttatccaccttgggtgaagaacatgaaagatcctatacaactggtctaacacctgtgtgttctctctcctaaaagttaatacccaattcagcttggtgcaggttttaaaatttaaataaaaaaataaagttaatattcaagttaaaccttggtctatgtctaatcattacaatccttctggaatccacaaatgccaaagcatttgccccaaaaagcagcctggaaccaaggttattgtcgatttccacatccacagcctaacaacgtggtgcaatcgccctttgcgacgccgcagaccaacagacggatgctgccctgctgcagtttcacagcacaccgggtctttccgcttcagctggacagaggcccagccaggccgtagggaggattccgaaggtctctctgcagaggaccggcctctcagaccgagaaggctccacccaggcaggaaaggacactggggtgtgggtgccagatcaacttgctcaccactcagaccgcacacaagaagccttatgttgaaacttgttcaacctccagttcaatgcccaagaaaaatgaagtatccacatgaccgccatgaagcagaattcaaatttccactgctgtcccatctgcctgaagaagaagagaaatggtatcgctaacatgcctcatgttacagtctcctgagttgtccagctccccatttgcacttttctatattactctgtgctactcacaaacctctcagctccgt

SEQ ID NO: 460179 - DNA, 1464 bp, Homo sapiens
cgcaaccatgaactcgtggaacgcgggcctggcgggactactggtgggcacaataggcgtctcgctgctgtccaacgcgctggtgctgctctgcctgctgcacagcgcggacatccgccgccaggcgccggcgctcttcaccctgaacctcacgtgcgggaacctgctgtgcaccgtggtcaacatgccgctcacgctggccggcgtcgtggcgcagcggcagccggcgggcgaccgcctgtgccgcctggctgccttcctcgacaccttcctggctgccaactccatgctcagcatggccgcgctcagcatcgaccgctgggtggccgtggtcttcccgctgagctaccgggccaagatgcgcctccgcgacgcggcgctcatggtggcctacacgtggctgcacgcgctcaccttcccagccgccgcgctcgccctgtcctggctcggcttccaccagctgtacgcctcgtgcacgctgtgcagccggcggccagacgagcgcctgcgcttcgccgtcttcactggcgccttccacgctctcagcttcctgctctccttcgtcgtgctctgctgcacgtacctcaaggtgctcaaggtggcccgcttccattgcaagcgcatcgacgtgatcaccatgcagacgctggtgctgctggtggacctgcaccccagtgtgcgggaacgctgtctggaggagcagaagcggaggcgacagcgagccaccaagaagatcagcaccttcatagggaccttccttgtgtgcttcgcgccctatgtgatcaccaggctagtggagctcttctccacggtgcccatcggctcccactggggggtgctgtccaagtgcttggcgtacagcaaggccgcatccgacccctttgtgtactccttactgcgacaccagtaccgcaaaagctgcaaggagattctgaacaggctcctgcacagacgctccatccactcctctggcctcacaggcgactctcacagccagaacattctgccggtgtctgagtgaaggaccgcgctcctgctgaagagtttagaatgaggcagcggttcaagtgattagagacagtgaaatttttatggaatactgcacctataaaacacatgccaatctgttagcagtcctgacttgatttaataaaaaccaaggagagccacccctgctttctggccatctcttctttgtctaccatttcaaattgacttgtgaatactcagagcagttatttttcaatcctccactctaagtgattcctccagggtgggaagcacggggagcaatggaatcagatggctcattctctccttccagctctttacatcctaactttggaggtatagaaggaaggatgtggtccaacgggaaggaagtgaagagtctattggtttttacttctaggcagtcccaatttttaaaggcagagaagtatctgcatctttatttgaaaagac

SEQ ID NO: 460180 - DNA, 567 bp, Homo sapiens
cggacggcggcgggagcgcgcgagaagctctaggacccagcagcggttgtcgggtttggggctggaggtgaagccctgtgtgaatggggttgattgtccggcgccacttccccgcgctgcccggcagccgtcttccccagccgagggactgaactagccatgatcgcctcattagcacacagatttttaaaaatcaattctcttgccatgcctcctatgtgttcacatctctgcatacactacagatataagtgcataatcattcatataaacatctggtaggtattctgtaaaactgtgtttactttagtgcatgttattgtcatgttatgatgtgactggggtgtttctttgtcatgaaactttgcttcttcacagaattagaatactgctctctctatattgaactacatatacagcgttttcttgtatcagcccccaaagtctggatgcccggtgttgtgtttacatgtgattgtgcctaggagtctgttcacatagagacacctgtaagtatttattacaaaacggaatgtaagcaaatatatccacattggttttatttga

SEQ ID NO: 460181 - DNA, 8955 bp, Homo sapiens
cggacggcggcgggagcgcgcgagaagctctaggacccagcagcggttgtcgggtttggggctggaggtgaagccctgtgtgaatggggttgattgtccggcgccacttccccgcgctgcccggcagccgtcttccccagccgagggactgaactagccatgatcgcctcatgtggagggcaaagttgcgccggggaacttgtgagcctgcggtgaaagggtccccttctgcttgttatagccccagtagtcctgtccaggttctagaagactccacctacttttccccagactttcagctctattctgggaggcatgaaacatctgctttgacggtggaggcaaccagtagcatcagggaaaaagttgttgaagatcctctttgtaacttccactccccaaacttcctgaggatctcagaggtggaaatgagaggttccgaggatgcggcagctggaacagtattgcagcggctgatccaggaacaactgcggtatggcaccccaaccgagaacatgaacttgctggccattcagcaccaggccacagggagtgcaggaccagcccatcctacaaacaacttttcttccacggaaaacctcactcaagaagacccacaaatggtctaccagtcagcacgccaagaaccgcagggtcaagaacaccaggtggacaatacggtgatggagaaacaggtccggtccagcagcctcagcagaacaacgaggaactgcccacttacgaggaggcaaaagcacagtcgcagttcttcagggggcagcagcagcagcaacagcagcagggggcggtgggccatggttactacatggcagggggcaccagtcagaagtcccgaactgaggggaggcccactgtgaaccgtgccaacagtggacaggcgcataaggacgaggcgctgaaggaactgaagcagggccacgtccgctcgctcagcgagagaatcatgcagctgtccctggagaggaatggggccaagcaacaccttcccggctcggggaatggaaagggcttcaaagtaggaggggggccctcccctgcccagcctgcaggtaaagtgctggaccctcggggtcctccacctgagtaccccttcaagaccaagcaaatgatgtccccagtcagcaagacccaggagcacggacttttttatggtgaccagcaccccgggatgctccacgagatggtcaagccctaccctgctcctcagcctgtgagaacagatgtggccgtcctgcggtaccacgccaccccctgagtatggggtaacgagccgcccatgccaacttccgttcccatcaaccatgcagcagcacagccccatgtcctcccagacctcttccgccagcgggccactgcactctgtctccctgccgcttccactcccgatggccctgggtgctccacagcccccgcctgccgcctcccccagccagcagcttggtccagatgcctttgcgattgtggagcgagcccagcaaatggtggagatattaacagaggagaaccgggtgcttcaccaggaacttcagggttactacgacaatgccgacaagctccacaagtttgaaaaagaacttcagagaatttcggaagcctatgaaagtctggtcaagtctaccaccaagcgagaatcgctggacaaggccatgagaaacaaattggaaggcgagattagaagacttcatgatttcaacagagacctccgagatcgactagagactgctaacaggcaactatccagcagggaatacgaagggcatgaagacaaagctgcagaggggcattatgcttcccagaacaaagaattcttgaaggaaaaggagaaattagaaatggagttagcagcagtgcggactgcaagtgaggaccatcggagacacatcgagatcctggaccaggctttgagcaacgcccaggccagggtcatcaagctggaagaggagttacgagagaagcaagcatatgttgagaaagttgagaagctgcagcaggccctgacccagctgcagtctgcatgtgagaagcgagaacagatggagcggagactgcggacttggctggagagagagctggatgcactgagaacccagcagaaacatggaaatggccagccagccaacatgccggaatacaatgccccagccctcctggaacttgtgcgggagaaggaggagcggatcctggccctggaggccgacatgacaaagtgggagcagaagtacctggaggagagcaccatccgacactttgccatgaatgccgcagccactgcagcagctgagagggacaccacgatcatcaaccactcacggaatggcagctacggagagagctcgctggaggcccacatctggcaagaggaggaggaggtggtgcaggccaacagaaggtgtcaggacatggaatacactattaaaaatctccatgccaaaatcatagagaaagatgctatgattaaggtcctgcagcagcgatctcgtaaagatgccgggaagacagactcctccagcctacgtcctgcccgctccgttccatccatagcagcagctactgggacacactctcgccagacctctcttaccagcagccagctggctgaggaaaagaaggaagagaagacctggaaggggagcatagaatgggataatggggagagcacattggaagaagtgctctctcgcataaggattgctgctggggaaggagcaccatgagcatgcctctgccccactgctgccacccccacccacctcagcactgtcctccatagcctccactacggcagccagcagtgcccacgccaagacaggcagcaaggacagcagcacacagactgacaagagtgccgagctcttctggcccagcatggcctcccttcccagccgcggccggctgagcacgacccctgctcacagccccgtcctgaaacacccagcggccaaagggaccgcagagaaactggagaactctcctggccatgggaagtcgcctgaccacagaggccgggtcagcagcttgctgcacaagcccgagttccctgatggagagatgatggaagtcctcatctaactgccatccctgtggaatttcagtacagaacactgacaaacaaggaaagcggcagagaaagaagaaagacctagaaggttgtagatgggaaatcaggaatgatttgaactgataaagatttcagactcataagaacacattttataaatgttaaacacaaaaactacatgactgaagatagaagagaatgcgatggattttattacacatggtggaagagagaagaggcgtgtaggtttgcaaacaaagttaagaaataggaaactgaatttttcattgtacagaaaatgtatctcttggggagggcctgtgtacccccattctctgattataaacagataaacccaaatgtggatcatccttggaatacccccattctccttgcctcttagcatgtttgatttaagaaaagcctccaggaaatcttgagagcctgtcttggcataatgcagtgtcacctgtgccaaccatggggtgtcccgtgagtgtgagtgtggcagtgagaagaagcatcgagggcgaggggaatatgaaagttggtcttcacctaattacctgtttggtttggattttcaagagatgattgggcttcttagcttttctgaattctgcagtattttctaaacaggatagattatgatctcggtccccatccatcctaacttctgagttcatctctgtctctgctttacagtctttaattttttgttgttccttcatttttttctttttaataagacatagcagaattccttaggtatgggatttatgagaccagtacctgaactgtcatcattcctactgtgtttgatagtgaccagtaggacaaagccacgtgccgacttcctggctgcttcacctttgcatagctgggttgcagctgcgaacctcattctgactgtgaactaagcaagctttgaggaggcaggagattccgtgggtccctgtgacatattgcattaagatcgtggcacttgcttttttgtctttcacatcggctgtcttgcaaggagcttgacatttccaaattccattgctctgtttggggaagacttaggacagcactccaggaaacagatgacaatttacagacagttgtctcagtggtttccagaatctcaccagcctcccgtatagcttcttgtattgaggctcatgagcgtattcacactctttcctcccccgcgcacgcctctgcttgctctcgatcagcatccagacctccgtggcaccaggttgcctctgttgtgaacttcttttgtaacctaccaggccagttgtatatacagtgttgtcaggtttttccgggtttcagttttgaggcagtttattcaaagtgagacagaagtgccacggaaaagaggcaggagtgtgttaggtggtgggtccattagacctctgctgtgacattgcatattcagctctgcagacactggcttcctttacaaatctaagagatgctggattagaaaagaggagaagctcatcgggccatcagagagatgctcctacagggtcctgatgtttttgtacctccaggtcagctggatcgctgttttcccagttccctttgctcatgcttacttagaggaagaaagaaaggggggtacctcttccaagtaccttctaaatgaaacactcaagagagtgctactcaggaaactttgcttggatcctaaaatggactggtcttgggtgtgtaaccccggtgaagttatagcctccccaaattgaggtgacagaaggaagacaagaggtgtaagctggagagggaagggaagaaatcagtggctttggccagcctctgtgccacccagtacgacagaggagtgggaactggccctctggggctctgcttggccataggcactgcacattgtgccacctgctcatcacctcctctagtctcacactgagcatcggagtacctgttgtgcagacaggaaaactgaggagctctgagaggctgagcatggagctcaccccatgccatagggtgtgggaagagggcacaggaggcctcatccatgggggaaagggttgaggatggacatgggtggggagagggcatagacatcccttcctaatctctgttcccaccacatttcataggagatgagttaggagatgacagctaactctcttaaggacattttgaccccagtttatgttggggatggaccagaaaggaaaatgtctagagataggaaggtaaatcaactctgccagcccctaccatcaggtctgggccaccccaaacttgggctgcctcccttagacataggttagagtgagagacccagctgtttctcccgaagcctcgtcttcatgccccagacacctgattgccccaatcaggtgtcagacttgcttgctcttcgaggtccccctgagctgccaagtgttttcattgtaaacagacacatcgccatgtttcagggcttcaacggcattgtattttggactttgaccgtattttttttctcttaacctactgagactcttccttaagaacaggatctatagctttaaaatgtcttcttctatgggaaatttcctgccaagccagggcactaaattctttcatcattagagctttcctgaagtccggccatatactgagtacctgctctgagttctgggcagcttacaatatcttaaacagattttcagaaaaataatgcaactatattttctagtgtcaactgtatgcaaacagtgtggtaaataccttttaattagtcctccacccacctggagtacagggggtgcgtttattattctgatttcactgatgaggaaatgggctcagaaaggttaagtcccttcctgaaatctcacagccaggagaagctaggatgatttaaaacaaagtttggagaggcactgggcatagaccctggctgtacagcctctaacatgcggcactgcatcttggcagtctctatgcctgtctgtgatgtgtgtgtgcacgtgtaactacacacacacacacacacacacacacacacagctatcacacatctcagagcctaagaaataggactaagcccagaactcctagaatcacctataaatgctaggcatagatggaaattattgtgttccaccagaagcacagctccaaactatacctaaaaaatatttctgcacttcccagagacctggacttcaaactttcccagtggagcctgattatagaacttgagggtcctatctcaggatgaaggggagaggccctggcttcacgggaaggtattccagcattgttctgcttcacccttgactgcgttgtctggcagtttctgtgtgctgccaggatattatatggaactggagaagttggagtcaggtctctgaagctagagtttcactaattagatgcctctgtacatgagaactattactgtctgcaggtccatatagctaagctgccaggaaaaacacattatcttccaaaactttcagagcatgtgcagaaccctttcttagcgttttcttctcagcattttctctgcctcccagaggctggcagccagtgacactgcagagttcagcatgttctaaccatgcacgcagggcaggggctgccttggccctcctcaggctttcgttgggagagcaggcagtggtggagcccttctgggtgcagtcctctggggttgctctttggaactcatgtatgagtttgactccacaaggcttggcatggataccaaaacagttgcaacaaattagttctgaacctggaacagagaattcagtgcttctgttactcaggaaggaggtgttcagaatgccccgtgcagagcagccagtcattactcttgtttgttctcacctgggtgcgcaccctcatgatgcagtggctgtagcaccttcatgccaggtgctgagagaatgggaaattcttcctccccattgacctgagtcccagagacttagggacacagacttcaggtgaggctgcggacctcagaagcagtggataatagattggggcattaaaagcttttgaggcagggggctcatgttttgactgcagggagttatgctgagcaaagagatgtgtttttcaaaaccagggttcaaaaccagtgtccacgctggagtaagtggagcatgcttctctgtgttctctgaatgatcttgcactcctcttaagcaaaggagtaccatgaccatagtcagtgggatcccacaaatgttcttaaatgggtaaggctttaagtagccagagagtatccagcctaccattggcttctccacatcctaaaacctgagacagccttggtatatgctttataaatgtttcttttcttgttgtttaagtaattaaagtgtttaaaatgtcttcattagatgtgacgattgtttaatgagtttgcctctgacgtgtggctccatgggagataggcaaagtaattaagaagttaccagaaattggtcggctggggaaatgcaaaagttagcatttcagtagtgaatttctcctggaacaaatgagcaatttttcctctttctcttaagtagtatacccttttctcacttagtaatttaatggtatataaagacatgtgtataagtgagtgcatacatatgaggtatgactatagggttgtttgtgggaatttcttttcctaacatacagaagatcaaagtgttcatctcaccccgccctccttaaaaggtgtcttttgggagactatgtgctcattgactatagtgctgccaagtaaaaatatcttgggaactcttctactagaatggccttcagggcttggcatgttcctttggtttacccttagagatgagaaatcctcctcctttgaggatggatttaagttctggaaataatctcaagtgcttgatagcacagttggatgaaaaaagatggcaattaaggtaagttacaccatttttgtttctaaaaaaatccctaagaaatttcttggaatgagtctttggcctcagagcctctcaaagtgtccacttcaaggggggatcatcctcattagcacacagatttttaaaaatcaattctcttgccatgcctcctatgtgttcacatctctgcatacactacagatataagtgcataatcattcatataaacatctggtaggtattctgtaaaactgtgtttactttagtgcatgttattgtcatgttatgatgtgactggggtgtttctttgtcatgaaactttgcttcttcacagaattagaatactgctctctctatattgaactacatatacagcgttttcttgtatcagcccccaaagtctggatgcccggtgttgtgtttacatgtgattgtgcctaggagtctgttcacatagagacacctgtaagtatttattacaaaacggaatgtaagcaaatatatccacattggttttatttgaatcaaggtgtttttttgttttttgttttttttccttttgaggaggaacagggagcctcctcctccatgagcacttacagaattgtgtaaaattctgtgaaacagtggtaagcatgggcacccgatttcagctgtcctgctgccgctgccctccaacctgctctgtgtgtgtgtgtcgctgtgcttggtggcagtgtgccgtgctcgtgccggctcttcccagcagactggtatctggctgtaacgtttgacgtcttcatattgccagtctgtattgaggggtgatgtacatggccatacagccaaatgggtctgtgtaccagtgtggggattccaagaacactgcctgtcccccacagcaaatattgatgctgttggtcagccaaagattttcctctcctttgctgcttaaacttgtgccttaatattgtacataataaatggataaaatggcaa

SEQ ID NO: 460182 - DNA, 7754 bp, Homo sapiens
actccacacgagtgttcctgccaccatgcactgcattctgtgcacaccacaggagaggcagctcctcccctggcctctgtacactccaagccgcccatgccaacttccgttcccatcaaccatgcagcagcacagccccatgtcctcccagacctcttccgccagcgggccactgcactctgtctccctgccgcttccactcccgatggccctgggtgctccacagcccccgcctgccgcctcccccagccagcagcttggtccagatgcctttgcgattgtggagcgagcccagcaaatggtggagatattaacagaggagaaccgggtgcttcaccaggaacttcagggttactacgacaatgccgacaagctccacaagtttgaaaaagaacttcagagaatttcggaagcctatgaaagtctggtcaagtctaccaccaagcgagaatcgctggacaaggccatgagaaacaaattggaaggcgagattagaagacttcatgatttcaacagagacctccgagatcgactagagactgctaacaggcaactatccagcagggaatacgaagggcatgaagacaaagctgcagaggggcattatgcttcccagaacaaagaattcttgaaggaaaaggagaaattagaaatggagttagcagcagtgcggactgcaagtgaggaccatcggagacacatcgagatcctggaccaggctttgagcaacgcccaggccagggtcatcaagctggaagaggagttacgagagaagcaagcatatgttgagaaagttgagaagctgcagcaggccctgacccagctgcagtctgcatgtgagaagcgagaacagatggagcggagactgcggacttggctggagagagagctggatgcactgagaacccagcagaaacatggaaatggccagccagccaacatgccggaatacaatgccccagccctcctggaacttgtgcgggagaaggaggagcggatcctggccctggaggccgacatgacaaagtgggagcagaagtacctggaggagagcaccatccgacactttgccatgaatgccgcagccactgcagcagctgagagggacaccacgatcatcaaccactcacggaatggcagctacggagagagctcgctggaggcccacatctggcaagaggaggaggaggtggtgcaggccaacagaaggtgtcaggacatggaatacactattaaaaatctccatgccaaaatcatagagaaagatgctatgattaaggtcctgcagcagcgatctcgtaaagatgccgggaagacagactcctccagcctacgtcctgcccgctccgttccatccatagcagcagctactgggacacactctcgccagacctctcttaccagcagccagctggctgaggaaaagaaggaagagaagacctggaaggggagcatagaatgggataatggggagagcacattggaagaagtgctctctcgcataaggattgctgctggggaaggagcaccatgagcatgcctctgccccactgctgccacccccacccacctcagcactgtcctccatagcctccactacggcagccagcagtgcccacgccaagacaggcagcaaggacagcagcacacagactgacaagagtgccgagctcttctggcccagcatggcctcccttcccagccgcggccggctgagcacgacccctgctcacagccccgtcctgaaacacccagcggccaaagggaccgcagagaaactggagaactctcctggccatgggaagtcgcctgaccacagaggccgggtcagcagcttgctgcacaagcccgagttccctgatggagagatgatggaagtcctcatctaactgccatccctgtggaatttcagtacagaacactgacaaacaaggaaagcggcagagaaagaagaaagacctagaaggttgtagatgggaaatcaggaatgatttgaactgataaagatttcagactcataagaacacattttataaatgttaaacacaaaaactacatgactgaagatagaagagaatgcgatggattttattacacatggtggaagagagaagaggcgtgtaggtttgcaaacaaagttaagaaataggaaactgaatttttcattgtacagaaaatgtatctcttggggagggcctgtgtacccccattctctgattataaacagataaacccaaatgtggatcatccttggaatacccccattctccttgcctcttagcatgtttgatttaagaaaagcctccaggaaatcttgagagcctgtcttggcataatgcagtgtcacctgtgccaaccatggggtgtcccgtgagtgtgagtgtggcagtgagaagaagcatcgagggcgaggggaatatgaaagttggtcttcacctaattacctgtttggtttggattttcaagagatgattgggcttcttagcttttctgaattctgcagtattttctaaacaggatagattatgatctcggtccccatccatcctaacttctgagttcatctctgtctctgctttacagtctttaattttttgttgttccttcatttttttctttttaataagacatagcagaattccttaggtatgggatttatgagaccagtacctgaactgtcatcattcctactgtgtttgatagtgaccagtaggacaaagccacgtgccgacttcctggctgcttcacctttgcatagctgggttgcagctgcgaacctcattctgactgtgaactaagcaagctttgaggaggcaggagattccgtgggtccctgtgacatattgcattaagatcgtggcacttgcttttttgtctttcacatcggctgtcttgcaaggagcttgacatttccaaattccattgctctgtttggggaagacttaggacagcactccaggaaacagatgacaatttacagacagttgtctcagtggtttccagaatctcaccagcctcccgtatagcttcttgtattgaggctcatgagcgtattcacactctttcctcccccgcgcacgcctctgcttgctctcgatcagcatccagacctccgtggcaccaggttgcctctgttgtgaacttcttttgtaacctaccaggccagttgtatatacagtgttgtcaggtttttccgggtttcagttttgaggcagtttattcaaagtgagacagaagtgccacggaaaagaggcaggagtgtgttaggtggtgggtccattagacctctgctgtgacattgcatattcagctctgcagacactggcttcctttacaaatctaagagatgctggattagaaaagaggagaagctcatcgggccatcagagagatgctcctacagggtcctgatgtttttgtacctccaggtcagctggatcgctgttttcccagttccctttgctcatgcttacttagaggaagaaagaaaggggggtacctcttccaagtaccttctaaatgaaacactcaagagagtgctactcaggaaactttgcttggatcctaaaatggactggtcttgggtgtgtaaccccggtgaagttatagcctccccaaattgaggtgacagaaggaagacaagaggtgtaagctggagagggaagggaagaaatcagtggctttggccagcctctgtgccacccagtacgacagaggagtgggaactggccctctggggctctgcttggccataggcactgcacattgtgccacctgctcatcacctcctctagtctcacactgagcatcggagtacctgttgtgcagacaggaaaactgaggagctctgagaggctgagcatggagctcaccccatgccatagggtgtgggaagagggcacaggaggcctcatccatgggggaaagggttgaggatggacatgggtggggagagggcatagacatcccttcctaatctctgttcccaccacatttcataggagatgagttaggagatgacagctaactctcttaaggacattttgaccccagtttatgttggggatggaccagaaaggaaaatgtctagagataggaaggtaaatcaactctgccagcccctaccatcaggtctgggccaccccaaacttgggctgcctcccttagacataggttagagtgagagacccagctgtttctcccgaagcctcgtcttcatgccccagacacctgattgccccaatcaggtgtcagacttgcttgctcttcgaggtccccctgagctgccaagtgttttcattgtaaacagacacatcgccatgtttcagggcttcaacggcattgtattttggactttgaccgtattttttttctcttaacctactgagactcttccttaagaacaggatctatagctttaaaatgtcttcttctatgggaaatttcctgccaagccagggcactaaattctttcatcattagagctttcctgaagtccggccatatactgagtacctgctctgagttctgggcagcttacaatatcttaaacagattttcagaaaaataatgcaactatattttctagtgtcaactgtatgcaaacagtgtggtaaataccttttaattagtcctccacccacctggagtacagggggtgcgtttattattctgatttcactgatgaggaaatgggctcagaaaggttaagtcccttcctgaaatctcacagccaggagaagctaggatgatttaaaacaaagtttggagaggcactgggcatagaccctggctgtacagcctctaacatgcggcactgcatcttggcagtctctatgcctgtctgtgatgtgtgtgtgcacgtgtaactacacacacacacacacacacacacacacacagctatcacacatctcagagcctaagaaataggactaagcccagaactcctagaatcacctataaatgctaggcatagatggaaattattgtgttccaccagaagcacagctccaaactatacctaaaaaatatttctgcacttcccagagacctggacttcaaactttcccagtggagcctgattatagaacttgagggtcctatctcaggatgaaggggagaggccctggcttcacgggaaggtattccagcattgttctgcttcacccttgactgcgttgtctggcagtttctgtgtgctgccaggatattatatggaactggagaagttggagtcaggtctctgaagctagagtttcactaattagatgcctctgtacatgagaactattactgtctgcaggtccatatagctaagctgccaggaaaaacacattatcttccaaaactttcagagcatgtgcagaaccctttcttagcgttttcttctcagcattttctctgcctcccagaggctggcagccagtgacactgcagagttcagcatgttctaaccatgcacgcagggcaggggctgccttggccctcctcaggctttcgttgggagagcaggcagtggtggagcccttctgggtgcagtcctctggggttgctctttggaactcatgtatgagtttgactccacaaggcttggcatggataccaaaacagttgcaacaaattagttctgaacctggaacagagaattcagtgcttctgttactcaggaaggaggtgttcagaatgccccgtgcagagcagccagtcattactcttgtttgttctcacctgggtgcgcaccctcatgatgcagtggctgtagcaccttcatgccaggtgctgagagaatgggaaattcttcctccccattgacctgagtcccagagacttagggacacagacttcaggtgaggctgcggacctcagaagcagtggataatagattggggcattaaaagcttttgaggcagggggctcatgttttgactgcagggagttatgctgagcaaagagatgtgtttttcaaaaccagggttcaaaaccagtgtccacgctggagtaagtggagcatgcttctctgtgttctctgaatgatcttgcactcctcttaagcaaaggagtaccatgaccatagtcagtgggatcccacaaatgttcttaaatgggtaaggctttaagtagccagagagtatccagcctaccattggcttctccacatcctaaaacctgagacagccttggtatatgctttataaatgtttcttttcttgttgtttaagtaattaaagtgtttaaaatgtcttcattagatgtgacgattgtttaatgagtttgcctctgacgtgtggctccatgggagataggcaaagtaattaagaagttaccagaaattggtcggctggggaaatgcaaaagttagcatttcagtagtgaatttctcctggaacaaatgagcaatttttcctctttctcttaagtagtatacccttttctcacttagtaatttaatggtatataaagacatgtgtataagtgagtgcatacatatgaggtatgactatagggttgtttgtgggaatttcttttcctaacatacagaagatcaaagtgttcatctcaccccgccctccttaaaaggtgtcttttgggagactatgtgctcattgactatagtgctgccaagtaaaaatatcttgggaactcttctactagaatggccttcagggcttggcatgttcctttggtttacccttagagatgagaaatcctcctcctttgaggatggatttaagttctggaaataatctcaagtgcttgatagcacagttggatgaaaaaagatggcaattaaggtaagttacaccatttttgtttctaaaaaaatccctaagaaatttcttggaatgagtctttggcctcagagcctctcaaagtgtccacttcaaggggggatcatcctcattagcacacagatttttaaaaatcaattctcttgccatgcctcctatgtgttcacatctctgcatacactacagatataagtgcataatcattcatataaacatctggtaggtattctgtaaaactgtgtttactttagtgcatgttattgtcatgttatgatgtgactggggtgtttctttgtcatgaaactttgcttcttcacagaattagaatactgctctctctatattgaactacatatacagcgttttcttgtatcagcccccaaagtctggatgcccggtgttgtgtttacatgtgattgtgcctaggagtctgttcacatagagacacctgtaagtatttattacaaaacggaatgtaagcaaatatatccacattggttttatttgaatcaaggtgtttttttgttttttgttttttttccttttgaggaggaacagggagcctcctcctccatgagcacttacagaattgtgtaaaattctgtgaaacagtggtaagcatgggcacccgatttcagctgtcctgctgccgctgccctccaacctgctctgtgtgtgtgtgtcgctgtgcttggtggcagtgtgccgtgctcgtgccggctcttcccagcagactggtatctggctgtaacgtttgacgtcttcatattgccagtctgtattgaggggtgatgtacatggccatacagccaaatgggtctgtgtaccagtgtggggattccaagaacactgcctgtcccccacagcaaatattgatgctgttggtcagccaaagattttcctctcctttgctgcttaaacttgtgccttaatattgtacataataaatggataaaatggcaa

SEQ ID NO: 460183 - DNA, 9052 bp, Homo sapiens
cggacggcggcgggagcgcgcgagaagctctaggacccagcagcggttgtcgggtttggggctggaggtgaagccctgtgtgaatggggttgattgtccggcgccacttccccgcgctgcccggcagccgtcttccccagccgagggactgaactagccatgatcgcctcatgtggagggcaaagttgcgccggggaacttgtgagcctgcggtgaaagggtccccttctgcttgttatagccccagtagtcctgtccaggttctagaagactccacctacttttccccagactttcagctctattctgggaggcatgaaacatctgctttgacggtggaggcaaccagtagcatcagggaaaaagttgttgaagatcctctttgtaacttccactccccaaacttcctgaggatctcagaggtggaaatgagaggttccgaggatgcggcagctggaacagtattgcagcggctgatccaggaacaactgcggtatggcaccccaaccgagaacatgaacttgctggccattcagcaccaggccacagggagtgcaggaccagcccatcctacaaacaacttttcttccacggaaaacctcactcaagaagacccacaaatggtctaccagtcagcacgccaagaaccgcagggtcaagaacaccaggtggacaatacggtgatggagaaacaggtccggtccagcagcctcagcagaacaacgaggaactgcccacttacgaggaggcaaaagcacagtcgcagttcttcagggggcagcagcagcagcaacagcagcagggggcggtgggccatggttactacatggcagggggcaccagtcagaagtcccgaactgaggggaggcccactgtgaaccgtgccaacagtggacaggcgcataaggacgaggcgctgaaggaactgaagcagggccacgtccgctcgctcagcgagagaatcatgcagctgtccctggagaggaatggggccaagcaacaccttcccggctcggggaatggaaagggcttcaaagtaggaggggggccctcccctgcccagcctgcaggtaaagtgctggaccctcggggtcctccacctgagtaccccttcaagaccaagcaaatgatgtccccagtcagcaagacccaggagcacggacttttttatggtgaccagcaccccgggatgctccacgagatggtcaagccctaccctgctcctcagcctgtgagaacagatgtggccgtcctgcggtaccacgccaccccctgagtatggggtaacgagccgcccatgccaacttccgttcccatcaaccatgcagcagcacagccccatgtcctcccagacctcttccgccagcgggccactgcactctgtctccctgccgcttccactcccgatggccctgggtgctccacagcccccgcctgccgcctcccccagccagcagcttggtccagatgcctttgcgattgtggagcgagcccagcaaatggtggagatattaacagaggagaaccgggtgcttcaccaggaacttcagggttactacgacaatgccgacaagctccacaagtttgaaaaagaacttcagagaatttcggaagcctatgaaagtctggtcaagtctaccaccaagcgagaatcgctggacaaggccatgagaaacaaattggaaggcgagattagaagacttcatgatttcaacagagacctccgagatcgactagagactgctaacaggcaactatccagcagggaatacgaagggcatgaagacaaagctgcagaggggcattatgcttcccagaacaaagaattcttgaaggaaaaggagaaattagaaatggagttagcagcagtgcggactgcaagtgaggaccatcggagacacatcgagatcctggaccaggctttgagcaacgcccaggccagggtcatcaagctggaagaggagttacgagagaagcaagcatatgttgagaaagttgagaagctgcagcaggccctgacccagctgcagtctgcatgtgagaagcgagaacagatggagcggagactgcggacttggctggagagagagctggatgcactgagaacccagcagaaacatggaaatggccagccagccaacatgccggaatacaatgccccagccctcctggaacttgtgcgggagaaggaggagcggatcctggccctggaggccgacatgacaaagtgggagcagaagtacctggaggagagcaccatccgacactttgccatgaatgccgcagccactgcagcagctgagagggacaccacgatcatcaaccactcacggaatggcagctacggagagagctcgctggaggcccacatctggcaagaggaggaggaggtggtgcaggccaacagaaggtgtcaggacatggaatacactattaaaaatctccatgccaaaatcatagagaaagatgctatgattaaggtcctgcagcagcgatctcgtaaagatgccgggaagacagactcctccagcctacgtcctgcccgctccgttccatccatagcagcagctactgggacacactctcgccagacctctcttaccagcagccagctggctgaggaaaagaaggaagagaagacctggaaggggagcatagaatgggataatggggagagcacattggaagaagtgctctctcgcataaggattgctgctggggaaggagcaccatgagcatgcctctgccccactgctgccacccccacccacctcagcactgtcctccatagcctccactacggcagccagcagtgcccacgccaagacaggcagcaaggacagcagcacacagactgacaagagtgccgagctcttctggcccagcatggcctcccttcccagccgcggccggctgagcacgacccctgctcacagccccgtcctgaaacacccagcggccaaagggaccgcagagaaactggagaactctcctggccatgggaagtcgcctgaccacagaggccgggtcagcagcttgctgcacaagcccgagttccctgatggagagatgatggaagtcctcatctaactgccatccctgtggaatttcagtacagaacactgacaaacaaggaaagcggcagagaaagaagaaagacctagaaggttgtagatgggaaatcaggaatgatttgaactgataaagatttcagactcataagaacacattttataaatgttaaacacaaaaactacatgactgaagatagaagagaatgcgatggattttattacacatggtggaagagagaagaggcgtgtaggtttgcaaacaaagttaagaaataggaaactgaatttttcattgtacagaaaatgtatctcttggggagggcctgtgtacccccattctctgattataaacagataaacccaaatgtggatcatccttggaatacccccattctccttgcctcttagcatgtttgatttaagaaaagcctccaggaaatcttgagagcctgtcttggcataatgcagtgtcacctgtgccaaccatggggtgtcccgtgagtgtgagtgtggcagtgagaagaagcatcgagggcgaggggaatatgaaagttggtcttcacctaattacctgtttggtttggattttcaagagatgattgggcttcttagcttttctgaattctgcagtattttctaaacaggatagattatgatctcggtccccatccatcctaacttctgagttcatctctgtctctgctttacagtctttaattttttgttgttccttcatttttttctttttaataagacatagcagaattccttaggtatgggatttatgagaccagtacctgaactgtcatcattcctactgtgtttgatagtgaccagtaggacaaagccacgtgccgacttcctggctgcttcacctttgcatagctgggttgcagctgcgaacctcattctgactgtgaactaagcaagctttgaggaggcaggagattccgtgggtccctgtgacatattgcattaagatcgtggcacttgcttttttgtctttcacatcggctgtcttgcaaggagcttgacatttccaaattccattgctctgtttggggaagacttaggacagcactccaggaaacagatgacaatttacagacagttgtctcagtggtttccagaatctcaccagcctcccgtatagcttcttgtattgaggctcatgagcgtattcacactctttcctcccccgcgcacgcctctgcttgctctcgatcagcatccagacctccgtggcaccaggttgcctctgttgtgaacttcttttgtaacctaccaggccagttgtatatacagtgttgtcaggtttttccgggtttcagttttgaggcagtttattcaaagtgagacagaagtgccacggaaaagaggcaggagtgtgttaggtggtgggtccattagacctctgctgtgacattgcatattcagctctgcagacactggcttcctttacaaatctaagagatgctggattagaaaagaggagaagctcatcgggccatcagagagatgctcctacagggtcctgatgtttttgtacctccaggtcagctggatcgctgttttcccagttccctttgctcatgcttacttagaggaagaaagaaaggggggtacctcttccaagtaccttctaaatgaaacactcaagagagtgctactcaggaaactttgcttggatcctaaaatggactggtcttgggtgtgtaaccccggtgaagttatagcctccccaaattgaggtgacagaaggaagacaagaggtgtaagctggagagggaagggaagaaatcagtggctttggccagcctctgtgccacccagtacgacagaggagtgggaactggccctctggggctctgcttggccataggcactgcacattgtgccacctgctcatcacctcctctagtctcacactgagcatcggagtacctgttgtgcagacaggaaaactgaggagctctgagaggctgagcatggagctcaccccatgccatagggtgtgggaagagggcacaggaggcctcatccatgggggaaagggttgaggatggacatgggtggggagagggcatagacatcccttcctaatctctgttcccaccacatttcataggagatgagttaggagatgacagctaactctcttaaggacattttgaccccagtttatgttggggatggaccagaaaggaaaatgtctagagataggaaggtaaatcaactctgccagcccctaccatcaggtctgggccaccccaaacttgggctgcctcccttagacataggttagagtgagagacccagctgtttctcccgaagcctcgtcttcatgccccagacacctgattgccccaatcaggtgtcagacttgcttgctcttcgaggtccccctgagctgccaagtgttttcattgtaaacagacacatcgccatgtttcagggcttcaacggcattgtattttggactttgaccgtattttttttctcttaacctactgagactcttccttaagaacaggatctatagctttaaaatgtcttcttctatgggaaatttcctgccaagccagggcactaaattctttcatcattagagctttcctgaagtccggccatatactgagtacctgctctgagttctgggcagcttacaatatcttaaacagattttcagaaaaataatgcaactatattttctagtgtcaactgtatgcaaacagtgtggtaaataccttttaattagtcctccacccacctggagtacagggggtgcgtttattattctgatttcactgatgaggaaatgggctcagaaaggttaagtcccttcctgaaatctcacagccaggagaagctaggatgatttaaaacaaagtttggagaggcactgggcatagaccctggctgtacagcctctaacatgcggcactgcatcttggcagtctctatgcctgtctgtgatgtgtgtgtgcacgtgtaactacacacacacacacacacacacacacacacagctatcacacatctcagagcctaagaaataggactaagcccagaactcctagaatcacctataaatgctaggcatagatggaaattattgtgttccaccagaagcacagctccaaactatacctaaaaaatatttctgcacttcccagagacctggacttcaaactttcccagtggagcctgattatagaacttgagggtcctatctcaggatgaaggggagaggccctggcttcacgggaaggtattccagcattgttctgcttcacccttgactgcgttgtctggcagtttctgtgtgctgccaggatattatatggaactggagaagttggagtcaggtctctgaagctagagtttcactaattagatgcctctgtacatgagaactattactgtctgcaggtccatatagctaagctgccaggaaaaacacattatcttccaaaactttcagagcatgtgcagaaccctttcttagcgttttcttctcagcattttctctgcctcccagaggctggcagccagtgacactgcagagttcagcatgttctaaccatgcacgcagggcaggggctgccttggccctcctcaggctttcgttgggagagcaggcagtggtggagcccttctgggtgcagtcctctggggttgctctttggaactcatgtatgagtttgactccacaaggcttggcatggataccaaaacagttgcaacaaattagttctgaacctggaacagagaattcagtgcttctgttactcaggaaggaggtgttcagaatgccccgtgcagagcagccagtcattactcttgtttgttctcacctgggtgcgcaccctcatgatgcagtggctgtagcaccttcatgccaggtgctgagagaatgggaaattcttcctccccattgacctgagtcccagagacttagggacacagacttcaggtgaggctgcggacctcagaagcagtggataatagattggggcattaaaagcttttgaggcagggggctcatgttttgactgcagggagttatgctgagcaaagagatgtgtttttcaaaaccagggttcaaaaccagtgtccacgctggagtaagtggagcatgcttctctgtgttctctgaatgatcttgcactcctcttaagcaaaggagtaccatgaccatagtcagtgggatcccacaaatgttcttaaatgggtaaggctttaagtagccagagagtatccagcctaccattggcttctccacatcctaaaacctgagacagccttggtatatgctttataaatgtttcttttcttgttgtttaagtaattaaagtgtttaaaatgtcttcattagatgtgacgattgtttaatgagtttgcctctgacgtgtggctccatgggagataggcaaagtaattaagaagttaccagaaattggtcggctggggaaatgcaaaagttagcatttcagtagtgaatttctcctggaacaaatgagcaatttttcctctttctcttaagtagtatacccttttctcacttagtaatttaatggtatataaagacatgtgtataagtgagtgcatacatatgaggtatgactatagggttgtttgtgggaatttcttttcctaacatacagaagatcaaagtgttcatctcaccccgccctccttaaaaggtgtcttttgggagactatgtgctcattgactatagtgctgccaagtaaaaatatcttgggaactcttctactagaatggccttcagggcttggcatgttcctttggtttacccttagagatgagaaatcctcctcctttgaggatggatttaagttctggaaataatctcaagtgcttgatagcacagttggatgaaaaaagatggcaattaaggtaagttacaccatttttgtttctaaaaaaatccctaagaaatttcttggaatgagtctttggcctcagagcctctcaaagtgtccacttcaaggggggatcatcctcattagcacacagatttttaaaaatcaattctcttgccatgcctcctatgtgttcacatctctgcatacactacagatataagtgcataatcattcatataaacatctggtaggtattctgtaaaactgtgtttactttagtgcatgttattgtcatgttatgatgtgactggggtgtttctttgtcatgaaactttgcttcttcacagaattagaatactgctctctctatattgaactacatatacagcgttttcttgtatcagcccccaaagtctggatgcccggtgttgtgtttacatgtgattgtgcctaggagtctgttcacatagagacacctgtaagtatttattacaaaacggaatgtaagcaaatatatccacattggttttatttgaatcaaggtgtttttttgttttttgttttttttccttttgaggaggaacagggagcctcctcctccatgagcacttacagaattgtgtaaaattctgtgaaacagtggtaagcatgggcacccgatttcagctgtcctgctgccgctgccctccaacctgctctgtgtgtgtgtgtcgctgtgcttggtggcagtgtgccgtgctcgtgccggctcttcccagcagactggtatctggctgtaacgtttgacgtcttcatattgccagtctgtattgaggggtgatgtacatggccatacagccaaatgggtctgtgtaccagtgtggggattccaagaacactgcctgtcccccacagcaaatattgatgctgttggtcagccaaagattttcctctcctttgctgcttaaacttgtgccttaatattgtacataataaatggataaaatggcaaaatgactcttttctctcgcttgctcctttcttccttaaagaacttataaactgatgctcaataaatgtttcatttcattgtaccccacttaatgttt

SEQ ID NO: 460184 - DNA, 7444 bp, Homo sapiens
cggacggcggcgggagcgcgcgagaagctctaggacccagcagcggttgtcgggtttggggctggaggtgaagccctgtgtgaatggggttgattgtccggcgccacttccccgcgctgcccggcagccgtcttccccagccgagggactgaactagccatgatcgcctcatgtggagggcaaagttgcgccggggaacttgtgagcctgcggtgaaagggtccccttctgcttgttatagccccagtagtcctgtccaggttctagaagactccacctacttttccccagactttcagctctattctgggaggcatgaaacatctgctttgacggtggaggcaaccagtagcatcagggaaaaagttgttgaagatcctctttgtaacttccactccccaaacttcctgaggatctcagaggtggaaatgagaggttccgaggatgcggcagctggaacagtattgcagcggctgatccaggaacaactgcggtatggcaccccaaccgagaacatgaacttgctggccattcagcaccaggccacagggagtgcaggaccagcccatcctacaaacaacttttcttccacggaaaacctcactcaagaagacccacaaatggtctaccagtcagcacgccaagaaccgcagggtcaagaacaccaggtggacaatacggtgatggagaaacaggtccggtccagcagcctcagcagaacaacgaggaactgcccacttacgaggaggcaaaagcacagtcgcagttcttcagggggcagcagcagcagcaacagcagcagggggcggtgggccatggttactacatggcagggggcaccagtcagaagtcccgaactgaggggaggcccactgtgaaccgtgccaacagtggacaggcgcataaggacgaggcgctgaaggaactgaagcagggccacgtccgctcgctcagcgagagaatcatgcagctgtccctggagaggaatggggccaagcaacaccttcccggctcggggaatggaaagggcttcaaagtaggaggggggccctcccctgcccagcctgcaggtaaagtgctggaccctcggggtcctccacctgagtaccccttcaagaccaagcaaatgatgtccccagtcagcaagacccaggagcacggacttttttatggtgaccagcaccccgggatgctccacgagatggtcaagccctaccctgctcctcagcctgtgagaacagatgtggccgtcctgcggtaccacgccaccccctgagtatggggtaacgagccgcccatgccaacttccgttcccatcaaccatgcagcagcacagccccatgtcctcccagacctcttccgccagcgggccactgcactctgtctccctgccgcttccactcccgatggccctgggtgctccacagcccccgcctgccgcctcccccagccagcagcttggtccagatgcctttgcgattgtggagcgagcccagcaaatggtggagatattaacagaggagaaccgggtgcttcaccaggaacttcagggttactacgacaatgccgacaagctccacaagtttgaaaaagaacttcagagaatttcggaagcctatgaaagtctggtcaagtctaccaccaagcgagaatcgctggacaaggccatgagaaacaaattggaaggcgagattagaagacttcatgatttcaacagagacctccgagatcgactagagactgctaacaggcaactatccagcagggaatacgaagggcatgaagacaaagctgcagaggggcattatgcttcccagaacaaagaattcttgaaggaaaaggagaaattagaaatggagttagcagcagtgcggactgcaagtgaggaccatcggagacacatcgagatcctggaccaggctttgagcaacgcccaggccagggtcatcaagctggaagaggagttacgagagaagcaagcatatgttgagaaagttgagaagctgcagcaggccctgacccagctgcagtctgcatgtgagaagcgagaacagatggagcggagactgcggacttggctggagagagagctggatgcactgagaacccagcagaaacatggaaatggccagccagccaacatgccggaatacaatgccccagccctcctggaacttgtgcgggagaaggaggagcggatcctggccctggaggccgacatgacaaagtgggagcagaagtacctggaggagagcaccatccgacactttgccatgaatgccgcagccactgcagcagctgagagggacaccacgatcatcaaccactcacggaatggcagctacggagagagctcgctggaggcccacatctggcaagaggaggaggaggtggtgcaggccaacagaaggtgtcaggacatggaatacactattaaaaatctccatgccaaaatcatagagaaagatgctatgattaaggtcctgcagcagcgatctcgtaaagatgccgggaagacagactcctccagcctacgtcctgcccgctccgttccatccatagcagcagctactgggacacactctcgccagacctctcttaccagcagccagctggctgaggaaaagaaggaagagaagacctggaaggggagcatagaatgggataatggggagagcacattggaagaagtgctctctcgcataaggattgctgctggggaaggagcaccatgagcatgcctctgccccactgctgccacccccacccacctcagcactgtcctccatagcctccactacggcagccagcagtgcccacgccaagacaggcagcaaggacagcagcacacagactgacaagagtgccgagctcttctggcccagcatggcctcccttcccagccgcggccggctgagcacgacccctgctcacagccccgtcctgaaacacccagcggccaaagggaccgcagagaaactggagaactctcctggccatgggaagtcgcctgaccacagaggccgggtcagcagcttgctgcacaagcccgagttccctgatggagagatgatggaagtcctcatctaactgccatccctgtggaatttcagtacagaacactgacaaacaaggaaagcggcagagaaagaagaaagacctagaaggttgtagatgggaaatcaggaatgatttgaactgataaagatttcagactcataagaacacattttataaatgttaaacacaaaaactacatgactgaagatagaagagaatgcgatggattttattacacatggtggaagagagaagaggcgtgtaggtttgcaaacaaagttaagaaataggaaactgaatttttcattgtacagaaaatgtatctcttggggagggcctgtgtacccccattctctgattataaacagataaacccaaatgtggatcatccttggaatacccccattctccttgcctcttagcatgtttgatttaagaaaagcctccaggaaatcttgagagcctgtcttggcataatgcagtgtcacctgtgccaaccatggggtgtcccgtgagtgtgagtgtggcagtgagaagaagcatcgagggcgaggggaatatgaaagttggtcttcacctaattacctgtttggtttggattttcaagagatgattgggcttcttagcttttctgaattctgcagtattttctaaacaggatagattatgatctcggtccccatccatcctaacttctgagttcatctctgtctctgctttacagtctttaattttttgttgttccttcatttttttctttttaataagacatagcagaattccttaggtatgggatttatgagaccagtacctgaactgtcatcattcctactgtgtttgatagtgaccagtaggacaaagccacgtgccgacttcctggctgcttcacctttgcatagctgggttgcagctgcgaacctcattctgactgtgaactaagcaagctttgaggaggcaggagattccgtgggtccctgtgacatattgcattaagatcgtggcacttgcttttttgtctttcacatcggctgtcttgcaaggagcttgacatttccaaattccattgctctgtttggggaagacttaggacagcactccaggaaacagatgacaatttacagacagttgtctcagtggtttccagaatctcaccagcctcccgtatagcttcttgtattgaggctcatgagcgtattcacactctttcctcccccgcgcacgcctctgcttgctctcgatcagcatccagacctccgtggcaccaggttgcctctgttgtgaacttcttttgtaacctaccaggccagttgtatatacagtgttgtcaggtttttccgggtttcagttttgaggcagtttattcaaagtgagacagaagtgccacggaaaagaggcaggagtgtgttaggtggtgggtccattagacctctgctgtgacattgcatattcagctctgcagacactggcttcctttacaaatctaagagatgctggattagaaaagaggagaagctcatcgggccatcagagagatgctcctacagggtcctgatgtttttgtacctccaggtcagctggatcgctgttttcccagttccctttgctcatgcttacttagaggaagaaagaaaggggggtacctcttccaagtaccttctaaatgaaacactcaagagagtgctactcaggaaactttgcttggatcctaaaatggactggtcttgggtgtgtaaccccggtgaagttatagcctccccaaattgaggtgacagaaggaagacaagaggtgtaagctggagagggaagggaagaaatcagtggctttggccagcctctgtgccacccagtacgacagaggagtgggaactggccctctggggctctgcttggccataggcactgcacattgtgccacctgctcatcacctcctctagtctcacactgagcatcggagtacctgttgtgcagacaggaaaactgaggagctctgagaggctgagcatggagctcaccccatgccatagggtgtgggaagagggcacaggaggcctcatccatgggggaaagggttgaggatggacatgggtggggagagggcatagacatcccttcctaatctctgttcccaccacatttcataggagatgagttaggagatgacagctaactctcttaaggacattttgaccccagtttatgttggggatggaccagaaaggaaaatgtctagagataggaaggtaaatcaactctgccagcccctaccatcaggtctgggccaccccaaacttgggctgcctcccttagacataggttagagtgagagacccagctgtttctcccgaagcctcgtcttcatgccccagacacctgattgccccaatcaggtgtcagacttgcttgctcttcgaggtccccctgagctgccaagtgttttcattgtaaacagacacatcgccatgtttcagggcttcaacggcattgtattttggactttgaccgtattttttttctcttaacctactgagactcttccttaagaacaggatctatagctttaaaatgtcttcttctatgggaaatttcctgccaagccagggcactaaattctttcatcattagagctttcctgaagtccggccatatactgagtacctgctctgagttctgggcagcttacaatatcttaaacagattttcagaaaaataatgcaactatattttctagtgtcaactgtatgcaaacagtgtggtaaataccttttaattagtcctccacccacctggagtacagggggtgcgtttattattctgatttcactgatgaggaaatgggctcagaaaggttaagtcccttcctgaaatctcacagccaggagaagctaggatgatttaaaacaaagtttggagaggcactgggcatagaccctggctgtacagcctctaacatgcggcactgcatcttggcagtctctatgcctgtctgtgatgtgtgtgtgcacgtgtaactacacacacacacacacacacacacacacacagctatcacacatctcagagcctaagaaataggactaagcccagaactcctagaatcacctataaatgctaggcatagatggaaattattgtgttccaccagaagcacagctccaaactatacctaaaaaatatttctgcacttcccagagacctggacttcaaactttcccagtggagcctgattatagaacttgagggtcctatctcaggatgaaggggagaggccctggcttcacgggaaggtattccagcattgttctgcttcacccttgactgcgttgtctggcagtttctgtgtgctgccaggatattatatggaactggagaagttggagtcaggtctctgaagctagagtttcactaattagatgcctctgtacatgagaactattactgtctgcaggtccatatagctaagctgccaggaaaaacacattatcttccaaaactttcagagcatgtgcagaaccctttcttagcgttttcttctcagcattttctctgcctcccagaggctggcagccagtgacactgcagagttcagcatgttctaaccatgcacgcagggcaggggctgccttggccctcctcaggctttcgttgggagagcaggcagtggtggagcccttctgggtgcagtcctctggggttgctctttggaactcatgtatgagtttgactccacaaggcttggcatggataccaaaacagttgcaacaaattagttctgaacctggaacagagaattcagtgcttctgttactcaggaaggaggtgttcagaatgccccgtgcagagcagccagtcattactcttgtttgttctcacctgggtgcgcaccctcatgatgcagtggctgtagcaccttcatgccaggtgctgagagaatgggaaattcttcctccccattgacctgagtcccagagacttagggacacagacttcaggtgaggctgcggacctcagaagcagtggataatagattggggcattaaaagcttttgaggcagggggctcatgttttgactgcagggagttatgctgagcaaagagatgtgtttttcaaaaccagggttcaaaaccagtgtccacgctggagtaagtggagcatgcttctctgtgttctctgaatgatcttgcactcctcttaagcaaaggagtaccatgaccatagtcagtgggatcccacaaatgttcttaaatgggtaaggctttaagtagccagagagtatccagcctaccattggcttctccacatcctaaaacctgagacagccttggtatatgctttataaatgtttcttttcttgttgtttaagtaattaaagtgtttaaaatgtc

SEQ ID NO: 460185 - DNA, 8906 bp, Homo sapiens
cggacggcggcgggagcgcgcgagaagctctaggacccagcagcggttgtcgggtttggggctggaggtgaagccctgtgtgaatggggttgattgtccggcgccacttccccgcgctgcccggcagccgtcttccccagccgagggactgaactagccatgatcgcctcatgtggagggcaaagttgcgccggggaacttgtgagcctgcggtgaaagggtccccttctgcttgttatagccccagtagtcctgtccaggttctagaagactccacctacttttccccagactttcagctctattctgggaggcatgaaacatctgctttgacggtggaggcaaccagtagcatcagggaaaaagttgttgaagatcctctttgtaacttccactccccaaacttcctgaggatctcagaggtggaaatgagaggttccgaggatgcggcagctggaacagtattgcagcggctgatccaggaacaactgcggtatggcaccccaaccgagaacatgaacttgctggccattcagcaccaggccacagggagtgcaggaccagcccatcctacaaacaacttttcttccacggaaaacctcactcaagaagacccacaaatggtctaccagtcagcacgccaagaaccgcagggtcaagaacaccaggtggacaatacggtgatggagaaacaggtccggtccagcagcctcagcagaacaacgaggaactgcccacttacgaggaggcaaaagcacagtcgcagttcttcagggggcagcagcagcagcaacagcagcagggggcggtgggccatggttactacatggcagggggcaccagtcagaagtcccgaactgaggggaggcccactgtgaaccgtgccaacagtggacaggcgcataaggacgaggcgctgaaggaactgaagcagggccacgtccgctcgctcagcgagagaatcatgcagctgtccctggagaggaatggggccaagcaacaccttcccggctcggggaatggaaagggcttcaaagtaggaggggggccctcccctgcccagcctgcaggtaaagtgctggaccctcggggtcctccacctgagtaccccttcaagaccaagcaaatgatgtccccagtcagcaagacccaggagcacggacttttttatggtgaccagcaccccgggatgctccacgagatggtcaagccctaccctgctcctcagcctgtgagaacagatgtggccgtcctgcggtaccacgccaccccctgagtatggggtaacgagccgcccatgccaacttccgttcccatcaaccatgcagcagcacagccccatgtcctcccagacctcttccgccagcgggccactgcactctgtctccctgccgcttccactcccgatggccctgggtgctccacagcccccgcctgccgcctcccccagccagcagcttggtccagatgcctttgcgattgtggagcgagcccagcaaatggtggagatattaacagaggagaaccgggtgcttcaccaggaacttcagggttactacgacaatgccgacaagctccacaagtttgaaaaagaacttcagagaatttcggaagcctatgaaagtctggtcaagtctaccaccaagcgagaatcgctggacaaggccatgagaaacaaattggaaggcgagattagaagacttcatgatttcaacagagacctccgagatcgactagagactgctaacaggcaactatccagcagggaatacgaagggcatgaagacaaagctgcagaggggcattatgcttcccagaacaaagaattcttgaaggaaaaggagaaattagaaatggagttagcagcagtgcggactgcaagtgaggaccatcggagacacatcgagatcctggaccaggctttgagcaacgcccaggccagggtcatcaagctggaagaggagttacgagagaagcaagcatatgttgagaaagttgagaagctgcagcaggccctgacccagctgcagtctgcatgtgagaagcgagaacagatggagcggagactgcggacttggctggagagagagctggatgcactgagaacccagcagaaacatggaaatggccagccagccaacatgccggaatacaatgccccagccctcctggaacttgtgcgggagaaggaggagcggatcctggccctggaggccgacatgacaaagtgggagcagaagtacctggaggagagcaccatccgacactttgccatgaatgccgcagccactgcagcagctgagagggacaccacgatcatcaaccactcacggaatggcagctacggagagagctcgctggaggcccacatctggcaagaggaggaggaggtggtgcaggccaacagaaggtgtcaggacatggaatacactattaaaaatctccatgccaaaatcatagagaaagatgctatgattaaggtcctgcagcagcgatctcgtaaagatgccgggaagacagactcctccagcctacgtcctgcccgctccgttccatccatagcagcagctactgggacacactctcgccagacctctcttaccagcagccagctggctgaggaaaagaaggaagagaagacctggaaggggagcataggattgctgctggggaaggagcaccatgagcatgcctctgccccactgctgccacccccacccacctcagcactgtcctccatagcctccactacggcagccagcagtgcccacgccaagacaggcagcaaggacagcagcacacagactgacaagagtgccgagctcttctggcccagcatggcctcccttcccagccgcggccggctgagcacgacccctgctcacagccccgtcctgaaacacccagcggccaaagggaccgcagagaaactggagaactctcctggccatgggaagtcgcctgaccacagaggccgggtcagcagcttgctgcacaagcccgagttccctgatggagagatgatggaagtcctcatctaactgccatccctgtggaatttcagtacagaacactgacaaacaaggaaagcggcagagaaagaagaaagacctagaaggttgtagatgggaaatcaggaatgatttgaactgataaagatttcagactcataagaacacattttataaatgttaaacacaaaaactacatgactgaagatagaagagaatgcgatggattttattacacatggtggaagagagaagaggcgtgtaggtttgcaaacaaagttaagaaataggaaactgaatttttcattgtacagaaaatgtatctcttggggagggcctgtgtacccccattctctgattataaacagataaacccaaatgtggatcatccttggaatacccccattctccttgcctcttagcatgtttgatttaagaaaagcctccaggaaatcttgagagcctgtcttggcataatgcagtgtcacctgtgccaaccatggggtgtcccgtgagtgtgagtgtggcagtgagaagaagcatcgagggcgaggggaatatgaaagttggtcttcacctaattacctgtttggtttggattttcaagagatgattgggcttcttagcttttctgaattctgcagtattttctaaacaggatagattatgatctcggtccccatccatcctaacttctgagttcatctctgtctctgctttacagtctttaattttttgttgttccttcatttttttctttttaataagacatagcagaattccttaggtatgggatttatgagaccagtacctgaactgtcatcattcctactgtgtttgatagtgaccagtaggacaaagccacgtgccgacttcctggctgcttcacctttgcatagctgggttgcagctgcgaacctcattctgactgtgaactaagcaagctttgaggaggcaggagattccgtgggtccctgtgacatattgcattaagatcgtggcacttgcttttttgtctttcacatcggctgtcttgcaaggagcttgacatttccaaattccattgctctgtttggggaagacttaggacagcactccaggaaacagatgacaatttacagacagttgtctcagtggtttccagaatctcaccagcctcccgtatagcttcttgtattgaggctcatgagcgtattcacactctttcctcccccgcgcacgcctctgcttgctctcgatcagcatccagacctccgtggcaccaggttgcctctgttgtgaacttcttttgtaacctaccaggccagttgtatatacagtgttgtcaggtttttccgggtttcagttttgaggcagtttattcaaagtgagacagaagtgccacggaaaagaggcaggagtgtgttaggtggtgggtccattagacctctgctgtgacattgcatattcagctctgcagacactggcttcctttacaaatctaagagatgctggattagaaaagaggagaagctcatcgggccatcagagagatgctcctacagggtcctgatgtttttgtacctccaggtcagctggatcgctgttttcccagttccctttgctcatgcttacttagaggaagaaagaaaggggggtacctcttccaagtaccttctaaatgaaacactcaagagagtgctactcaggaaactttgcttggatcctaaaatggactggtcttgggtgtgtaaccccggtgaagttatagcctccccaaattgaggtgacagaaggaagacaagaggtgtaagctggagagggaagggaagaaatcagtggctttggccagcctctgtgccacccagtacgacagaggagtgggaactggccctctggggctctgcttggccataggcactgcacattgtgccacctgctcatcacctcctctagtctcacactgagcatcggagtacctgttgtgcagacaggaaaactgaggagctctgagaggctgagcatggagctcaccccatgccatagggtgtgggaagagggcacaggaggcctcatccatgggggaaagggttgaggatggacatgggtggggagagggcatagacatcccttcctaatctctgttcccaccacatttcataggagatgagttaggagatgacagctaactctcttaaggacattttgaccccagtttatgttggggatggaccagaaaggaaaatgtctagagataggaaggtaaatcaactctgccagcccctaccatcaggtctgggccaccccaaacttgggctgcctcccttagacataggttagagtgagagacccagctgtttctcccgaagcctcgtcttcatgccccagacacctgattgccccaatcaggtgtcagacttgcttgctcttcgaggtccccctgagctgccaagtgttttcattgtaaacagacacatcgccatgtttcagggcttcaacggcattgtattttggactttgaccgtattttttttctcttaacctactgagactcttccttaagaacaggatctatagctttaaaatgtcttcttctatgggaaatttcctgccaagccagggcactaaattctttcatcattagagctttcctgaagtccggccatatactgagtacctgctctgagttctgggcagcttacaatatcttaaacagattttcagaaaaataatgcaactatattttctagtgtcaactgtatgcaaacagtgtggtaaataccttttaattagtcctccacccacctggagtacagggggtgcgtttattattctgatttcactgatgaggaaatgggctcagaaaggttaagtcccttcctgaaatctcacagccaggagaagctaggatgatttaaaacaaagtttggagaggcactgggcatagaccctggctgtacagcctctaacatgcggcactgcatcttggcagtctctatgcctgtctgtgatgtgtgtgtgcacgtgtaactacacacacacacacacacacacacacacacagctatcacacatctcagagcctaagaaataggactaagcccagaactcctagaatcacctataaatgctaggcatagatggaaattattgtgttccaccagaagcacagctccaaactatacctaaaaaatatttctgcacttcccagagacctggacttcaaactttcccagtggagcctgattatagaacttgagggtcctatctcaggatgaaggggagaggccctggcttcacgggaaggtattccagcattgttctgcttcacccttgactgcgttgtctggcagtttctgtgtgctgccaggatattatatggaactggagaagttggagtcaggtctctgaagctagagtttcactaattagatgcctctgtacatgagaactattactgtctgcaggtccatatagctaagctgccaggaaaaacacattatcttccaaaactttcagagcatgtgcagaaccctttcttagcgttttcttctcagcattttctctgcctcccagaggctggcagccagtgacactgcagagttcagcatgttctaaccatgcacgcagggcaggggctgccttggccctcctcaggctttcgttgggagagcaggcagtggtggagcccttctgggtgcagtcctctggggttgctctttggaactcatgtatgagtttgactccacaaggcttggcatggataccaaaacagttgcaacaaattagttctgaacctggaacagagaattcagtgcttctgttactcaggaaggaggtgttcagaatgccccgtgcagagcagccagtcattactcttgtttgttctcacctgggtgcgcaccctcatgatgcagtggctgtagcaccttcatgccaggtgctgagagaatgggaaattcttcctccccattgacctgagtcccagagacttagggacacagacttcaggtgaggctgcggacctcagaagcagtggataatagattggggcattaaaagcttttgaggcagggggctcatgttttgactgcagggagttatgctgagcaaagagatgtgtttttcaaaaccagggttcaaaaccagtgtccacgctggagtaagtggagcatgcttctctgtgttctctgaatgatcttgcactcctcttaagcaaaggagtaccatgaccatagtcagtgggatcccacaaatgttcttaaatgggtaaggctttaagtagccagagagtatccagcctaccattggcttctccacatcctaaaacctgagacagccttggtatatgctttataaatgtttcttttcttgttgtttaagtaattaaagtgtttaaaatgtcttcattagatgtgacgattgtttaatgagtttgcctctgacgtgtggctccatgggagataggcaaagtaattaagaagttaccagaaattggtcggctggggaaatgcaaaagttagcatttcagtagtgaatttctcctggaacaaatgagcaatttttcctctttctcttaagtagtatacccttttctcacttagtaatttaatggtatataaagacatgtgtataagtgagtgcatacatatgaggtatgactatagggttgtttgtgggaatttcttttcctaacatacagaagatcaaagtgttcatctcaccccgccctccttaaaaggtgtcttttgggagactatgtgctcattgactatagtgctgccaagtaaaaatatcttgggaactcttctactagaatggccttcagggcttggcatgttcctttggtttacccttagagatgagaaatcctcctcctttgaggatggatttaagttctggaaataatctcaagtgcttgatagcacagttggatgaaaaaagatggcaattaaggtaagttacaccatttttgtttctaaaaaaatccctaagaaatttcttggaatgagtctttggcctcagagcctctcaaagtgtccacttcaaggggggatcatcctcattagcacacagatttttaaaaatcaattctcttgccatgcctcctatgtgttcacatctctgcatacactacagatataagtgcataatcattcatataaacatctggtaggtattctgtaaaactgtgtttactttagtgcatgttattgtcatgttatgatgtgactggggtgtttctttgtcatgaaactttgcttcttcacagaattagaatactgctctctctatattgaactacatatacagcgttttcttgtatcagcccccaaagtctggatgcccggtgttgtgtttacatgtgattgtgcctaggagtctgttcacatagagacacctgtaagtatttattacaaaacggaatgtaagcaaatatatccacattggttttatttgaatcaaggtgtttttttgttttttgttttttttccttttgaggaggaacagggagcctcctcctccatgagcacttacagaattgtgtaaaattctgtgaaacagtggtaagcatgggcacccgatttcagctgtcctgctgccgctgccctccaacctgctctgtgtgtgtgtgtcgctgtgcttggtggcagtgtgccgtgctcgtgccggctcttcccagcagactggtatctggctgtaacgtttgacgtcttcatattgccagtctgtattgaggggtgatgtacatggccatacagccaaatgggtctgtgtaccagtgtggggattccaagaacactgcctgtcccccacagcaaatattgatgctgttggtcagccaaagattttcctctcctttgctgcttaaacttgtgccttaatattgtacataataaatggataaaatggcaa

SEQ ID NO: 460186 - DNA, 8500 bp, Homo sapiens
cggacggcggcgggagcgcgcgagaagctctaggacccagcagcggttgtcgggtttggggctggaggtgaagccctgtgtgaatggggttgattgtccggcgccacttccccgcgctgcccggcagccgtcttccccagccgagggactgaactagccatgatcgcctcatgtggagggcaaagttgcgccggggaacttgtgagcctgcggtgaaagggtccccttctgcttgttatagccccagtagtcctgtccaggttctagaagactccacctacttttccccagactttcagctctattctgggaggcatgaaacatctgctttgacggtggaggcaaccagtagcatcagggaaaaagttgttgaagatcctctttgtaacttccactccccaaacttcctgaggatctcagaggtggaaatgagaggttccgaggatgcggcagctggaacagtattgcagcggctgatccaggaacaactgcggtatggcaccccaaccgagaacatgaacttgctggccattcagcaccaggccacagggagtgcaggaccagcccatcctacaaacaacttttcttccacggaaaacctcactcaagaagacccacaaatggtctaccagtcagcacgccaagaaccgcagggtcaagaacaccaggtggacaatacggtgatggagaaacaggtccggtccagcagcctcagcagaacaacgaggaactgcccacttacgaggaggcaaaagcacagtcgcagttcttcagggggcagcagcagcagcaacagcagcagggggcggtgggccatggttactacatggcagggggcaccagtcagaagtcccgaactgaggggaggcccactgtgaaccgtgccaacagtggacaggcgcataaggacgaggcgctgaaggaactgaagcagggccacgtccgctcgctcagcgagagaatcatgcagctgtccctggagaggaatggggccaagcaacaccttcccggctcggggaatggaaagggcttcaaagtaggaggggggccctcccctgcccagcctgcaggtaaagtgctggaccctcggggtcctccacctgagtaccccttcaagaccaagcaaatgatgtccccagtcagcaagacccaggagcacggacttttttatggtgaccagcaccccgggatgctccacgagatggtcaagccctaccctgctcctcagcctgtgagaacagatgtggccgtcctgcggtaccacgccaccccctgagtatggggtaacgagccgcccatgccaacttccgttcccatcaaccatgcagcagcacagccccatgtcctcccagacctcttccgccagcgggccactgcactctgtctccctgccgcttccactcccgatggccctgggtgctccacagcccccgcctgccgcctcccccagccagcagcttggtccagatgcctttgcgattgtggagcgagcccagcaaatggtggagatattaacagaggagaaccgggtgcttcaccaggaacttcagggttactacgacaatgccgacaagctccacaagtttgaaaaagaacttcagagaatttcggaagcctatgaaagtctggtcaagtctaccaccaagcgagaatcgctggacaaggccatgagaaacaaattggaaggcgagattagaagacttcatgatttcaacagagacctccgagatcgactagagactgctaacaggcaactatccagcagggaatacgaagggcatgaagacaaagctgcagaggggcattatgcttcccagaacaaagaattcttgaaggaaaaggagaaattagaaatggagttagcagcagtgcggactgcaagtgaggaccatcggagacacatcgagatcctggaccaggctttgagcaacgcccaggccagggtcatcaagctggaagaggagttacgagagaagcaagcatatgttgagaaagttgagaagctgcagcaggccctgacccagctgcagtctgcatgtgagaagcgagaacagatggagcggagactgcggacttggctggagagagagctggatgcactgagaacccagcagaaacatggaaatggccagccagccaacatgccggaatacaatgccccagccctcctggaacttgtgcgggagaaggaggagcggatcctggccctggaggccgacatgacaaagtgggagcagaagtacctggaggagagcaccatccgacactttgccatgaatgccgcagccactgcagcagctgagagggacaccacgatcatcaaccactcacggaatggcagctacggagagagctcgctggaggcccacatctggcaagaggaggaggaggtggtgcaggccaacagaaggtgtcaggacatggaatacactattaaaaatctccatgccaaaatcatagagaaagatgctatgattaaggtcctgcagcagcgatctcgtaaagatgccgggaagacagactcctccagcctacgtcctgcccgctccgttccatccatagcagcagctactgggacacactctcgccagacctctcttaccagcagccagctggctgaggaaaagaaggaagagaagacctggaaggggagcatagaatgggataatggggagagcacattggaagaagtgctctctcgcataaggattgctgctggggaaggagcaccatgagcatgcctctgccccactgctgccacccccacccacctcagcactgtcctccatagcctccactacggcagccagcagtgcccacgccaagacaggcagcaaggacagcagcacacagactgacaagagtgccgagctcttctggcccagcatggcctcccttcccagccgcggccggctgagcacgacccctgctcacagccccgtcctgaaacacccagcggccaaagggaccgcagagaaactggagaactctcctggccatgggaagtcgcctgaccacagaggccgggtcagcagcttgctgcacaagcccgagttccctgatggagagatgatggaagtcctcatctaactgccatccctgtggaatttcagtacagaacactgacaaacaaggaaagcggcagagaaagaagaaagacctagaaggttgtagatgggaaatcaggaatgatttgaactgataaagatttcagactcataagaacacattttataaatgttaaacacaaaaactacatgactgaagatagaagagaatgcgatggattttattacacatggtggaagagagaagaggcgtgtaggtttgcaaacaaagttaagaaataggaaactgaatttttcattgtacagaaaatgtatctcttggggagggcctgtgtacccccattctctgattataaacagataaacccaaatgtggatcatccttggaatacccccattctccttgcctcttagcatgtttgatttaagaaaagcctccaggaaatcttgagagcctgtcttggcataatgcagtgtcacctgtgccaaccatggggtgtcccgtgagtgtgagtgtggcagtgagaagaagcatcgagggcgaggggaatatgaaagttggtcttcacctaattacctgtttggtttggattttcaagagatgattgggcttcttagcttttctgaattctgcagtattttctaaacaggatagattatgatctcggtccccatccatcctaacttctgagttcatctctgtctctgctttacagtctttaattttttgttgttccttcatttttttctttttaataagacatagcagaattccttaggtatgggatttatgagaccagtacctgaactgtcatcattcctactgtgtttgatagtgaccagtaggacaaagccacgtgccgacttcctggctgcttcacctttgcatagctgggttgcagctgcgaacctcattctgactgtgaactaagcaagctttgaggaggcaggagattccgtgggtccctgtgacatattgcattaagatcgtggcacttgcttttttgtctttcacatcggctgtcttgcaaggagcttgacatttccaaattccattgctctgtttggggaagacttaggacagcactccaggaaacagatgacaatttacagacagttgtctcagtggtttccagaatctcaccagcctcccgtatagcttcttgtattgaggctcatgagcgtattcacactctttcctcccccgcgcacgcctctgcttgctctcgatcagcatccagacctccgtggcaccaggttgcctctgttgtgaacttcttttgtaacctaccaggccagttgtatatacagtgttgtcaggtttttccgggtttcagttttgaggcagtttattcaaagtgagacagaagtgccacggaaaagaggcaggagtgtgttaggtggtgggtccattagacctctgctgtgacattgcatattcagctctgcagacactggcttcctttacaaatctaagagatgctggattagaaaagaggagaagctcatcgggccatcagagagatgctcctacagggtcctgatgtttttgtacctccaggtcagctggatcgctgttttcccagttccctttgctcatgcttacttagaggaagaaagaaaggggggtacctcttccaagtaccttctaaatgaaacactcaagagagtgctactcaggaaactttgcttggatcctaaaatggactggtcttgggtgtgtaaccccggtgaagttatagcctccccaaattgaggtgacagaaggaagacaagaggtgtaagctggagagggaagggaagaaatcagtggctttggccagcctctgtgccacccagtacgacagaggagtgggaactggccctctggggctctgcttggccataggcactgcacattgtgccacctgctcatcacctcctctagtctcacactgagcatcggagtacctgttgtgcagacaggaaaactgaggagctctgagaggctgagcatggagctcaccccatgccatagggtgtgggaagagggcacaggaggcctcatccatgggggaaagggttgaggatggacatgggtggggagagggcatagacatcccttcctaatctctgttcccaccacatttcataggagatgagttaggagatgacagctaactctcttaaggacattttgaccccagtttatgttggggatggaccagaaaggaaaatgtctagagataggaaggtaaatcaactctgccagcccctaccatcaggtctgggccaccccaaacttgggctgcctcccttagacataggttagagtgagagacccagctgtttctcccgaagcctcgtcttcatgccccagacacctgattgccccaatcaggtgtcagacttgcttgctcttcgaggtccccctgagctgccaagtgttttcattgtaaacagacacatcgccatgtttcagggcttcaacggcattgtattttggactttgaccgtattttttttctcttaacctactgagactcttccttaagaacaggatctatagctttaaaatgtcttcttctatgggaaatttcctgccaagccagggcactaaattctttcatcattagagctttcctgaagtccggccatatactgagtacctgctctgagttctgggcagcttacaatatcttaaacagattttcagaaaaataatgcaactatattttctagtgtcaactgtatgcaaacagtgtggtaaataccttttaattagtcctccacccacctggagtacagggggtgcgtttattattctgatttcactgatgaggaaatgggctcagaaaggttaagtcccttcctgaaatctcacagccaggagaagctaggatgatttaaaacaaagtttggagaggcactgggcatagaccctggctgtacagcctctaacatgcggcactgcatcttggcagtctctatgcctgtctgtgatgtgtgtgtgcacgtgtaactacacacacacacacacacacacacacacacagctatcacacatctcagagcctaagaaataggactaagcccagaactcctagaatcacctataaatgctaggcatagatggaaattattgtgttccaccagaagcacagctccaaactatacctaaaaaatatttctgcacttcccagagacctggacttcaaactttcccagtggagcctgattatagaacttgagggtcctatctcaggatgaaggggagaggccctggcttcacgggaaggtattccagcattgttctgcttcacccttgactgcgttgtctggcagtttctgtgtgctgccaggatattatatggaactggagaagttggagtcaggtctctgaagctagagtttcactaattagatgcctctgtacatgagaactattactgtctgcaggtccatatagctaagctgccaggaaaaacacattatcttccaaaactttcagagcatgtgcagaaccctttcttagcgttttcttctcagcattttctctgcctcccagaggctggcagccagtgacactgcagagttcagcatgttctaaccatgcacgcagggcaggggctgccttggccctcctcaggctttcgttgggagagcaggcagtggtggagcccttctgggtgcagtcctctggggttgctctttggaactcatgtatgagtttgactccacaaggcttggcatggataccaaaacagttgcaacaaattagttctgaacctggaacagagaattcagtgcttctgttactcaggaaggaggtgttcagaatgccccgtgcagagcagccagtcattactcttgtttgttctcacctgggtgcgcaccctcatgatgcagtggctgtagcaccttcatgccaggtgctgagagaatgggaaattcttcctccccattgacctgagtcccagagacttagggacacagacttcaggtgaggctgcggacctcagaagcagtggataatagattggggcattaaaagcttttgaggcagggggctcatgttttgactgcagggagttatgctgagcaaagagatgtgtttttcaaaaccagggttcaaaaccagtgtccacgctggagtaagtggagcatgcttctctgtgttctctgaatgatcttgcactcctcttaagcaaaggagtaccatgaccatagtcagtgggatcccacaaatgttcttaaatgggtaaggctttaagtagccagagagtatccagcctaccattggcttctccacatcctaaaacctgagacagccttggtatatgctttataaatgtttcttttcttgttgtttaagtaattaaagtgtttaaaatgtcttcattagatgtgacgattgtttaatgagtttgcctctgacgtgtggctccatgggagataggcaaagtaattaagaagttaccagaaattggtcggctggggaaatgcaaaagttagcatttcagtagtgaatttctcctggaacaaatgagcaatttttcctctttctcttaagtagtatacccttttctcacttagtaatttaatggtatataaagacatgtgtataagtgagtgcatacatatgaggtatgactatagggttgtttgtgggaatttcttttcctaacatacagaagatcaaagtgttcatctcaccccgccctccttaaaaggtgtcttttgggagactatgtgctcattgactatagtgctgccaagtaaaaatatcttgggaactcttctactagaatggccttcagggcttggcatgttcctttggtttacccttagagatgagaaatcctcctcctttgaggatggatttaagttctggaaataatctcaagtgcttgatagcacagttggatgaaaaaagatggcaattaaggtaagttacaccatttttgtttctaaaaaaatccctaagaaatttcttggaatgagtctttggcctcagagcctctcaaagtgtccacttcaaggggggatcatcctcattagcacacagatttttaaaaatcaattctcttgccatgcctcctatgtgttcacatctctgcatacactacagatataagtgcataatcattcatataaacatctggtaggtattctgtaaaactgtgtttactttagtgcatgttattgtcatgttatgatgtgactggggtgtttctttgtcatgaaactttgcttcttcacagaattagaatactgctctctctatattgaactacatatacagcgttttcttgtatcagcccccaaagtctggatgcccggtgttgtgtttacatgtgattgtgcctaggagtctgttcacatagagacacctgtaagtatttattacaaaacggaatgtaagcaaatatatccacattggttttatttga

SEQ ID NO: 460187 - DNA, 3464 bp, Homo sapiens
cggacggcggcgggagcgcgcgagaagctctaggacccagcagcggttgtcgggtttggggctggaggtgaagccctgtgtgaatggggttgattgtccggcgccacttccccgcgctgcccggcagccgtcttccccagccgagggactgaactagccatgatcgcctcatgtggagggcaaagttgcgccggggaacttgtgagcctgcggtgaaagggtccccttctgcttgttatagccccagtagtcctgtccaggttctagaagactccacctacttttccccagactttcagctctattctgggaggcatgaaacatctgctttgacggtggaggcaaccagtagcatcagggaaaaagttgttgaagatcctctttgtaacttccactccccaaacttcctgaggatctcagaggtggaaatgagaggttccgaggatgcggcagctggaacagtattgcagcggctgatccaggaacaactgcggtatggcaccccaaccgagaacatgaacttgctggccattcagcaccaggccacagggagtgcaggaccagcccatcctacaaacaacttttcttccacggaaaacctcactcaagaagacccacaaatggtctaccagtcagcacgccaagaaccgcagggtcaagaacaccaggtggacaatacggtgatggagaaacaggtccggtccagcagcctcagcagaacaacgaggaactgcccacttacgaggaggcaaaagcacagtcgcagttcttcagggggcagcagcagcagcaacagcagcagggggcggtgggccatggttactacatggcagggggcaccagtcagaagtcccgaactgaggggaggcccactgtgaaccgtgccaacagtggacaggcgcataaggacgaggcgctgaaggaactgaagcagggccacgtccgctcgctcagcgagagaatcatgcagctgtccctggagaggaatggggccaagcaacaccttcccggctcggggaatggaaagggcttcaaagtaggaggggggccctcccctgcccagcctgcaggtaaagtgctggaccctcggggtcctccacctgagtaccccttcaagaccaagcaaatgatgtccccagtcagcaagacccaggagcacggacttttttatggtgaccagcaccccgggatgctccacgagatggtcaagccctaccctgctcctcagcctgtgagaacagatgtggccgtcctgcggtaccacgccaccccctgagtatggggtaacgagccgcccatgccaacttccgttcccatcaaccatgcagcagcacagccccatgtcctcccagacctcttccgccagcgggccactgcactctgtctccctgccgcttccactcccgatggccctgggtgctccacagcccccgcctgccgcctcccccagccagcagcttggtccagatgcctttgcgattgtggagcgagcccagcaaatggtggagatattaacagaggagaaccgggtgcttcaccaggaacttcagggttactacgacaatgccgacaagctccacaagtttgaaaaagaacttcagagaatttcggaagcctatgaaagtctggtcaagtctaccaccaagcgagaatcgctggacaaggccatgagaaacaaattggaaggcgagattagaagacttcatgatttcaacagagacctccgagatcgactagagactgctaacaggcaactatccagcagggaatacgaagggcatgaagacaaagctgcagaggggcattatgcttcccagaacaaagaattcttgaaggaaaaggagaaattagaaatggagttagcagcagtgcggactgcaagtgaggaccatcggagacacatcgagatcctggaccaggctttgagcaacgcccaggccagggtcatcaagctggaagaggagttacgagagaagcaagcatatgttgagaaagttgagaagctgcagcaggccctgacccagctgcagtctgcatgtgagaagcgagaacagatggagcggagactgcggacttggctggagagagagctggatgcactgagaacccagcagaaacatggaaatggccagccagccaacatgccggaatacaatgccccagccctcctggaacttgtgcgggagaaggaggagcggatcctggccctggaggccgacatgacaaagtgggagcagaagtacctggaggagagcaccatccgacactttgccatgaatgccgcagccactgcagcagctgagagggacaccacgatcatcaaccactcacggaatggcagctacggagagagctcgctggaggcccacatctggcaagaggaggaggaggtggtgcaggccaacagaaggtgtcaggacatggaatacactattaaaaatctccatgccaaaatcatagagaaagatgctatgattaaggtcctgcagcagcgatctcgtaaagatgccgggaagacagactcctccagcctacgtcctgcccgctccgttccatccatagcagcagctactgggacacactctcgccagacctctcttaccagcagccagctggctgaggaaaagaaggaagagaagacctggaaggggagcatagaatgggataatggggagagcacattggaagaagtgctctctcgcataaggattgctgctggggaaggagcaccatgagcatgcctctgccccactgctgccacccccacccacctcagcactgtcctccatagcctccactacggcagccagcagtgcccacgccaagacaggcagcaaggacagcagcacacagactgacaagagtgccgagctcttctggcccagcatggcctcccttcccagccgcggccggctgagcacgacccctgctcacagccccgtcctgaaacacccagcggccaaagggaccgcagagaaactggagaactctcctggccatgggaagtcgcctgaccacagaggccgggtcagcagcttgctgcacaagcccgagttccctgatggagagatgatggaagtcctcatctaactgccatccctgtggaatttcagtacagaacactgacaaacaaggaaagcggcagagaaagaagaaagacctagaaggttgtagatgggaaatcaggaatgatttgaactgataaagatttcagactcataagaacacattttataaatgttaaacacaaaaactacatgactgaagatagaagagaatgcgatggattttattacacatggtggaagagagaagaggcgtgtaggtttgcaaacaaagttaagaaataggaaactgaatttttcattgtacagaaaatgtatctcttggggagggcctgtgtacccccattctctgattataaacagataaacccaaatgtggatcatccttggaataccccc

SEQ ID NO: 460188 - DNA, 454 bp, Homo sapiens
gctggggaaggagcaccatgagcatgcctctgccccactgctgccacccccacccacctcagcactgtcctccatagcctccactacggcagccagcagtgcccacgccaagacaggcagcaaggacagcagcacacagactgacaagagtgccgagctcttctggcccagcatggcctcccttcccagccgcggccggctgagcacgacccctgctcacagccccgtcctgaaacacccagcggccaaagggaccgcagagaaactgggtatgtgggctaccccaccttgatgcccctgaaaactgtggaactgtctggcctaagagaatcttttgttgagctagagaggaagcaggggcacccatcagctcttactctatggggatgctattctaatgcacttaggatatgtgtgccctttcttattacgggaataaatatgcatatagaca

SEQ ID NO: 460189 - DNA, 470 bp, Homo sapiens
tccctcctttctgtcctcaaccttgaccattcagaactttgtgacacattcagtcccgcagaggacttgactttcgctggtgctgctgcaacccttggaaccgggttgtgtgagaacattagagcatttgcgccttcactcagtgtgtcttgaggactgttatgttgacctcacgggtcattttggtgggtggctggacttgtgataattctgaatagtaactttggaattttatgaatcaaaaagaaagagctccctctgccaagttgaaacactgtgggagaatgcctggtgggttcttgtgagtcacacaggaaggaaggaggacttgatgggcactcatattcacttcgctttctttcccccagggtccccttctgcttgttatagccccagtagtcctgtccaggttctagaagactccacctacttttccccagactttcagctctattctgggaggcatgaaa

SEQ ID NO: 460190 - DNA, 3415 bp, Homo sapiens
cggacggcggcgggagcgcgcgagaagctctaggacccagcagcggttgtcgggtttggggctggaggtgaagccctgtgtgaatggggttgattgtccggcgccacttccccgcgctgcccggcagccgtcttccccagccgagggactgaactagccatgatcgcctcatgtggagggcaaagttgcgccggggaacttgtgagcctgcggtgaaagggtccccttctgcttgttatagccccagtagtcctgtccaggttctagaagactccacctacttttccccagactttcagctctattctgggaggcatgaaacatctgctttgacggtggaggcaaccagtagcatcagggaaaaagttgttgaagatcctctttgtaacttccactccccaaacttcctgaggatctcagaggtggaaatgagaggttccgaggatgcggcagctggaacagtattgcagcggctgatccaggaacaactgcggtatggcaccccaaccgagaacatgaacttgctggccattcagcaccaggccacagggagtgcaggaccagcccatcctacaaacaacttttcttccacggaaaacctcactcaagaagacccacaaatggtctaccagtcagcacgccaagaaccgcagggtcaagaacaccaggtggacaatacggtgatggagaaacaggtccggtccagcagcctcagcagaacaacgaggaactgcccacttacgaggaggcaaaagcacagtcgcagttcttcagggggcagcagcagcagcaacagcagcagggggcggtgggccatggttactacatggcagggggcaccagtcagaagtcccgaactgaggggaggcccactgtgaaccgtgccaacagtggacaggcgcataaggacgaggcgctgaaggaactgaagcagggccacgtccgctcgctcagcgagagaatcatgcagctgtccctggagaggaatggggccaagcaacaccttcccggctcggggaatggaaagggcttcaaagtaggaggggggccctcccctgcccagcctgcaggtaaagtgctggaccctcggggtcctccacctgagtaccccttcaagaccaagcaaatgatgtccccagtcagcaagacccaggagcacggacttttttatggtgaccagcaccccgggatgctccacgagatggtcaagccctaccctgctcctcagcctgtgagaacagatgtggccgtcctgcggtaccacgccaccccctgagtatggggtaacgagccgcccatgccaacttccgttcccatcaaccatgcagcagcacagccccatgtcctcccagacctcttccgccagcgggccactgcactctgtctccctgccgcttccactcccgatggccctgggtgctccacagcccccgcctgccgcctcccccagccagcagcttggtccagatgcctttgcgattgtggagcgagcccagcaaatggtggagatattaacagaggagaaccgggtgcttcaccaggaacttcagggttactacgacaatgccgacaagctccacaagtttgaaaaagaacttcagagaatttcggaagcctatgaaagtctggtcaagtctaccaccaagcgagaatcgctggacaaggccatgagaaacaaattggaaggcgagattagaagacttcatgatttcaacagagacctccgagatcgactagagactgctaacaggcaactatccagcagggaatacgaagggcatgaagacaaagctgcagaggggcattatgcttcccagaacaaagaattcttgaaggaaaaggagaaattagaaatggagttagcagcagtgcggactgcaagtgaggaccatcggagacacatcgagatcctggaccaggctttgagcaacgcccaggccagggtcatcaagctggaagaggagttacgagagaagcaagcatatgttgagaaagttgagaagctgcagcaggccctgacccagctgcagtctgcatgtgagaagcgagaacagatggagcggagactgcggacttggctggagagagagctggatgcactgagaacccagcagaaacatggaaatggccagccagccaacatgccggaatacaatgccccagccctcctggaacttgtgcgggagaaggaggagcggatcctggccctggaggccgacatgacaaagtgggagcagaagtacctggaggagagcaccatccgacactttgccatgaatgccgcagccactgcagcagctgagagggacaccacgatcatcaaccactcacggaatggcagctacggagagagctcgctggaggcccacatctggcaagaggaggaggaggtggtgcaggccaacagaaggtgtcaggacatggaatacactattaaaaatctccatgccaaaatcatagagaaagatgctatgattaaggtcctgcagcagcgatctcgtaaagatgccgggaagacagactcctccagcctacgtcctgcccgctccgttccatccatagcagcagctactgggacacactctcgccagacctctcttaccagcagccagctggctgaggaaaagaaggaagagaagacctggaaggggagcataggattgctgctggggaaggagcaccatgagcatgcctctgccccactgctgccacccccacccacctcagcactgtcctccatagcctccactacggcagccagcagtgcccacgccaagacaggcagcaaggacagcagcacacagactgacaagagtgccgagctcttctggcccagcatggcctcccttcccagccgcggccggctgagcacgacccctgctcacagccccgtcctgaaacacccagcggccaaagggaccgcagagaaactggagaactctcctggccatgggaagtcgcctgaccacagaggccgggtcagcagcttgctgcacaagcccgagttccctgatggagagatgatggaagtcctcatctaactgccatccctgtggaatttcagtacagaacactgacaaacaaggaaagcggcagagaaagaagaaagacctagaaggttgtagatgggaaatcaggaatgatttgaactgataaagatttcagactcataagaacacattttataaatgttaaacacaaaaactacatgactgaagatagaagagaatgcgatggattttattacacatggtggaagagagaagaggcgtgtaggtttgcaaacaaagttaagaaataggaaactgaatttttcattgtacagaaaatgtatctcttggggagggcctgtgtacccccattctctgattataaacagataaacccaaatgtggatcatccttggaataccccc

SEQ ID NO: 460191 - DNA, 1437 bp, Homo sapiens
cggacggcggcgggagcgcgcgagaagctctaggacccagcagcggttgtcgggtttggggctggaggtgaagccctgtgtgaatggggttgattgtccggcgccacttccccgcgctgcccggcagccgtcttccccagccgagggactgaactagccatgatcgcctcatgtggagggcaaagttgcgccggggaacttgtgagcctgcggtgaaagggtccccttctgcttgttatagccccagtagtcctgtccaggttctagaagactccacctacttttccccagactttcagctctattctgggaggcatgaaacatctgctttgacggtggaggcaaccagtagcatcagggaaaaagttgttgaagatcctctttgtaacttccactccccaaacttcctgaggatctcagaggtggaaatgagaggttccgaggatgcggcagctggaacagtattgcagcggctgatccaggaacaactgcggtatggcaccccaaccgagaacatgaacttgctggccattcagcaccaggccacagggagtgcaggaccagcccatcctacaaacaacttttcttccacggaaaacctcactcaagaagacccacaaatggtctaccagtcagcacgccaagaaccgcagggtcaagaacaccaggtggacaatacggtgatggagaaacaggtccggtccagcagcctcagcagaacaacgaggaactgcccacttacgaggaggcaaaagcacagtcgcagttcttcagggggcagcagcagcagcaacagcagcagggggcggtgggccatggttactacatggcagggggcaccagtcagaagtcccgaactgaggggaggcccactgtgaaccgtgccaacagtggacaggcgcataaggacgaggcgctgaaggaactgaagcagggccacgtccgctcgctcagcgagagaatcatgcagctgtccctggagaggaatggggccaagcaacaccttcccggctcggggaatggaaagggcttcaaagtaggaggggggccctcccctgcccagcctgcaggtaaagtgctggaccctcggggtcctccacctgagtaccccttcaagaccaagcaaatgatgtccccagtcagcaagacccaggagcacggacttttttatggtgaccagcaccccgggatgctccacgagatggtcaagccctaccctgctcctcagcctgtgagaacagatgtggccgtcctgcggtaccacgccaccccctgagtatggggtaacgaggtgattatcaactgcagacgtttcgtgcggcttttcaaaattcaatagtcatgttattagcatttattattttcagagcagattaggtttttgtcatcaggcttttttccttatgcatgatatttaataaaccactttgtggccag

SEQ ID NO: 460192 - DNA, 1597 bp, Homo sapiens
ttggagaagaactgaacatgagcaccagaccccactcaacagcatcaatattttgctactcctctacttatcctatattcactggttatataaatataatttatatatatataaatgcactggttgtataaatataactatatttaaattatatttataaattataaatacatatgtatatttaaattatatttatatatattcattggctatataaatataattaactggttgttataaaaaacctgtggctttctttcctcgatgccaccttttctctcacttcctgggctcagtcacccccagctgtgccttatctccttccctgctatccaatgcctctggtctctgccatctgctctgccctctcctgcctgctcccacaaccttgtcccaaattcacttttcagagcccagatactaagtcacacaactttttctggggcctttttttgggggagaagcaggaagtggagaacttggggagagtgggatgccggaaccctgtccagtctcagtgaagaagggtgtggcagccagcagtgcccagaacaccactctcccctggaaaactactacatggtatgcaaggcagatgagaaatttaatcagctgctacattttcttcgcagtcataagcaagagcaacacctggtcttctttagcacttgcacctgtgtggaatactacaggaaggctctggaggtgctgatgaagagtgtgaagattgtgtgcatccatggaaagatgaaatacgatcttcatgcaaattgaaaattgcaattgttctgcaaattgcaaagtggaattttagtgtgcactgatgtggtggcccaggaatcaatgttcctgaagtaaactgggttttgcagtacaatcgcccctacaatgcaagtgcctttgtgcagcacttttcttatattactgatttgagacttctcctcattttgaatgtaagcatttagtgtcataagtttccttttcagcattgctttagctttatctcacatattttgttacttgagtaaacttcagcatttcattttggtttattgataatctttttgagtgtgtttctttgtaccatttttattttgattgcactggatatttcaagcatacatatgtgacttattgcagtctgctggtatcagtgttttgctattttaagtgaaatgtaggaatctttaccttccatgaggggaacatcacacaccggggactgttgtggggtggggagaagggggagggatagcattaggagatatagctaatgctaaatgacgagttaatgggtgcagcacaccaacatggcacatgtatacatatgtaacaaacctgcctgttttgcacatgtaccctaaaacttaaagtataataataataataaaaagacaagtaaatagcaaataccaattgattgaatgtctgtaaataaataaataagcacattaaaaaaaaaagaaacctttaccttccatgattttttatattactgtcttgagcatcagataatgttataattttggctttgaccttcaaatatttttataaacctcatgagaaaaaggatgccctaccctttgtacccatatat

SEQ ID NO: 460193 - DNA, 758 bp, Homo sapiens
ccaggtacctcagttggaaatgcagaaatcacccctcttctgcattggtctggctgggagctgataaacgatgggacaaaactggaaaagacaacaaaagctttggaatgttccacaacttccttttattcgagttcctccctccatctatgacacttccttactaaaggccctcaaccaagggcaacagcgctacttttacagcattatgaggatttacaactccaggccccagtgggaggccctgcagacccgctacattcacagccttcagcaccaacagctgcttggctatattactcaacgggaagccttgtcttatgctcttgtacttagagattcaaccaagagagcctcagccaaggtagctcctcaaagaaccattccccggaaaacttcagccatgacaagaagatgtccatcagtactacctgtatctgtggttctacctagggcccaaagtaaaaggcgccaagtgctcaggaactgagacttggcagcattttcagaaacaggaagtttgcccatgtatccctggtatctagtgggtgctttgtgcatatttgttgaatgacagtgaataatttctaatataaaccccagacctaaaaataatctctgattcatataaattttgccagcaagaccaagaggtttaagagcaatggagccgagagtaagcaagcctttccacataacatccgtagagtaaaaggacttttaaagctttcaaagtaaaagtttactttggattagaa

SEQ ID NO: 460194 - DNA, 900 bp, Homo sapiens
ggaccgtacatccgctggtcctcaagggaccccaaataaccgacgcggcccgcagacctcaaataaccgacgcggcccgcagaccccaaataactgacgtggcccgtagaccccaaataaccgacatggcccacagaccccaaataacggacgcggcccgtagaccccaaataaccgacgtagcccgtagactccaaataaccgacacggcccgcagacctcaaataaccgatgcggcccacagacctcaaataaccgacgcggcctgcagaccccaaataaccaacactgcttacagaccccaaataaccgacgcggcccgcagaccccaaataactgacgtggcccgtagaccccaaataaccgacatggcccgcagaccccaaataacggacgcggcccgtagaccccaaataaccgacacggcccgcagaccccaaataactgacgcagcctgcagaccccagataaccgatgcggcccgcagaccccaaataactgacacagcttggacaggagaactttggagacggcacctggagtcttggaccctgctggatgtcttttccctcgttggccctgtggtgtatccttctgtggagacaaaccacacccaggaacgccgccgctgctgagtcctgagtgtatcttccagcccctccctgagtgtatctttctgtggagacaaaccacacccaggaatgccaccactgctgagtcccgagtccttccagccccgccctgagtgtgcagaggccgtggggcctgacactgcatgacgggcagtgtgctgctcacccaagcctcagaacaaagtatgaaactgattgctttccatcgacacatccagcccagctgagcctggaggccgatttcacacatatttactacatccctgcc

SEQ ID NO: 460195 - DNA, 3993 bp, Homo sapiens
ctgtggcctgttctttctgccctgagttctcccatcacgttgagttcacatgtaacttggtgactcagcactgtagtggagaggcctgtttcctagcagagttgttggagtttgcagaagttatttttgctgtctatcatgaaaataccaagtcagcaagtgatataatcagtattgagtcatgcaaagagtatctgcttggagtagtaaaagttccaacaaaagagctgctgatcaagagatctgggatcacaggatggtatcctatcattttaccagaagacgggggcctacctcatggcctggagctcatgcagaagatcgtgggtggtctggagctttcgatttccttcacgcatcgtggagatagagaacgggtgttggaagctgctgagcatttgggctggagctttgagaacagcctgaaagattttgtcagaatggatgaaggggagccagccactgtcaccatctccaccccaaggctgtggctgcccatccattgtgtgctgcttgctggccacaaccacattcataagaatacatattgctaccttcgctacaagttctatgatcatgaagccttttggacccctctcaagaagcctaaggaatctgtaaacaaaaagcagattatggtcactttcaaggcatccaaaagagcagaagtcaccaggggcccatcactgctttggtacttcagggaggagaggctagagatccaagtgtggcgagcttatggcaatgacagtgtggagagaccccatcagacagacagctggattggctcagcctatgtggacctggccagacttggggagaggtcagcgaggacgctaactgtcagtggtgtgtatcctctgtttggacgaaatgcttccaacctctcaggagctgccttgcgagttcatgtggttctttcctctctttcctcacaccttgagcccactcatgagctggactccatggactgcagcagccacagtgagtctgagcagctccccagaaggaatgatgaggtccagctctctccaccagaagtcatctcctgccaccagaagtctcctgcctccacccaggtcccctgcagcagcaccacagctgaagtccgcctgacgcaggagggccctgctgatttggatggaacgtttgcagtcagcatcctagtagaaagagcaatgcacttgagcttgaaagggagccccttgacagagcggaaagtatcgatacccagttgttgtgtatcctttgcaacagccgatgagtcatctcctgtatacacccaagtggttgaaaacacagattcccccatctggaattttcaacagcagtcaaggctatcaaaagagctgcttctggacccacaacaaaccctggtcttcaaagtttggcataaaggagatgaggagagggtgattggctttgcctcggtggacctctccccacttctctctggcttccagtttgtctgtggctggtacaacatcacagacttcagtggagagtgccaggggcagataaaagttgctgtctcccctttggagagtttgatacacttcaaagaagaaaggcaagcaaggcgtggagtggagacctcaaaatcactgatcccaatatacagtcccttttccttccctgcctctgatacgtatgctgcattctccagccacatggcaaggcagaccctagaccaacttgctcatgcctcctcaaaggagcttgatttctcctctcctgggagaagtgataccacaagaagccaagcatcacgccatgaagagcatgtgcagaacattcgccggtttcatgaatccctgcatcttcagggagaggcacccttgccatgtgatgacaaactgaccacatcacctttgtcctcccaaacctccattctgacttctctcaggaagaatctgagtgagcttgatcagattcagaggtacttccgccagaagctcaccaagcctttcctacccctcagccctcagactcaaacggccatctcacagcaccaggagagctgtagggaccatcttgggccaggtgccagcagcctagaccctgggagccagtgtatcctggagaaatccagtaacctggtgttgcaagtcagctccttaatcacagatctgcagactatcaccagggattcgcaagcagctttgagttctcaccgagccaggagtagaagcaacaaggccaccaccctcccagatgctcaggacacagaagcactgcaagaacgatgcacaatgccagatgagccattggtaagagctccagataaaggcacagattccccatcaccccctcctctcgaagagacttcaaatggaggaagaatgctccatgagtccctgaggcatgcagtacccattacaaggatgcagagcagtgaagacactgaggcaggcccagcctacagtgatgaggactatgaagaagacatcattgagcccaggaccttaaatgagatcaccacggtgacagacaaaactagcccttggtctagtgtcatatcagacacaagtgaggtcatcagccctcagcctgacgaggtgcagagggaaggcccctcttgtccttctccagggcctttctgcagagaggagcttatggtcaaaagtagctttctctccagcccagaaagggctgtcaacccccacctgcctaggcagggttctcctagccaaagtcttgttgcttgtgagtgtgaggcctctaaggccagggttggtggcgagtctgcctcagccaaccctcagcccatcccatgcccaacactctcaggagctcaacagagcagcacgtttgttggatggagctcaccacagacagatcagaacaaggagcccaagtcagaggccccagctgagaatgaagctgccaccagtgagctcggtgactctgctgatagcttcaagaagttgccgctaaatctagcctcccagagcagaagggaaaaccataagggaccacccatcgactcctctgacatcaggcagaggcaggtgacaactggatcagagacgtccacaaagcagagcctcctgctcccagggcccattgtggtgcccaacttctttttgcctccccagcagttggaggcttccctgcggatgctttcactctcagcaactttgccaccagcagccacaacagatcaggacaagagcgaagccaccaggggagctctctcccaaaggccttgtcgccccagacctaactcgctccccctcaacctgcctgaggaagaaactctcaggattgcacggatattttcttctcagtactcccagaaagactgacgcagcctgaggggctggggggaaggagacacctgcccaccctccgtcagctttgtccagcttgcaggaggcaccaggtctggctccttcagggctgtcacagtcctgaaaccaccacttgcctaggccacggatgcctcaagagacccggtcagcccagactggaggagtgccccaaaccagtccagtgtccacttgccagaatttcagctccttttttctgtggtgaggcaaaggctagaaataaaatggaatccgcgcccaagtgggacccaagcaggcatctttcggtggagaaacgccccccagtgtccttgacacagctgactgctggcatgagcccaccctctgcctgaagatgcaggaccatttttgccttaaaagttggggaggagggacatgtagattgtgtgcattgtgcatagtcaaggaaatcctagggccacctccagttcatttgtgtgggaacaaggatattttatagatacaaattatttttatgctgtgttgaattaatcaattaggagaggaaggggaaatcacttccttcaaactttttatctgattgtctaaaattctaaccatgcttttaacttattatttttacccagctctgaaggtcattgttcttgcctgtgtttgaataaaatcatattggtgtttgtaatctgtgcacaagtgtttc

SEQ ID NO: 460196 - DNA, 617 bp, Homo sapiens
ctgtggcctgttctttctgccctgagttctcccatcacgttgagttcacatgtaacttggtgactcagcactgtagtggagaggcctgtttcctagcagagttgttggagtttgcagaagttatttttgctgtctatcatgaaaataccaagtcaggtgagcaccatatgacttgtcacaatcaaaattaaaagaggctgcattgtgaatggtatagcccttcctaggagatacatactgcagtatttaaaggtgaggagtcataatctctgcaacttatttctgaaagatatagcaaaaaataaggatatgtactaagtatgtaagagaaagatagtgtagagagaaataaagcaaatgtgtcagtgttaatgggtgtatcgagatgaagggtgtgtaggagttcattattatatttttgcaacttttctgtatacctgaatttttttcaaaacatttaatttaaaaaatgggctggcacagtggcccaaacctataatcccagcactttgggaggccgaagtgggaggatcacttgagcccaagagttcaaggtgcagtgagttatgattgcaccactgcattccagcctggatgagagagtgagaccctgccaa

SEQ ID NO: 460197 - DNA, 4089 bp, Homo sapiens
ctgtggcctgttctttctgccctgagttctcccatcacgttgagttcacatgtaacttggtgactcagcactgtagtggagaggcctgtttcctagcagagttgttggagtttgcagaagttatttttgctgtctatcatgaaaataccaagtcaggtgagcaccatatgacttgtcacaatcaaaattaaaagaggctgcattgtgaatggtatagcccttcctaggagatacatactgcagtatttaaagcaagtgatataatcagtattgagtcatgcaaagagtatctgcttggagtagtaaaagttccaacaaaagagctgctgatcaagagatctgggatcacaggatggtatcctatcattttaccagaagacgggggcctacctcatggcctggagctcatgcagaagatcgtgggtggtctggagctttcgatttccttcacgcatcgtggagatagagaacgggtgttggaagctgctgagcatttgggctggagctttgagaacagcctgaaagattttgtcagaatggatgaaggggagccagccactgtcaccatctccaccccaaggctgtggctgcccatccattgtgtgctgcttgctggccacaaccacattcataagaatacatattgctaccttcgctacaagttctatgatcatgaagccttttggacccctctcaagaagcctaaggaatctgtaaacaaaaagcagattatggtcactttcaaggcatccaaaagagcagaagtcaccaggggcccatcactgctttggtacttcagggaggagaggctagagatccaagtgtggcgagcttatggcaatgacagtgtggagagaccccatcagacagacagctggattggctcagcctatgtggacctggccagacttggggagaggtcagcgaggacgctaactgtcagtggtgtgtatcctctgtttggacgaaatgcttccaacctctcaggagctgccttgcgagttcatgtggttctttcctctctttcctcacaccttgagcccactcatgagctggactccatggactgcagcagccacagtgagtctgagcagctccccagaaggaatgatgaggtccagctctctccaccagaagtcatctcctgccaccagaagtctcctgcctccacccaggtcccctgcagcagcaccacagctgaagtccgcctgacgcaggagggccctgctgatttggatggaacgtttgcagtcagcatcctagtagaaagagcaatgcacttgagcttgaaagggagccccttgacagagcggaaagtatcgatacccagttgttgtgtatcctttgcaacagccgatgagtcatctcctgtatacacccaagtggttgaaaacacagattcccccatctggaattttcaacagcagtcaaggctatcaaaagagctgcttctggacccacaacaaaccctggtcttcaaagtttggcataaaggagatgaggagagggtgattggctttgcctcggtggacctctccccacttctctctggcttccagtttgtctgtggctggtacaacatcacagacttcagtggagagtgccaggggcagataaaagttgctgtctcccctttggagagtttgatacacttcaaagaagaaaggcaagcaaggcgtggagtggagacctcaaaatcactgatcccaatatacagtcccttttccttccctgcctctgatacgtatgctgcattctccagccacatggcaaggcagaccctagaccaacttgctcatgcctcctcaaaggagcttgatttctcctctcctgggagaagtgataccacaagaagccaagcatcacgccatgaagagcatgtgcagaacattcgccggtttcatgaatccctgcatcttcagggagaggcacccttgccatgtgatgacaaactgaccacatcacctttgtcctcccaaacctccattctgacttctctcaggaagaatctgagtgagcttgatcagattcagaggtacttccgccagaagctcaccaagcctttcctacccctcagccctcagactcaaacggccatctcacagcaccaggagagctgtagggaccatcttgggccaggtgccagcagcctagaccctgggagccagtgtatcctggagaaatccagtaacctggtgttgcaagtcagctccttaatcacagatctgcagactatcaccagggattcgcaagcagctttgagttctcaccgagccaggagtagaagcaacaaggccaccaccctcccagatgctcaggacacagaagcactgcaagaacgatgcacaatgccagatgagccattggtaagagctccagataaaggcacagattccccatcaccccctcctctcgaagagacttcaaatggaggaagaatgctccatgagtccctgaggcatgcagtacccattacaaggatgcagagcagtgaagacactgaggcaggcccagcctacagtgatgaggactatgaagaagacatcattgagcccaggaccttaaatgagatcaccacggtgacagacaaaactagcccttggtctagtgtcatatcagacacaagtgaggtcatcagccctcagcctgacgaggtgcagagggaaggcccctcttgtccttctccagggcctttctgcagagaggagcttatggtcaaaagtagctttctctccagcccagaaagggctgtcaacccccacctgcctaggcagggttctcctagccaaagtcttgttgcttgtgagtgtgaggcctctaaggccagggttggtggcgagtctgcctcagccaaccctcagcccatcccatgcccaacactctcaggagctcaacagagcagcacgtttgttggatggagctcaccacagacagatcagaacaaggagcccaagtcagaggccccagctgagaatgaagctgccaccagtgagctcggtgactctgctgatagcttcaagaagttgccgctaaatctagcctcccagagcagaagggaaaaccataagggaccacccatcgactcctctgacatcaggcagaggcaggtgacaactggatcagagacgtccacaaagcagagcctcctgctcccagggcccattgtggtgcccaacttctttttgcctccccagcagttggaggcttccctgcggatgctttcactctcagcaactttgccaccagcagccacaacagatcaggacaagagcgaagccaccaggggagctctctcccaaaggccttgtcgccccagacctaactcgctccccctcaacctgcctgaggaagaaactctcaggattgcacggatattttcttctcagtactcccagaaagactgacgcagcctgaggggctggggggaaggagacacctgcccaccctccgtcagctttgtccagcttgcaggaggcaccaggtctggctccttcagggctgtcacagtcctgaaaccaccacttgcctaggccacggatgcctcaagagacccggtcagcccagactggaggagtgccccaaaccagtccagtgtccacttgccagaatttcagctccttttttctgtggtgaggcaaaggctagaaataaaatggaatccgcgcccaagtgggacccaagcaggcatctttcggtggagaaacgccccccagtgtccttgacacagctgactgctggcatgagcccaccctctgcctgaagatgcaggaccatttttgccttaaaagttggggaggagggacatgtagattgtgtgcattgtgcatagtcaaggaaatcctagggccacctccagttcatttgtgtgggaacaaggatattttatagatacaaattatttttatgctgtgttgaattaatcaattaggagaggaaggggaaatcacttccttcaaactttttatctgattgtctaaaattctaaccatgcttttaacttattatttttacccagctctgaaggtcattgttcttgcctgtgtttgaataaaatcatattggtgtttgtaatctgtgcacaagtgtttc

SEQ ID NO: 460198 - DNA, 1814 bp, Homo sapiens
ctgtggcctgttctttctgccctgagttctcccatcacgttgagttcacatgtaacttggtgactcagcactgtagtggagaggcctgtttcctagcagagttgttggagtttgcagaagttatttttgctgtctatcatgaaaataccaagtcagcaagtgatataatcagtattgagtcatgcaaagagtatctgcttggagtagtaaaagttccaacaaaagagctgctgatcaagagatctgggatcacaggatggtatcctatcattttaccagaagacgggggcctacctcatggcctggagctcatgcagaagatcgtgggtggtctggagctttcgatttccttcacgcatcgtggagatagagaacgggtgttggaagctgctgagcatttgggctggagctttgagaacagcctgaaagattttgtcagaatggatgaaggggagccagccactgtcaccatctccaccccaaggctgtggctgcccatccattgtgtgctgcttgctggccacaaccacattcataagaatacatattgctaccttcgctacaagttctatgatcatgaagccttttggacccctctcaagaagcctaaggaatctgtaaacaaaaagcagattatggtcactttcaaggcatccaaaagagcagaagtcaccaggggcccatcactgctttggtacttcagggaggagaggctagagatccaagtgtggcgagcttatggcaatgacagtgtggagagaccccatcagacagacagctggattggctcagcctatgtggacctggccagacttggggagaggtcagcgaggacgctaactgtcagtggtgtgtatcctctgtttggacgaaatgcttccaacctctcaggagctgccttgcgagttcatgtggttctttcctctctttcctcacaccttgagcccactcatgagctggactccatggactgcagcagccacagtgagtctgagcagctccccagaaggaatgatgaggtccagctctctccaccagaagtcatctcctgccaccagaagtctcctgcctccacccaggtcccctgcagcagcaccacagctgaagtccgcctgacgcaggagggccctgctgatttggatggaacgtttgcagtcagcatcctagtagaaagagcaatgcacttgagcttgaaagggagccccttgacagagcggaaagtatcgatacccagttgttgtgtatcctttgcaacagccgatgagtcatctcctgtatacacccaagtggttgaaaacacagattcccccatctggaattttcaacagcagtcaaggctatcaaaagagctgcttctggacccacaacaaaccctggtcttcaaagtttggcataaaggagatgaggagagggtgattggctttgcctcggtggacctctccccacttctctctggcttccagtttgtctgtggctggtacaacatcacagacttcagtggagagtgccaggggcagataaaagttgctgtctcccctttggagagtttgatacacttcaaagaagaaaggcaagcaaggcgtggagtggagacctcaaaatcactgcagccgcccctgccctgtgccgtgctgcgctcacctgcctccccagccagccgctgacctctcgcccttcacttgggcagagggagccaattggaggcgctgcttgtcttctttggttctgggaggggtgagggatgggggtcctgtacacaaccacccactagttctcttctccagccaagaggaataaagttttgcttccattca

SEQ ID NO: 460199 - DNA, 815 bp, Homo sapiens
tctccctccaccctcctccatcaagggggagagtggaacatttatgcttatcccttccttaacctttgtgatacaggaatattttggatggatagcttctttaaaatatgaagacttcgaagttatttatccaaaccaacctgatcatttcttaagagtgaatataccttggaagacgtgtcctgcctttagtagcgtcacaatggattacatcctctataaagcagtctgggaggctaacatctgccacaagacaaatatggtgcctgcccccatggagctcatattcgaatggagaaaatgtcaacaagtatcccacggagtgaacacttcaaaaggagaagcacaggtgagaaaatcgaatttggacaccgttgaggagactattgcagtcatccaagctcaagatggtggagcttcatccttgagaataaccaatggggatagatttaagagacacttagagtctgcagccaacagggctgaatgagcagagagttatgattcagaagatcatctaaaattgaacagctgccactactggcaataagtctactgccatttggtagataaccttcttatcacacagaaaaatatcagtacagacaaatagaccgcaaagaaaatgagaccatcagcaaagaagataaagaagtttgtacaaagcaactttttataaatggatggctgtcaggcaaaaataaatttcctgtggacaagaccaagagcaaggcaagaggaaaataaacatgtttaaactattggagagtccataatttaaatataaactcttctgttgagtggtagtgtgcacc

SEQ ID NO: 460200 - DNA, 5940 bp, Homo sapiens
agcggccccgccgcagggcaggcctggccgggcctccccgggctgcggcggcgccccctgcaggccgcggcgggcagagcggggggaaggaacccgagccgggctgccaccgtgtcccaaccggtgccgccgccggagcttctccgggccccgagtcctcgccgaacgccctcctcgccgcccgccgcgtcccggcgccctccggagccgccgagccgcccgcgcacacctgaagcggccgggccaggccctgcctcgatcctcagctcgtcctccccgccccgcaccggccttcactctggagcggccccggcagccgcagcaggggcggcggcggcggatcgaggagctctccaggtcgtcccgggagaggctgctgcagtcccgggacaggatgttctccaagttcacctccatcctgcagcacgccgtggaggcgcttgcaccttctcttcctttacaagaagattttgtttatcactggaaggcaattacccattactacatagagacttcagatgataaagccccagtgaccgatacaaatattccatcgcatctggaacagatgttagatatactggttcaagaagaaaatgaacgggaatctggagagacagggccatgtatggaatatttgcttcatcacaagatcttggaaacattatataccttggggaaagctgattgtcctccgggaatgaaacagcaggttttggttttctatacgaaacttctgggaagaatccggcagccactacttccacacattaacgtgcacaggccagtgcagaataagatgaaatcattggcttccaaaggagtaccaaatgtaatttcagaagatacattaaaaggtcaggattccttgtcaacagatacaggacagtcccgtcaaccagaggaactatctggtgctactggaatggagcaaacagaattggaagatgagcctcctcatcagatggatcacctgtccacaagcttggataacctcagtgtcacctcactgccagaggcctcggttgtttgtccaaatcaggattacaatttagtgaattctttgttaaatcttactagaagtcctgatggcagaatagctgtgaaggcatgtgaaggcttgatgctgttagtaagtttgccagagcctgcggctgcaaagtgccttacacagagcacttgcttgtgtgaactactgacagacagacttgcctccctgtacaaggccctacctcagtcagtggatccgttagatattgaaaccgtggaagcaattaactggggcttggactcatatagtcataaagaagatgcttcagcatttccaggaaaacgagccttaatttcatttctttcctggtttgattattgtgatcagctcattaaggaagcccaaaagactgctgctgttgctcttgccaaagctgttcatgaaagatttttcattggtgttatggaacctcaattaatgcaaacttctgagatgggtattctcacatccactgctctgcttcatcgcatcgttcggcaagtgacctctgatgttttgcttcaagaaatggtgttttttatccttggagaacagagggaaccagaaactctggcagaaatcagcagacatcctttaaggcataggttaattgaacattgtgatcacatatctgatgagataagcataatgacattacgaatgtttgaacatcttttacaaaaacccaatgagcacattctttacaacttggtcttgagaaatcttgaagaaagaaattatacagaatataaacctttgtgcccagaagataaagatgtggtagaaaatggattgatagcaggagcagtagatctggaagaagatccattatttactgacatttcaccagaaaacactttgccaaaccaagagtggcttagttcttcacctcctgctactccagaccaccccaaaaatgatggaaaaactgaagttcataaaattgtaaatagttttctctgtctggtaccggatgacgcaaaatcctcctaccatgttgagggcacaggatatgacacttacctccgagacgctcataggcagttccgagactactgtgctatctgcttaagatgggagtggcctgggtctccaaaagcattggaaaagtgcaatttagaagctgctttctttgaaggtcattttttgaaagtgctgttcgacagaatgggaagaattcttgatcagccatatgatgtaaacttacaagtaacctcagtgttatctagactttctctcttccctcatccacacatccacgagtaccttttggatccttacgtgaacctcgctcctggctgtagatctctcttctctgtaattgtcagggttgttggagaccttatgcttcgaatccagcgtattcaagactttactcccaagcttctgttagtcagaaagcggttacttggtttggaacctgaaggccctattattgaccacatcacactgctagagggtgtgattgtgttagaagagttctgtaaggagctggcggcaatcgcatttgtaaaatatcatgcttcctccacaccataaataacatctttcatgtaactgggggaacagaactactgtgtacatttcaccaaaaaagactcagttccacccagccacaagaggataaaaagcctttttaaacgcagtattgctgtaaactggacagaaccattaagaacctattgagtggacattcttggtgaaatgttgtataatgttgttttcattggctttatcataatggttctatatatacaattgcacattgttgaatccaggatacaatcaaaggaacttcaggaaataagcatttctaatgactgtgaaaagctgcaatatttccaatgtcatgactttgatgatatttctgttatattaatgtccttttaggtagcaaggcattttgacattctctgggactcaaatgcttgtattcttttggattaataagtagcaaaaaaaaatcactaattttataactttttaaggtcagaattcttatcaaacaaaatatgaaaactgtaaatgagaaaaaaatacaattcagaaaccattgaatgaattaattataggcgataaaaatgtgtagagcaccattaactttcttcagcttttttaagaataacaatttaatatgataaattcttgattaatataatatatctatatttttaaagaaatgttcttttactcttttgtgcacatagccatgttagtgattttcttcatgtgtgggtcccagtttatttaaactgtgtcgttttcgcagcagtgttcaatttgctcaccattggtagtgtttgctaaaattgtatttttttaagctaagtaacatgtactgggttgagaacctttttcccccctctccctctcagaaaattgctttataaaattgctttataatttgattttcttactgaaacgcatggtggtgtctaggtggggaactgactgataacccttggcagcaatcaaagtgccagtggctcctcgatgtttacatttttttctattttgttcagtcttttgttttaaatgattctaaagagattaaagaaaacagagttttaaatgtcctatttacatgttaaaggatttggggaaattgggtatgtatgtgaatgggtgtacatgtaggaacctgtagttcagcaaagctgcgctgggcacagcatgcttgtacttgattgacaaaatcgtgtttgccagtccactttctatttttcctttaagtgatgctgatcactcaaataatgcttttaagctattgtttgtttttatttgacatgttaagccgcagcactttcttcttcatctttccatttactgatatttgggggaacaggctatcaaaggttccggcttgaagggaactgtcactaccccctctaggaagttattttatgtagcatgtttgcatatacgcattgtgtggcatgtgcatagaggcttgttttacacctatctgctcattttgttgtgttagcttttctggtttatttcatagtttgttcttgctatttattaagaacagaatatcaaaagattatgaatagcctcagctctagaatgcttaccactgttaaaacaacaaaaagactaaacctctaatttcatgcaaatctttgttagcttattctaagaaatttattaagtaaaacaaagaaaaaacagaagtgggagatagttattttgtgcgtaattttctttaaatcattttgaatgatgtgaaggcattcagtttgctgtatttttttaatcacttcatacaaggaaaacttcgacatttacatttctagatgtagtaacagtctactttgatatatgagtatttaaactaaggcattaagagatattagatatttcttaatgttttcatagtgctcaataggtgtagtagcaatgatattacctctgaaaccaaatactcttttatccttgattccactatgggaccttataactagtccatgaaaccaagctcagaaaagctttaactcttatatttgtgtatatgtatgctgcttctgaaaatataatttttctaagttgttgtaatgactttaatttgtaatcagctaaggcttaagatttcatttgtttctaagtttctgtttttcatcccttcttttttcttttatatttagttcagacctagagccagtagaagctctcacagtgagttcaatttgttagtgaaacattgtactgcatcaccagtttttcttaccttctgttgacagctgaatatttctgttactcagtacttgcaaaaacagtaactaaaatgcactatgctgagtggaaagcaccgtcataacaattgattgccatagcaagttccaaagtgaatttcagccttgcttcacatttgtatcaataaatatgcacattttttaaaactttctaacaatatagtctttggatttgtttttagttatgagccgcattctttacttgatagaactcagatttgtcttagcctattgccatatagtactcaccttataactatgtaactttctcgtaatgtatctgtttgtgcaatatggaagctgtgagtggattcatagctttttggtttaattgtacattattgtgtgtgtatatatgtatatatgtatatatataaggaccaaaattcttagctcgcttacactgttgctagtgtaaacattgttacacttaattttacagggcacaaattatggaattacttcataaattcatggtaatgttttcataaattattgcattaacatacaattgccatttaattatgaagtccatcagtattgacagaagacgttacagtgaagtgctaaaaccacactatatggtaattatattttgggttatgtagtaaatcaaatatgcatgtcattgtgacactttatgtgttaaaacatggtagataatcacattttctgggccctgtaaaatagtgttactgtaatactctgttttgcctcctgccttgtttacattaaacaggatatttggtaaatttttttgtattgaaagttgtgtaggttactgacagtgttaccagcgtctggaattcttggtccctccgtggagaaactcttcagatggtcattgtgtacctactctctcttcaaaggaagttgtgatcaagttcaactttttgtgctaacaatgcatgcaggactaagagggatgatctaaaaaataaataatgtaatttaaacaaaacgtcttatgtttttgggttcctaagttaattcgatgtgtattgaatttcatggccatcatgcttggcatatggaagagagcttgtttgcgagcagagagaagaaaaacaacctaatgatagaatttgagatctcagatccaaccatgacgtgaagccttaggtcttttaattgcttgagccctggggtggtgct

SEQ ID NO: 460201 - DNA, 387 bp, Homo sapiens
tttggagtccatgattgtggatgttgggcagacgttgccttcatggtggtaagagggattccagagtctcttatgtcctcaaagcttcaagctcagccaaaagaatctcgatggtttccacaaaaaatcttgggccttggatcaactgcccacccttgaaccaatcctggtggccccaggctgattggcagacctgaatcacctatcccatgcccagaactttggcttgaccaggctcatccaaaacaagggaatccagagtgtttccccaaagaaaatcagggggctattactgggaaaaagaattccaccacaagtataaaaaatactgttatcaataaaacatcacctgatactttggttcattaaagatgtattactttggtt

SEQ ID NO: 460202 - DNA, 5760 bp, Homo sapiens
agcggccccgccgcagggcaggcctggccgggcctccccgggctgcggcggcgccccctgcaggccgcggcgggcagagcggggggaaggaacccgagccgggctgccaccgtgtcccaaccggtgccgccgccggagcttctccgggccccgagtcctcgccgaacgccctcctcgccgcccgccgcgtcccggcgccctccggagccgccgagccgcccgcgcacacctgaagcggccgggccaggccctgcctcgatcctcagctcgtcctccccgccccgcaccggccttcactctggagcggccccggcagccgcagcaggggcggcggcggcggatcgaggagctctccaggtcgtcccgggagaggctgctgcagtcccgggacaggatgttctccaagttcacctccatcctgcagcacgccgtggaggcgcttgcaccttctcttcctttacaagaagattttgtttatcactggaaggcaattacccattactacatagagacttcagatgataaagccccagtgaccgatacaaatattccatcgcatctggaacagatgttagatatactggttcaagaagaaaatgaacgggaatctggagagacagggccatgtatggaatatttgcttcatcacaagatcttggaaacattatataccttggggaaagctgattgtcctccgggaatgaaacagcaggttttggttttctatacgaaacttctgggaagaatccggcagccactacttccacacattaacgtgcacaggccagtgcagaataagatgaaatcattggcttccaaaggagtaccaaatgtaatttcagaagatacattaaaaggtcaggattccttgtcaacagatacaggacagtcccgtcaaccagaggaactatctggtgctactggaatggagcaaacagaattggaagatgagcctcctcatcagatggatcacctgtccacaagcttggataacctcagtgtcacctcactgccagaggcctcggttgtttgtccaaatcaggattacaatttagtgaattctttgttaaatcttactagaagtcctgatggcagaatagctgtgaaggcatgtgaaggcttgatgctgttagtaagtttgccagagcctgcggctgcaaagtgccttacacagagcacttgcttgtgtgaactactgacagacagacttgcctccctgtacaaggccctacctcagtcagtggatccgttagatattgaaaccgtggaagcaattaactggggcttggactcatatagtcataaagaagatgcttcagcatttccaggaaaacgagccttaatttcatttctttcctggtttgattattgtgatcagctcattaaggaagcccaaaagactgctgctgttgctcttgccaaagctgttcatgaaagatttttcattggtgttatggaacctcaattaatgcaaacttctgagatgggtattctcacatccactgctctgcttcatcgcatcgttcggcaagtgacctctgatgttttgcttcaagaaatggtgttttttatccttggagaacagagggaaccagaaactctggcagaaatcagcagacatcctttaaggcataggttaattgaacattgtgatcacatatctgatgagataagcataatgacattacgaatgtttgaacatcttttacaaaaacccaatgagcacattctttacaacttggtcttgagaaatcttgaagaaagaaattatacagaatataaacctttgtgcccagaagataaagatgtggtagaaaatggattgatagcaggagcagtagatctggaagaagatccattatttactgacatttcaccagaaaacactttgccaaaccaagagtggcttagttcttcacctcctgctactccagaccaccccaaaaatgatggaaaaactgaagttcataaaattgtaaatagttttctctgtctggtaccggatgacgcaaaatcctcctaccatgttgagggcacaggatatgacacttacctccgagacgctcataggcagttccgagactactgtgctatctgcttaagatgggagtggcctgggtctccaaaagcattggaaaagtgcaatttagaagctgctttctttgaaggtcattttttgaaagtgctgttcgacagaatgggaagaattcttgatcagccatatgatgtaaacttacaagtaacctcagtgttatctagactttctctcttccctcatccacacatccacgagtaccttttggatccttacgtgaacctcgctcctggctgtagatctctcttctctgtaattgtcagggttgttggagaccttatgcttcgaatccagcgtattcaagactttactcccaagcttctgttagtcagaaagcggttacttggtttggaacctgaaggccctattattgaccacatcacactgctagagggtgtgattgtgttagaagagttctgtaaggagctggcggcaatcgcatttgtaaaatatcatgcttcctccacaccataaataacatctttcatgtaactgggggaacagaactactgtgtacatttcaccaaaaaagactcagttccacccagccacaagaggataaaaagcctttttaaacgcagtattgctgtaaactggacagaaccattaagaacctattgagtggacattcttggtgaaatgttgtataatgttgttttcattggctttatcataatggttctatatatacaattgcacattgttgaatccaggatacaatcaaaggaacttcaggaaataagcatttctaatgactgtgaaaagctgcaatatttccaatgtcatgactttgatgatatttctgttatattaatgtccttttaggtagcaaggcattttgacattctctgggactcaaatgcttgtattcttttggattaataagtagcaaaaaaaaatcactaattttataactttttaaggtcagaattcttatcaaacaaaatatgaaaactgtaaatgagaaaaaaatacaattcagaaaccattgaatgaattaattataggcgataaaaatgtgtagagcaccattaactttcttcagcttttttaagaataacaatttaatatgataaattcttgattaatataatatatctatatttttaaagaaatgttcttttactcttttgtgcacatagccatgttagtgattttcttcatgtgtgggtcccagtttatttaaactgtgtcgttttcgcagcagtgttcaatttgctcaccattggtagtgtttgctaaaattgtatttttttaagctaagtaacatgtactgggttgagaacctttttcccccctctccctctcagaaaattgctttataaaattgctttataatttgattttcttactgaaacgcatggtggtgtctaggtggggaactgactgataacccttggcagcaatcaaagtgccagtggctcctcgatgtttacatttttttctattttgttcagtcttttgttttaaatgattctaaagagattaaagaaaacagagttttaaatgtcctatttacatgttaaaggatttggggaaattgggtatgtatgtgaatgggtgtacatgtaggaacctgtagttcagcaaagctgcgctgggcacagcatgcttgtacttgattgacaaaatcgtgtttgccagtccactttctatttttcctttaagtgatgctgatcactcaaataatgcttttaagctattgtttgtttttatttgacatgttaagccgcagcactttcttcttcatctttccatttactgatatttgggggaacaggctatcaaaggttccggcttgaagggaactgtcactaccccctctaggaagttattttatgtagcatgtttgcatatacgcattgtgtggcatgtgcatagaggcttgttttacacctatctgctcattttgttgtgttagcttttctggtttatttcatagtttgttcttgctatttattaagaacagaatatcaaaagattatgaatagcctcagctctagaatgcttaccactgttaaaacaacaaaaagactaaacctctaatttcatgcaaatctttgttagcttattctaagaaatttattaagtaaaacaaagaaaaaacagaagtgggagatagttattttgtgcgtaattttctttaaatcattttgaatgatgtgaaggcattcagtttgctgtatttttttaatcacttcatacaaggaaaacttcgacatttacatttctagatgtagtaacagtctactttgatatatgagtatttaaactaaggcattaagagatattagatatttcttaatgttttcatagtgctcaataggtgtagtagcaatgatattacctctgaaaccaaatactcttttatccttgattccactatgggaccttataactagtccatgaaaccaagctcagaaaagctttaactcttatatttgtgtatatgtatgctgcttctgaaaatataatttttctaagttgttgtaatgactttaatttgtaatcagctaaggcttaagatttcatttgtttctaagtttctgtttttcatcccttcttttttcttttatatttagttcagacctagagccagtagaagctctcacagtgagttcaatttgttagtgaaacattgtactgcatcaccagtttttcttaccttctgttgacagctgaatatttctgttactcagtacttgcaaaaacagtaactaaaatgcactatgctgagtggaaagcaccgtcataacaattgattgccatagcaagttccaaagtgaatttcagccttgcttcacatttgtatcaataaatatgcacattttttaaaactttctaacaatatagtctttggatttgtttttagttatgagccgcattctttacttgatagaactcagatttgtcttagcctattgccatatagtactcaccttataactatgtaactttctcgtaatgtatctgtttgtgcaatatggaagctgtgagtggattcatagctttttggtttaattgtacattattgtgtgtgtatatatgtatatatgtatatatataaggaccaaaattcttagctcgcttacactgttgctagtgtaaacattgttacacttaattttacagggcacaaattatggaattacttcataaattcatggtaatgttttcataaattattgcattaacatacaattgccatttaattatgaagtccatcagtattgacagaagacgttacagtgaagtgctaaaaccacactatatggtaattatattttgggttatgtagtaaatcaaatatgcatgtcattgtgacactttatgtgttaaaacatggtagataatcacattttctgggccctgtaaaatagtgttactgtaatactctgttttgcctcctgccttgtttacattaaacaggatatttggtaaatttttttgtattgaaagttgtgtaggttactgacagtgttaccagcgtctggaattcttggtccctccgtggagaaactcttcagatggtcattgtgtacctactctctcttcaaaggaagttgtgatcaagttcaactttttgtgctaacaatgcatgcaggactaagagggatgatctaaaaaataaataatgtaatttaaacaaaacgtcttatgttttt

SEQ ID NO: 460203 - DNA, 3546 bp, Homo sapiens
agcggccccgccgcagggcaggcctggccgggcctccccgggctgcggcggcgccccctgcaggccgcggcgggcagagcggggggaaggaacccgagccgggctgccaccgtgtcccaaccggtgccgccgccggagcttctccgggccccgagtcctcgccgaacgccctcctcgccgcccgccgcgtcccggcgccctccggagccgccgagccgcccgcgcacacctgaagcggccgggccaggccctgcctcgatcctcagctcgtcctccccgccccgcaccggccttcactctggagcggccccggcagccgcagcaggggcggcggcggcggatcgaggagctctccaggtcgtcccgggagaggctgctgcagtcccgggacaggatgttctccaagttcacctccatcctgcagcacgccgtggaggcgcttgcaccttctcttcctttacaagaagattttgtttatcactggaaggcaattacccattactacatagagacttcagatgataaagccccagtgaccgatacaaatattccatcgcatctggaacagatgttagatatactggttcaagaagaaaatgaacgggaatctggagagacagggccatgtatggaatatttgcttcatcacaagatcttggaaacattatataccttggggaaagctgattgtcctccgggaatgaaacagcaggttttggttttctatacgaaacttctgggaagaatccggcagccactacttccacacattaacgtgcacaggccagtgcagaataagatgaaatcattggcttccaaaggagtaccaaatgtaatttcagaagatacattaaaaggtcaggattccttgtcaacagatacaggacagtcccgtcaaccagaggaactatctggtgctactggaatggagcaaacagaattggaagatgagcctcctcatcagatggatcacctgtccacaagcttggataacctcagtgtcacctcactgccagaggcctcggttgtttgtccaaatcaggattacaatttagtgaattctttgttaaatcttactagaagtcctgatggcagaatagctgtgaaggcatgtgaaggcttgatgctgttagtaagtttgccagagcctgcggctgcaaagtgccttacacagagcacttgcttgtgtgaactactgacagacagacttgcctccctgtacaaggccctacctcagtcagtggatccgttagatattgaaaccgtggaagcaattaactggggcttggactcatatagtcataaagaagatgcttcagcatttccaggaaaacgagccttaatttcatttctttcctggtttgattattgtgatcagctcattaaggaagcccaaaagactgctgctgttgctcttgccaaagctgttcatgaaagatttttcattggtgttatggaacctcaattaatgcaaacttctgagatgggtattctcacatccactgctctgcttcatcgcatcgttcggcaagtgacctctgatgttttgcttcaagaaatggtgttttttatccttggagaacagagggaaccagaaactctggcagaaatcagcagacatcctttaaggcataggttaattgaacattgtgatcacatatctgatgagataagcataatgacattacgaatgtttgaacatcttttacaaaaacccaatgagcacattctttacaacttggtcttgagaaatcttgaagaaagaaattatacagaatataaacctttgtgcccagaagataaagatgtggtagaaaatggattgatagcaggagcagtagatctggaagaagatccattatttactgacatttcaccagaaaacactttgccaaaccaagagtggcttagttcttcacctcctgctactccagaccaccccaaaaatgatggaaaaactgaagttcataaaattgtaaatagttttctctgtctggtaccggatgacgcaaaatcctcctaccatgttgagggcacaggatatgacacttacctccgagacgctcataggcagttccgagactactgtgctatctgcttaagatgggagtggcctgggtctccaaaagcattggaaaagtgcaatttagaagctgctttctttgaaggtcattttttgaaagtgctgttcgacagaatgggaagaattcttgatcagccatatgatgtaaacttacaagtaacctcagtgttatctagactttctctcttccctcatccacacatccacgagtaccttttggatccttacgtgaacctcgctcctggctgtagatctctcttctctgtaattgtcagggttgttggagaccttatgcttcgaatccagcgtattcaagactttactcccaagcttctgttagtcagaaagcggttacttggtttggaacctgaaggccctatttcagacctagagccagtagaagctctcacagtgagttcaatttgttagtgaaacattgtactgcatcaccagtttttcttaccttctgttgacagctgaatatttctgttactcagtacttgcaaaaacagtaactaaaatgcactatgctgagtggaaagcaccgtcataacaattgattgccatagcaagttccaaagtgaatttcagccttgcttcacatttgtatcaataaatatgcacattttttaaaactttctaacaatatagtctttggatttgtttttagttatgagccgcattctttacttgatagaactcagatttgtcttagcctattgccatatagtactcaccttataactatgtaactttctcgtaatgtatctgtttgtgcaatatggaagctgtgagtggattcatagctttttggtttaattgtacattattgtgtgtgtatatatgtatatatgtatatatataaggaccaaaattcttagctcgcttacactgttgctagtgtaaacattgttacacttaattttacagggcacaaattatggaattacttcataaattcatggtaatgttttcataaattattgcattaacatacaattgccatttaattatgaagtccatcagtattgacagaagacgttacagtgaagtgctaaaaccacactatatggtaattatattttgggttatgtagtaaatcaaatatgcatgtcattgtgacactttatgtgttaaaacatggtagataatcacattttctgggccctgtaaaatagtgttactgtaatactctgttttgcctcctgccttgtttacattaaacaggatatttggtaaatttttttgtattgaaagttgtgtaggttactgacagtgttaccagcgtctggaattcttggtccctccgtggagaaactcttcagatggtcattgtgtacctactctctcttcaaaggaagttgtgatcaagttcaactttttgtgctaacaatgcatgcaggactaagagggatgatctaaaaaataaataatgtaatttaaacaaaacgtcttatgttttt

SEQ ID NO: 460204 - DNA, 924 bp, Homo sapiens
agcggccccgccgcagggcaggcctggccgggcctccccgggctgcggcggcgccccctgcaggccgcggcgggcagagcggggggaaggaacccgagccgggctgccaccgtgtcccaaccggtgccgccgccggagcttctccgggccccgagtcctcgccgaacgccctcctcgccgcccgccgcgtcccggcgccctccggagccgccgagccgcccgcgcacacctgaagcggccgggccaggccctgcctcgatcctcagctcgtcctccccgccccgcaccggccttcactctggagcggccccggcagccgcagcaggggcggcggcggcggatcgaggagctctccaggtcgtcccgggagaggctgctgcagtcccgggacaggatgttctccaagttcacctccatcctgcagcacgccgtggaggcgcttgcaccttctcttcctttacaagaagattttgtttatcactggaaggcaattacccattactacatagagacttcagatgataaagccccagtgaccgatacaaatattccatcgcatctggaacagatgttagatatactggttcaagaagaaaatgaacgggaatctggagagacagggccatgtatggaatatttgcttcatcacaagatcttggaaacattatataccttggggaaagctgattgtcctccgggaatgaaacagcaggttttggttttctatacgaaacttctgggaagaatccggcagccactacttccacacattaacgtgcacaggccagtgcagaaattaattagactctgtggtgaagtcctagcaacaccaacagaaaatgaagagattcagtttctttgcattgtgtgtgcgaagctgaaacaggacccctacctggttaactttttcctagaggtatgata

SEQ ID NO: 460205 - DNA, 2823 bp, Homo sapiens
agcggccccgccgcagggcaggcctggccgggcctccccgggctgcggcggcgccccctgcaggccgcggcgggcagagcggggggaaggaacccgagccgggctgccaccgtgtcccaaccggtgccgccgccggagcttctccgggccccgagtcctcgccgaacgccctcctcgccgcccgccgcgtcccggcgccctccggagccgccgagccgcccgcgcacacctgaagcggccgggccaggccctgcctcgatcctcagctcgtcctccccgccccgcaccggccttcactctggagcggccccggcagccgcagcaggggcggcggcggcggatcgaggagctctccaggtcgtcccgggagaggctgctgcagtcccgggacaggatgttctccaagttcacctccatcctgcagcacgccgtggaggcgcttgcaccttctcttcctttacaagaagattttgtttatcactggaaggcaattacccattactacatagagacttcagatgataaagccccagtgaccgatacaaatattccatcgcatctggaacagatgttagatatactggttcaagaagaaaatgaacgggaatctggagagacagggccatgtatggaatatttgcttcatcacaagatcttggaaacattatataccttggggaaagctgattgtcctccgggaatgaaacagcaggttttggttttctatacgaaacttctgggaagaatccggcagccactacttccacacattaacgtgcacaggccagtgcagaataagatgaaatcattggcttccaaaggagtaccaaatgtaatttcagaagatacattaaaaggtcaggattccttgtcaacagatacaggacagtcccgtcaaccagaggaactatctggtgctactggaatggagcaaacagaattggaagatgagcctcctcatcagatggatcacctgtccacaagcttggataacctcagtgtcacctcactgccagaggcctcggttgtttgtccaaatcaggattacaatttagtgaattctttgttaaatcttactagaagtcctgatggcagaatagctgtgaaggcatgtgaaggcttgatgctgttagtaagtttgccagagcctgcggctgcaaagtgccttacacagagcacttgcttgtgtgaactactgacagacagacttgcctccctgtacaaggccctacctcagtcagtggatccgttagatattgaaaccgtggaagcaattaactggggcttggactcatatagtcataaagaagatgcttcagcatttccaggaaaacgagccttaatttcatttctttcctggtttgattattgtgatcagctcattaaggaagcccaaaagactgctgctgttgctcttgccaaagctgttcatgaaagatttttcattggtgttatggaacctcaattaatgcaaacttctgagatgggtattctcacatccactgctctgcttcatcgcatcgttcggcaagtgacctctgatgttttgcttcaagaaatggtgttttttatccttggagaacagagggaaccagaaactctggcagaaatcagcagacatcctttaaggcataggttaattgaacattgtgatcacatatctgatgagataagcataatgacattacgaatgtttgaacatcttttacaaaaacccaatgagcacattctttacaacttggtcttgagaaatcttgaagaaagaaattatacagaatataaacctttgtgcccagaagataaagatgtggtagaaaatggattgatagcaggagcagtagatctggaagaagatccattatttactgacatttcaccagaaaacactttgccaaaccaagagtggcttagttcttcacctcctgctactccagaccaccccaaaaatgatggaaaaactgaagttcataaaattgtaaatagttttctctgtctggtaccggatgacgcaaaatcctcctaccatgttgagggcacaggatatgacacttacctccgagacgctcataggcagttccgagactactgtgctatctgcttaagatgggagtggcctgggtctccaaaagcattggaaaagtgcaatttagaagctgctttctttgaaggtcattttttgaaagtgctgttcgacagaatgggaagaattcttgatcagccatatgatgtaaacttacaagtaacctcagtgttatctagactttctctcttccctcatccacacatccacgagtaccttttggatccttacgtgaacctcgctcctggctgtagatctctcttctctgtaattgtcagggttgttggagaccttatgcttcgaatccagcgtattcaagactttactcccaagcttctgttagtcagaaagcggttacttggtttggaacctgaaggccctatgcagacgttgccttcatggtggtaagagggattccagagtctcttatgtcctcaaagcttcaagctcagccaaaagaatctcgatggtttccacaaaaaatcttgggccttggatcaactgcccacccttgaaccaatcctggtggccccaggctgattggcagacctgaatcacctatcccatgcccagaactttggcttgaccaggctcatccaaaacaagggaatccagagtgtttccccaaagaaaatcagggggctattactgggaaaaagaattccaccacaagtataaaaaatactgttatcaataaaacatcacctgatactttggttcattaaagatgtattactttggtt

SEQ ID NO: 460206 - DNA, 1496 bp, Homo sapiens
agttcgcgagcgctggctatgggtcctggggcgcggctggcggcgctgctggcggtgctggcgctcgggacaggagacccagaaagggctgcggctcggggcgacacgttctcggcgctgaccagcgtggcgcgcgccctggcgcccgagcgccggctgctggggctgctgaggcggtacctgcgcggggaggaggcgcggctgcgggacctgactagattctacgacaaggtactttctttgcatgaggattcaacaacccctgtggctaaccctctgcttgcatttactctcatcaaacgcctgcagtctgactggaggaatgtgctctgaaggatggctatgagaaggtggagcaagaccttccagcctttgaggaccttgagggagcagcaagggccctgatgcggctgcaggacgtgtacatgctcaatgtgaaaggcctggcccgaggtgtctttcagagagtcactggctctgccatcactgacctgtacagccccaaacggctcttttctctcacaggggatgactgcttccaagttggcaaggtggcctatgacatgggggattattaccatgccattccatggctggaggaggctgtcagtctcttccgaggatcttacggagagtggaagacagaggatgaggcaagtctagaagatgccttggatcacttggcctttgcttatttccggggcaggaaatgtttcgtgtgccctcagcctctctcgggagtttcttctctacagtacgtaatggataaaagataagccagccacagcatctccttctgagatgcattgagagtcatgcaaagaggccagcaggccacgggtagctctgccaatgcatggggcatcttgcagccaaagtgggtacaaacaggcccagataataagaggatggccaggaatgtcttgaaatatgaaaggctcttggcagagagccccaaccacgtggtagctgaggctgtcatccagaggcccaatataccccacctgcagaccagagacacctacgaggggctatgtcagaccctgggttcccagcccactctctaccagatccctagcctctactgttcctatgagaccaattccaacgcctacctgctgctccagcccatccggaaggaggtcatccacctggagccctacattgctctctaccatgacttcgtcagtgactcagaggctcagaaaattagagaacttgcagaaccatggggacgtggtacatgtggctgtatgcatttgtcaaaactcaccaaatggtccacttgagacctgtgtatatcattgtatttattctcagtgtagtacaataagatattttgagagagagaggtcattttcccataattttattacagtatattattattattatattttattgttaatctctgtgcctcatttatgaattataaattataacatataattataaattaaactttgtaattcagttacaatcattattataatttc

SEQ ID NO: 460207 - DNA, 1530 bp, Homo sapiens
agttcgcgagcgctggctatgggtcctggggcgcggctggcggcgctgctggcggtgctggcgctcgggacaggagacccagaaagggctgcggctcggggcgacacgttctcggcgctgaccagcgtggcgcgcgccctggcgcccgagcgccggctgctggggctgctgaggcggtacctgcgcggggaggaggcgcggctgcgggacctgactagattctacgacaaggtactttctttgcatgaggattcaacaacccctgtggctaaccctctgcttgcatttactctcatcaaacgcctgcagtctgactggaggaatgtggtacatagtctggaggccagtgagaacatccgagctctgaaggatggctatgagaaggtggagcaagaccttccagcctttgaggaccttgagggagcagcaagggccctgatgcggctgcaggacgtgtacatgctcaatgtgaaaggcctggcccgaggtgtctttcagagagtcactggctctgccatcactgacctgtacagccccaaacggctcttttctctcacaggggatgactgcttccaagttggcaaggtggcctatgacatgggggattattaccatgccattccatggctggaggaggctgtcagtctcttccgaggatcttacggagagtggaagacagaggatgaggcaagtctagaagatgccttggatcacttggcctttgcttatttccggggcaggaaatgtttcgtgtgccctcagcctctctcgggagtttcttctctacagtacgtaatggataaaagataagccagccacagcatctccttctgagatgcattgagagtcatgcaaagaggccagcaggccacgggtagctctgccaatgcatggggcatcttgcagccaaagtgggtacaaacaggcccagataataagaggatggccaggaatgtcttgaaatatgaaaggctcttggcagagagccccaaccacgtggtagctgaggctgtcatccagaggcccaatataccccacctgcagaccagagacacctacgaggggctatgtcagaccctgggttcccagcccactctctaccagatccctagcctctactgttcctatgagaccaattccaacgcctacctgctgctccagcccatccggaaggaggtcatccacctggagccctacattgctctctaccatgacttcgtcagtgactcagaggctcagaaaattagagaacttgcagaaccatggggacgtggtacatgtggctgtatgcatttgtcaaaactcaccaaatggtccacttgagacctgtgtatatcattgtatttattctcagtgtagtacaataagatattttgagagagagaggtcattttcccataattttattacagtatattattattattatattttattgttaatctctgtgcctcatttatgaattataaattataacatataattataaattaaactttgtaattcagttacaatcattattataatttc

SEQ ID NO: 460208 - DNA, 1388 bp, Homo sapiens
  misc_feature (755)..(755): n is a, c, g, or t
  misc_feature (757)..(758): n is a, c, g, or t
  misc_feature (761)..(764): n is a, c, g, or t
  misc_feature (766)..(766): n is a, c, g, or t
  misc_feature (774)..(774): n is a, c, g, or t
  misc_feature (779)..(779): n is a, c, g, or t
agttcgcgagcgctggctatgggtcctggggcgcggctggcggcgctgctggcggtgctggcgctcgggacaggagacccagaaagggctgcggctcggggcgacacgttctcggcgctgaccagcgtggcgcgcgccctggcgcccgagcgccggctgctggggctgctgaggcggtacctgcgcggggaggaggcgcggctgcgggacctgactagattctacgacaaggtactttctttgcatgaggattcaacaacccctgtggctaaccctctgcttgcatttactctcatcaaacgcctgcagtctgactggaggaatgtggtacatagtctggaggccagtgagaacatccgagctctgaaggatggctatgagaaggtggagcaagaccttccagcctttgaggaccttgagggagcagcaagggccctgatgcggctgcaggacgtgtacatgctcaatgtgaaaggcctggcccgaggtgtctttcagagagtcactggctctgccatcactgacctgtacagccccaaacggctcttttctctcacaggggatgactgcttccaagttggcaaggtggcctatgacatgggggattattaccatgccattccatggctggaggaggctgtcagtctcttccgaggatcttacggagagtggaagacagaggatgaggcaagtctagaagatgccttggatcacttggcctttgcttatttccgggggaaatgttacgtgtgacnannacnnnnanggagtttnttctntacagcccagataataagaggatggccaggaatgtcttgaaatatgaaaggctcttggcagagagccccaaccacgtggtagctgaggctgtcatccagaggcccaatataccccacctgcagaccagagacacctacgaggggctatgtcagaccctgggttcccagcccactctctaccagatccctagcctctactgttcctatgagaccaattccaacgcctacctgctgctccagcccatccggaaggaggtcatccacctggagccctacattgctctctaccatgacttcgtcagtgactcagaggctcagaaaattagagaacttgcagaaccatggggacgtggtacatgtggctgtatgcatttgtcaaaactcaccaaatggtccacttgagacctgtgtatatcattgtatttattctcagtgtagtacaataagatattttgagagagagaggtcattttcccataattttattacagtatattattattattatattttattgttaatctctgtgcctcatttatgaattataaattataacatataattataaattaaactttgtaattcagttacaatcattattataatttc

SEQ ID NO: 460209 - DNA, 1229 bp, Homo sapiens
aacagcagccaggctcaaccatctgacagaatctgctcatgctcttatgagcctaatcccttgggtcaaagaggcaccttgtcagagaactttggaagtacttagaatggaactgccaaggatacccatgggccatgtcacgcgacagcttgaaaccagcccaaatgccctcaaggagacattcccaaacctgcgagagaagagccttctgcatttccacggcaagcaagagaagggaaaaccacaacagcagtcccctcgtagagatgcaattcatcatgggcaggacggctggagcccacaataccccacaatggagcagggagcaccagccggaactcacccctgctgccattcctcctcctaccagcaagcctctagcgacatctctgaacatggtctctccctgctcacactcagctatgcagagcgggaaaaggtacaaccttcagaacgttctgcttagctactacgctctaacccggtggataaaggataaccagcatcccctgtcaggacacagggagctgtcctgcagagctggctctacatcagatctgatctgaatgcacttgttctaaaacgcttcatcaaaagattaactgcatgctcttccttcagcgtttcctgtccaaaacaagcactggggattctgaggaacctctgaggagcaccctgcctttacttgcagttcttccagagagatgttggagctgacaactggagacaatatggcttggtgacaacatcataaaagttctctgcctcctcccttatggagccttggctttccacagacgatggaatgtttgtctgatgctgggcaaagaagattaatgacaaggtacgcaccatgggaaagcacaatgagaaggcagccatctgtaaagaagagtgcccatactgggatctgatcctgctgactccctaatcgtggacttccggtctccagaactattgtttaagccacccagtctctaatattgtgttatgaaagctcaagtagacaaatgcaaagagcccagatatcatcctctagccttccttcccaaactcacctgtcttagattctattccattagttccagtgtaacaaactgattcatactgatctaataatcaggaacaaatttcatcatcccctcagagacatggtgggaaatgaggctttttatgcccagccaataaaacaacctagcagccacttacttgtccctccatttctttgc

SEQ ID NO: 460210 - DNA, 476 bp, Homo sapiens
gttaaatgaggtcgtaagggtggggtcctgaccccataggattaatgtctttataagaagagacaccagagatggttgtctctctccccaggtacgcaccatgggaaagcacaatgagaaggcagccatctgtaaagaagagtgcccatactgggatctgatcctgctgactccctaatcgtggacttccggtctccagaactattgtttaagccacccagtctctaatattgtgttatgaaagctcaagtagacaaatgcaaagagcccagatatcatcctctagccttccttcccaaactcacctgtcttagattctattccattagttccagtgtaacaaactgattcatactgatctaataatcaggaacaaatttcatcatcccctcagagacatggtgggaaatgaggctttttatgcccagccaataaaacaacctagcagccacttacttgtccctccatttctttgc

SEQ ID NO: 460211 - DNA, 2951 bp, Homo sapiens
  misc_feature (3)..(3): n is a, c, g, or t
  misc_feature (6)..(6): n is a, c, g, or t
  misc_feature (9)..(9): n is a, c, g, or t
acnggnaanaccgagaccaccaaggacctggcgaaagccttgggcttgctctgtgttgtcaccaactgtggcgaaggcatggattacagggccgtggggaagattttctctggcctggcacagtgcggggcttggggctgctttgatgagtttaatcgaatcgatgcttctgtgctctccgtgatctcctcccagatccagacgatccgaaatgctctgatccatcagttaaccacgttccagtttgaagggcaggagatttccctggactcccgcatgggcatcttcatcaccatgaaccccggctacgcaggccgcacggagctgcccgagtcggtgaaggcgctgttcaggcctgtggtcgtgatcgtgcccgacctgcagcagatctgtgagatcatgctcttctctgagggcttcctggaggccaaggtggggggccttggcagcgccaggtcgtgcagtgcagacttcacccgggtctgcttccagactggggacctaggacgcactctggcgaaaaagatgacggttctgtataagctggcccgggagcagctgtccaagcagtatcactatgattttggactcagagccctgaaatcggtgctggtcatggctgtgactgtactcaatgttgcacgcacacacgcacgcacacacacgcacacgcacggacacacgcacgcgcacacacacacggatacatgcacgcgcacacacgacgtggtgctgatgagggccttgcgagacatgaacttgcccaaatttgtgtttgaagatgttcctcttttccttggtttgatttcggatctgtttcctgggctggactgccctcgcgtccgctaccctgacttcaacgatgcggtagagcaggtcctggaggagaacggctacgcggtcctacccatccaggtggataaagtggttcaaatgttcgagaccatgttaacccgccacacgacgatggtggtggggcccaccagagggggcaagtccgtcgtcattaacactctgtgtcaggcccagaccaagcttgggctgacgacaaagttgtacatcctgaaccccaaagccgtgagtgtcatagaactctacggcatcctggacccaaccacccgagactggacagatggggtgttgtcaaacatcttcagggaaatcaacaagccaacagacaagaaggagcgaaagtgagtatctttgtagtgatgcaatgtggtaggtaccgggattgttcccagcttaccacagaggaaactgaggcctagaaaaggtcagaaatgtggcccaaggccagggatttggccctgatctgtgtgactctaagttctcaaacacagccgccatcaagctgcctgatcaccacgttctatggcaaggtatattttatttgatggtgatgtggatgctctatgggtggaaaacatgaattctgtgatggatgacaacaggttgttgacattggccaacggggaacgcatccggctccaagcacactgtgccctgctctttgaggcaagtagtgattaaaagtaaatttgaacataaatctttcttgtaattaaaaatgcaaatgtttgttaaagtagtagtaaatgtagatgattatttaaaaacaaacaatgcataagggtttataatgaatacaactctttgttctttactcctctcatccctctttatcccagaagtgactacttttactttttatgaattgtttcttctgatgattaccctagtgtctataagtaacaggcttagcatgatattcttcctttatacattttatagtttatacattatctgttgactgactgctacaaaagtgagaattcatctcttataccactaacgtcagaatagtatattgctaagttggttaacagtagataatgtttacattataatgaagatagaaataatttactgaagaaccaactaatatactacgattacatttactttcttttagagccatttcctttgtctagagtttgtaattgccttcctttttttccctcacactatttgcctttattttaatctcatttttttttttaaactttctatcatatcaagtattctgtcgagcccctttatttcctggaggctattctccaaagccctctatctcttaggatatggactgctcgtttcataggtgtggccctgggacttgctttcactctagcttagtattaatgccatttctaactgtaaaatttgtcagtgcatgaaatatttgtacatattattatctgattagctgactgaactatattttttttgtagagagagctaggtttgttaatatatctggtttagctttgtacttatgaagttttatactgcctgatctcaactatgttaaaaaaataataaagaaaaaagattgactggaaaacactccaaaacaacatttgtttctgggtggtgggatttggataacttattttcttctttatatttttctattttttgtcagatattctacaacgtattaattttcacattaattttataatagaaaaaccaaaaagatgttacatcagaagtgtgtaatcttctcatcaaaatcccaggtgttcagttaaaaagctcatggaagctgtgttgattttggtattatttggatttcatgcagttgtaaaaactttccataagagaaggtccttaaacatctagtttatcttgtgtatagctatagccatgattgattttctttatttatccaggttggagatttacagtatgcctcccctgcaactgtctctcgatgtggaatggtttatgtggatcctaaaaacttgaaatatcgaccatactggaaaaaatgggttaatcaaataccaaacaaggtgaaatttttttctaaaatgaacttaaatttattagtattgatggctagttggataacatagtccagagggatgtttgtagttgaaggc

SEQ ID NO: 460212 - DNA, 2947 bp, Homo sapiens
aactggaaaaccaagactggtagactctctttttcttcagacaataggcaggagccaggcagagtccagggattcttggaacacctatcttttcttcggaggacactaagttctatttgaagacaaagttcaatatggcaacaggactgatgggacacgaaggagtcgctaccgtgatttggtgacagttcttcaaaacgacagtgtctcaaggaaaggtggacctaggaactcctgaacttttgggttgccttaagtgagaaatcagcatggctcaggcaagtctcctggcttgtgaaggcctagcaggtgtgagtttggttcccactgcagccagcaagaagatgatgctgagccagattgccagcaagcaggccgagaatggcgagcgggcaggtagccctgatgtgctgaggtggtttactctcatttatgaattttgtctgagagctgcattgggtctcatctcatgttccgagatgggctatgagtttagatttgatttgtcttcaaagggtcaccgaaaagacagtgataagtcccggagccgcaaagatgatgacagcttgtctgaggcctctcattcaaaaaagactgttaaaaaggcagacagcatcagagaggttcctttctccaacagctggaagtggacccagagtagaacagtgtctccaggaagagggcagtggtggcctcatgacatgcctgattattgcccccaggtggtggtagtggaacaaaatggttcttttcaagtaaagattcccaaaaattttgtttgtgaacactgctttggagcctttcggagcagttaccacctaaagaggcacatccttattcacactggtgagaagccatttgaatgcgatatatgtgatatgcgtttcatccagaagtaccacctggaacgccacaagcgtgtgcacagtggtgaaaagccttaccagtgtgaacggtgtcatcagtgtttttctcggacagatcgattactcagacacaaacggatgtgccaagggtgccagtccaagacttccgacgggcagttttctctataggcgcaaggggccccgggtggtgggagtgatcagaagaacctgccgaagagcacaccccctctggtctgatggtcccaccaccgccccatgtgaacctgtcccactcctggaggagtggacccaggagaccagaagagtgcatcaggggacagtggccccagaacctcagctctgtaaataatctgagactatgagtatctcggggaagttcttacagcattcctgggtaggggagctagtccctggacccttggctgaggtcataggtggggactcaaggtacaggaccaagactgaagtgtggctcccacaaccttggactccagctggcagctgaaatggaaaagattggggaaggggatttgtttgttctgttcttgtttttgtttatccaaaagcaacttcagcgggtaaactgtggatacaggtaatccagaggcataagagtcctggtccaaagtagggactatagctggtccagctctccccaaaaattgggtttttagttgcagtagctcctcagtgtttcacaatcctgcacttcgcctcctttttgaggaagaataaggtcaggaatggcagctgagcttactttggcttccttatacactgtagggacaaaaggaaaaacggggtggagcagacaagggctggatccaaaaagtggatggcacctcttccttcctcaagggaaaaggaagagttgtgccagtgggtgttgtcatggcccatgtcacattggcacctgatggcatcagctcaaatgcctttaggaggaaacttgggtgagagtggcccatgaagcccttttcttctttttttggggagtcggtcttggagatggtatgtggctacctcgctgccattgactcctaaagtgagacagatgtgttgagcaaggagtcatggaagtcaaagtgggttctctctccttgtgccctcttaggaacaacccaagactggtcccaagttggctaacagctgctcaagaaacaaaggaatctggggtcttctgacatgcctgttgagcagtaggagctgttctccctccccaagtcctatcactgtattcaggtagaggaggtagggaggggtctgtcctttggtcccaaaaaacaagatctcggcttgcttcctgatggccatccctacccaacagagtgtgggggatgggggtgggggtgctgcagagaaaagactaaagaagaaacctaatgtaggttccattcttaaccatattctttgctcctctctgctccaataccaccaccttgtccactcccaaaaaagtaatcgggtgtgtgtgtgtgtgtgagagagagtgtgtgtgagatatgaatgcatgtatttgtatgcttgcaggagatggcatattattgagccaaacccttctctggccctcaccttcagggaggatgagtggaaaatagcctcctcttgcccaaacatgaagggtgcttgaggtctcagcaggagctgaagaacacaatttggggaacagaagggcttttgttttggagggtttttttttttaagatgaattcaacagcctggtggttaggatgtttctaacccaagccagggcttgtgaacatgaattttctaaggtgaaataaaccttttctttctgctaaagaaagaatccttatgggaagttttggggtttggttgacccccactgtaacctgacctgacctgtggcgggtacgggaactgtcttagtaatcatggagactggctgaacctgagtgccaagctgtcagtagggtctgagatgggaaactcctgaaagtatgatttcatttcccagaaaatgtaaagaatggataccagcaatgattcctggctgttacctattctggaggggtggggttggggagggggttgtccat

SEQ ID NO: 460213 - DNA, 1647 bp, Homo sapiens
atcctcacttcagtactaatggagcagctttaatctagaagatggccagcctcctgacagagggcaaagatgatgagacaaagcacatcctgtcttgtaaagctttcaagttcaagtgaaacacatcacttatgcacacatttcattggccaaaatatgtcacatggttacacctaagttcaacagggttggatggcatcattcttccatggaggaggggaagtagggtgacggggatggcatacattggtgaacagtgatacgctcttccactgaccctataagctgttgtagggatcactgaggatggtgcctggcatgtcattcttactaaatattattacactcaaataataacatacacctgtcccctcctccccagtcacttggcctccatcaccatccagtgtcctatctgaagaagatttttcttcctgtaacaagaaagatgagaagggtaaaaacacagtccttttgctgagtcagatgtgttcctacagctgcggcagtaaaatgggactcttcccagatcttccttttgttgttgtctagttttagtcttcttcttttcattgtttttaaaataatgaagtgcaatggtgcaatctcggttcacgcacattgtgatcacaaatcagaactgacaaacgggcttagaaatccttctacaaattttccaaaacagcccagcccagcgactgagcagcagcttcctaatctccagatattagagatgacggatggtagcagagggctggatttcatccatggcttctgcagggctgacagctatgcttggctctctgcttggtgtcagatgctggtgaaattcagggtagtggaggctcttagtggcctccctggattgcaaaagggactggttctcttttgggggtttgtccttagccctgaaaatggttccaggctccgctgggatgcctgagtttcctagacctcagggagtaagtgaactgtcagggctgtatgtttgaatttacaagtcttaagtctttgggaactaggtcaactagaccttgcatatgcttacaccctggatgaataaagtctttatttacacctccacctctctccaaaaaaagaatttgagacagcatacaacaaagagcatctttcaataataattaaaaagattagtgtgacagaaatggtaagttaggtccagtgaaaataggaggatcatacctgtcttattcactcatgaactcccagtgccttaagcagtgccaggcagttagaacatgcctcaaaattatgtgttggatgaacaaataaataaatatacaatgaatatttggcagtcacccaatgccaagaagccagccctggtcagaaccctcatgtacagttgtagatgttgtacactgcacagctgcaggtgctgtcagttatgtggttttccccctccccaaaatgtacactgcacaccctccccagctaaatgcagcaaccctggacataacgtctctcagaggaaggaactaggaagccctaactctcaagaagtcttagcattgaaagtcctatgtcctgtgaactcctcaatgcccagcaaactgaaggttggtcaccttagggctatgattttatgagcgctgtcatccatgctgttaaggatagcagctcacc

SEQ ID NO: 460214 - DNA, 668 bp, Homo sapiens
catctcacaacagctttctgggtttcctctgggacatcacccttctgtccttcaatatgtgtagattgattgaggatgactttatctttggctccaaagaaagtcttatgacccaaaacaggataatcagagcacttaatttccttgtccacacctactggttcagaggaggaattttcagtgctattgccttactgaaccctactgaacttactattaagaaaaaatttggccttggtaatggacagatgaaaatcaggggtcaaaaactcaaagcccacaggagccagacagagaaacaccagatagttccacctaatataatgaaatcagcaggactcaaggctcttcacagtctcctcatttgctctgctaacaaaggttttgctgttgttcaggaagcactcatattcccccagaatgtgttgagttctttgctgggcacgagggatgcgaagagaaaaagcctgtgaagacacagaagacagtcatctgcaaaccaaagaaagaggcctcaggagaaaccaaacctgccaacaccttgatcttggactttcagcatccaggactctgagaaaataaatttctgttgtttaagtcacccatctgtggtattttgttacagcagcctgtattagttcattctcacactgctataaaggactgcc

SEQ ID NO: 460215 - DNA, 1009 bp, Homo sapiens
tttataaaatattaaaaaaaccactgagagaaggatcttctgttttattgactgtctgtatctttggtcccatgtgttgactgctttctgcaatgattcaaaactttttattttgggaattctaccctagcctggtccttgtcccactgtgtcatgtccctgttgattgcagtagtgggaagtctgtgctctggggctaaattagatctaagcccactctgtcaacctgagatctggaaagctgaccactcgagacaactagagatcccttctcctctcttctttaatgtttttgctgttgaagtttcagcacctgagaagggttttagcacagagaggattaagaactggataatcctggatttgaaagtagaatggtcctcaggcaaatcctgtggaggagaaagggcaaagtcatcccagtgtctcgtttttgagggaacttgtggctgccatgtggacagtaccaggggatatgtctcagcagccggccgggaactcttggctgcagacagttgcacagctcgttatcttgatgccaaaacaagaaccaaggacccttttccactaggagaactctcggcaagcaggacttgagacgagcggagtccagctcccctggaggtccagtaacaatatgaaaaattgcagatgcagccacccactcataagtagctggaagaagccgcagggttcgaataatcttttcggaaaactgtggatgcaccacgtagcctctggaaactccaccgtacactcgtgagagaatgagagccagaaagacaattcctttagtattaatataaaaatagatttgtaaaatattacctattttttaatattatcattatattatatatttttgtatgttatcaagggttgaatctgtcccatgagatgtgtgtgacccgtatccttagcgggctttcttgagggcttctctgccttagaggagggaattgagggtgcccagaggcagaggccctgtatggagccagctcatgaaatc

SEQ ID NO: 460216 - DNA, 993 bp, Homo sapiens
gcagtgggaacttctaggagagaatggaaattcagcgacagcagagggactgtaccgttgctttagactgcaaagcattcacaaaatcaaggagaaataacatacaatatgcagttttcactctgggtgctctgcactggaaaatgcaacagattctctttcttatttttgagaaggacaagagagctgcttgtctagaatcactgttccctttgtcaataaataaaaggcccttgtatttgcaaggatttcacatgatgttaccaaaaaaaaagaaagaaaaggcgtgtaaagttttccatagcaagtgtgctcaccaaatttggctgtaccgcttaattacagaggacccagagggaaaacccagagttctggagaatgtggtttcaggatgtgcagctgctggcagaagggtgaaagctaaagcaaccgcagacggagtttcactcttgttgcccaggctggtgtgcaatggcgtgctctcaactcactgcaacctccacttctccggttcaagtgattctcctgcctcaacctgctgaatagctggtattacagcgacacgccaccgcgcccagctaatttttgttatttttagtagagatggggtttcaccatattggcctggctggtcttcgaactcctggcctcctgtgatccgcccacctcagcctcccaaagtattgggattacaggtgtgagccactgctcccagtcttttttttttgtttaatgaactagaatggaagggaaaagaaaagagcattgcaagatggagtgaggaaacccagcaaggcctgtctgtctagattcttcttggcctctctgagcagcatttcttccttctgcgtatgggacaggaccctttctggaatgggggtcttatgacctacaatcaaacaagtatctaacatccaattaaaagagaagtcatggctcaatcctcaagaaagaaacatgattatatggagtctttgccttatgtggacacag

SEQ ID NO: 460217 - DNA, 985 bp, Homo sapiens
gcagtgggaacttctaggagagaatggaaattcagcgacagcagagggactgtaccgttgctttagactgcaaagcattcacaaaatcaaggagaaataacatacaatatgcagttttcactctgggtgctctgcactggaaaatgcaacagattctctttcttatttttgagaaggacaagagagctgcttgtctagaatcactgttccctttgtcaataaataaaaggcccttgtatttgcaaggatttcacatgatgttaccaaaaaaaaagaaagaaaaggcgtgtaaagttttccatagcaagtgtgctcaccaaatttggctgtaccgcttaattacagaggacccagagggaaaacccagagttctggagaatgtggtttcaggatgtgcagctgctggcagaagggtgaaagctaaagcaaccgcagacggagtttcactcttgttgcccaggctggtgtgcaatggcgtgctctcaactcactgcaacctccacttctccggttcaagtgattctcctgcctcaacctgctgaatagctggtattacagcgacacgccaccgcgcccagctaatttttgttatttttagtagagatggggtttcaccatattggcctggctggtcttcgaactcctggcctcctgtgatccgcccacctcagcctcccaaagtattgggattacaggtgtgagccactgctcccagtcttttttttttgtttaatgaactagaatggaagggaaaagaaaagagcattgcaagatggagtgaggaaacccagcaaggcctgtctgtctagattcttcttggcctctctgagcagcatttcttccttctgcgtatgggacaggaccctttctggaatgggggtcttatgacctacaatcaaacaaggtaggtccgatcatttccttatgaccagtttttatacagaatgtaaaccaaaagtatatgagacaggtcccgatcaatgta

SEQ ID NO: 460218 - DNA, 5057 bp, Homo sapiens
agtgctaggaaaaaaatccttgaaggctccgacaagtcctgcagaaaagagacttgttgaattttattcagtcatagagcagattttcttgggccacagggactttgttctgaagacgtagtatgaaaggctggaatacatgtctcctgcatctgtgatttagcctagcaacattgataaagcacatactgtgtgcctgacactgggttgggcgctgaggagtccttgaggggtttagctggagaaggacaggtcccgtgctcagactcagggctgtgagcctgccaggtatggagcacaaaataaggcactgagagacgtttggattgaatagtaaatgtctcgtgttcgctcacctctctgcagaacatgacctgcgaagtggagccggagccccgctatgatgctcccctctgccgctgcaaccaccattgccgcccccacgaccacgcccggccacccagcccaccgccggagcctgagaccacagatgcctcacacccatctgtcctccggagccccttgccgaggaccaccccccgcatactccaggcctctgtggcagcctggccaagtcgcagagcacagagacggtgccagccacaccatcgggggacgccccgctatcagggggcagcagtggcctgtccctgagctctccgcaagtgcccggcagccccttctcctacccagccccgtcccctagcttgagcagtgggggcctccctcggacacctggccgggacttcagcttcacacccaccttctccgacgccagcgggcccttgctcctgcccgtctgcccactccccactggccgacgcgatgaacgctccgggccctggcctccccggtgctcctggagacgggcctgcccctccctctgccccttcccctgcccttgcccttggcattgcccgccgtcttgcgggcccaggctcgtgcgcccaccccgctgccacccctgctgcccgcccccctggcctcttgccctcccccaatgaagaggaagccgggccggccccggcgatccccaccatctatgctctccttggatgggcccttggtccgaccaccagcaggggccgcccttggaagggaactcctgctcctgccgggccagccacagacccccgtcttccccagcacccatgacccccggacggtgaccctggacttccggaacgcggggatcccagcccctccaccaccccttcccccccagccacccccacccccacctcccccacctgtagagcccaccaagctgccctttaaggagctagacaaccagtggccctccgaggccattcctccgggcccccgtgggcgcgatgaggtcactgaggaatacatggagttggccaagagccgggggccgtggcgccggccacctaagaagcgccatgaggacctggtgccacctgcgggctcgcccgaactctcgccaccccagcccctcttccggccccgctcggagtttgaggagatgaccatcctgtatgacatctggaacggtggcatcgatgaggaggacatccgcttcctgtgtgtcacctacgagcgactgctacagcaggacaatggcatggactggcttaacgacacgctctgggtctaccatccctatatcctgctggcatggggggctctgcaccttctgggatgcaggaagtccctgctcacctctctgggccccaccacccagtctgtagcagcccgcggtgcccatgaagctaagaagaagaaacgggacgatggcatccgcgagcacgtgacgggctgtgcccgcagtgagggcttctacaccatcgacaagaaggacaagctcagatacctcaacagcagccgtgccagcaccgatgagccccccgcagacacccaggacactggggatgacagagatccagagcctagggtgggaccgccgaggacacggccagctccgctgagccccgcacaccgtccactgcagggcatgagcatcccagcacagccccacgcctccacccgggcaggctcggagcggcgttcggagcagcgccgcctgctgtcctccttcactggcagctgtgacagtgacctgctcaagttcaaccagctcaagttccggaagaaaaagctcaagttctgcaagagccacattcacgactggggcttgttcgccatggagcccatcgcggctgacgagatggtcatcgagtacgtgggccagaatatccgtcaggtgatcgcagacatgcgggagaagcgttatgaggacgagggcatcgggagcagctacatgttccgggtggaccatgacaccatcatcgacgccaccaagtgcggcaacttcgcgcgcttcatcaaccacagctgcaaccccaactgctatgccaaggtgatcacggtggagtcacagaagaagatagtcatctactcgaagcagcacattaacgtcaatgaggagattacctatgactataagttccccatcgaggacgtcaagatcccctgcctctgtggctccgagaactgccgggggaccctcaactaggccccggcaccagactcaaaggatgtcagccgtagccctgggactcccgagcgtggagcccctggccccggggccggcccccgcgcccgcccccatttcaggtgctgtcctctacccagcggccattcagggcctggcgcccacactaccccctggagcccctggctcggcccctccgcgggaaagggcttctctgtcgttcagcccacgtctctctcattttaacaaacgcccctttcaggatttctgtttaactccagcatcagcttctctctctccgtctctcctcccctctctctcttctctgtctcttctctctcccaccatcaccctcggcctcttcctgtgaatgctgctacgttgttttgtcttctctatttttttcctcgttgtgagaaaagacatttaaccgttgaaatgtgaaggtggaatcagagaggggccccgcgggggtctgcagaggcctcagtgtggctgtgcgtggcccgtgtcctggaagccacccggacctggacgcagggccaggtgctgtgggaaggatggaggcccccacggccttgacctcagaacactacgccctgaaagcgcccctcactgcccgtgggcacagtgaggagaccccacacctttccccacccgagctgcagcctgttccttccccagaggcctggggcaccactgacccggtggaccctgatggagctaagctgtcccaggcaggggtctccgctctgggctttccctgccacctcacaccccagcaccccctaaaccttgggttcaatgtttactttctcattcggatgccagcaacgcgggagcctctcggaggccccagtgcaggtgaggggcgctgagaacgcgggcagccactctcttctgcccttgccttcgccctgggtgggacagggctcccaagggcaggcgggtcccccagtcccgccattacgggttgtcagaccgtctgcgtgtggcattttttggcttataagcttcacccactcacccccaacccacaccccacatccccctgccggcagcccctcaacctaagaaggccagagcatatttattttcggagggagcagattacttctcccagagaaaggaaaatcttggaaaagatttaaaaacacaaatctaagccttgacggtttttttttcccttttgacccccttcccatctcttcagaatttattcccatggcttttttttttcttgtgcgtgtataaaatcaaaaggaaggggaaaaaggtttttgaagttcagaaccaacttctgtatatagaggctgccgcaaaggactttctcttgggaacattgtttcttgtagaaacatgcgggaagacattttttgctcatttctttgtacttccaaaaaaaaaggaaaaaaaagacaaaagcaagtccccccgtaccccagaaagcagaggaggcgtgtaaataatttctggaaagtgactgttgtgacccggagtcctcatcaagatgagcgcgctccatgagggagctgctcccaccctgcggacgcaggcggccggagcctctggtatctcagcttgtgtcaagcttgttatcatgtaaattctgtacaaagaattgttatttttctcttttttgttgttggtggttttgttgtgtgttttttgttgttttttttttattcctttcccccaggccctctctatttgagactgtgcccgccggtttcaagatcaaggaaattggtggcaacaagacacagatggggtacctgggcacagcggcgaacttctcttccgtttgcggttttctgcctaattgtgcaactgaggaaataatttatttttcacatgaggaaatgcgtagcttgtagagacggctgattcaagttacatgtacagcctccaaagggctgtctccattctgtccccttcccataaaagaagtgggggtgttcgagaagaccagggaagggacccttgcctcacccctccccctggcctcaccttgctcccagccatcgtgcccagtgttaacctcggctggccttcactaaggggactagacctccctctccccaggagccccagccccagagtggtttgcaataatcaagatatgtgtcgagtcatttttctttcaactccctcatttttcattgaacaaatctctgcttttcaagagttgggggtttctgctattttttgctttctctccctccccctgcaaagatgagaaccaatgagttttagggatgtttgtgcgggtagactccatcatccatatgtaacttgttttgaagagaagtgtttccgttgtgtgtcttgatgtaaatatttgttcatatttttgtgaattcaatactatgtaccattgtattatagtaacttttataaagcaaaccataaatatactgacttttcttacagatacgccgtctctcttgctctcctctctccctctcctctttattctttctttctgttgggagcacatcctgcttctgtggagggtggagtggtccactcagacact

SEQ ID NO: 460219 - DNA, 1263 bp, Homo sapiens
ataccccccacagcaatgtcgtcttcatggcattgatggtccggctgcagtcatgaagccagatgctcaagatttggaaaccaaagttcatgttctttcagtcagctcccctgttctgggagaaaatgctgaagagagtgttgatggggaaaacaccttggatactgcttccaagccagatcttcagaagattttccaaaaacaatagtatctcagatagtctgaactttgatgaggagactgatggcgaggaagaagaaggaaagaaaataagatcccaggctacatattcagaaaaagaaagacccaattccacatccagcctgcactcgaccacagatgcaaatgcttccggttcctatgctgctgcccaaccggccggtaacgagctgggggaagtggaggaactggaggactttgcttccgttttcgattttgcagcccaaccgctgcataaccggctgcgagaagtggagggcctggaggacttttaagcatagtcctgccccttgaagtgtcacagtaagatgtcatataatcagggataaaaaaaggaatggattggggcccctgctccacttactgtatatacttggaaaaagaagaaaatcagaagacatttcttcttacagctagaaagcgggaaaagagcaaatcatccaactgccttatctccactgatccaactgatttatctcgtgaaggagaaagctcaagaaggaaggagaatttgaggaaggctgaactcagagaagagaggtgataaaatagagagaaaggtctctggagagatcagctacaccgtagccagctgggacctgtggaggacgaagatcattatgatattccctgcagcaggaagcagcaaatgaactgtcaggccagtgaggtctgacacccaattataagttgtcaaatatatacacagcgtctttccatcatacctacatttgttaacgttatttttatttaccttctgttttgtgtccagcactgatattgtgctaaatccttcagacaaagtttggtgctttcatgacctgactatgtgtttgcagtaagtgtttggagaaatgagggagatgagagaagaagtgctgtgtatgttcacattttggggcacagcagtccccagatcagctggggaagcaaggtgagctagtgacaagttggccagaaagtatagatgagcagcaagaaacaggagtggagagagacagggtgaaccggggggtgggagagagagctggaagtcttaagatt

SEQ ID NO: 460220 - DNA, 1451 bp, Homo sapiens
tcggagtttctagcagtgtgcttttggagtcattagtagtgagtgtgcgactgggatggtagagtatttccactgggacagttcagtggcaccggctcactccaggagactgagatggctgaaaatgaagaacaggtgtatcttgcaaatctccccacatataaacattctacgtggacttcacctacaaaacgcaagctcagaaataaaattggtatcacaacagttctctgggaagccaagtcagctaccaataatcacagcagtaaaaatctgaagatgagggctgacgaaggcttttctgaaacttgttgccgatgctcggctgggcttgaagaggtgaagacagttgctgagcgtaaagcagttaaattacaccataaaattcaggtgaggaaacagacgcacacagaggtgaagcagcttccccaaaggcgcatggctaagagtggttatttgtctccttgtcacgctgttttgagggaaggattcctacactaggattatgaagatcgccaaacagatgacgctggatcccagaaaagtggggcagaatgcagtttagttgtcacatatgctcacagcctagggaagaagacagcggacagcccacagggccacgcgatggttcaagaacagagtgaacagccagggcctgtgaaagggaggaatctcccagtgtttgtgccatgttttgatctgactgaaagccataaacatagccgaagcctgggccatccacagaagacccaatgttctctttttccaagtgggcattttgtatctctgaagagttctagactgagctacatcagtagacctctgcatttaaagggagcaattctcatccgaggatcctgattcttctactgtagtgcaatttcaccactctctccaaatgtctccaagcaaattcaaagcagctgaaaataactgcatgcctgagagtgagagaaatttcttaagtgatcgaccaaatctgggtctgattagtgggtggatgcctcattggagaggctgatttgagagtcggggtacaaataataatggctaataatggcaaacaattagtaattgctaggtgccaggagttgtgctaaatgctttacatgagtagataggatattgcagatctcaacagttaagaaatttgcttgtgatcatgtagtttggagagtatcagagtctgaaatgaagacaacttgagggtcaataaacaggaagaaaaagtactctacaagacagtttatctgataacggtatgatggaagatggcatcaggcggaggtaaatgggacgagggactggaagaaaaccactgaatcaaagactcttggagttgaaagtttccttagcaactatctagattcattaacttcttcacagttgagagatttctgcattatttttcttccataaataaccaatctctgcttaattttttaccagac

SEQ ID NO: 460221 - DNA, 984 bp, Homo sapiens
tatatttaattcgtacccaaataggatgataaaaaaaaccaccaacaaccagggaggaatctcccagtgtttgtgccatgttttgatctgactgaaagccataaacatagccgaagcctgggccatccacagaagacccaatgttctctttttccaagtgggcattttgtatctctgaagagttctagactgagctacatcagtagacctctgcatttaaagggagcaattctcatccgaggatcctgattcttctactgtagtgcaatttcaccactctctccaaatgtctccaagcaaattcaaagcagctgaaaataactgcatgcctgagaggaccacgaagcttcaggccagccctgtcccgaagtcttctgtgcttcatgtcgagtggtctgcagtggactgtgtctgcttgaagcgatgctccggagggcttattgttgtgtggggtaaagcatgagatcactgaaaaatgagagaaatcgagcatacgaaatgtgaagcatatctgttgacaccatgcgctccctttgcttgcactggatggcgcatggtttccgtgcgcagtgcctgaggtgtggggcaggcgaggcccatgcagcctggctcctttccagaaggttgctgttcattacagctcgagtgtgctgggttctgcagatattatctattttaaattaacgctccgtaaaaggaatttaaagttttctgaaaagaaaccaatgaatgaagctaatagtaataatgcaaacacaagcaagctgccaagtaagccatttttctattacggagcccttcatcagtcatattattaaagaaaaaacaacaatactagtaataatgatcacctattcaagaccaagaggttgatcctccaaaattcaaacaaggaaaaatctctcccaatctctcctttcctccatcccttttctttacttctcatcccatatataatattatataatgcatacgtaataaaag

SEQ ID NO: 460222 - DNA, 1596 bp, Homo sapiens
tcggagtttctagcagtgtgcttttggagtcattagtagtgagtgtgcgactgggatggtagagtatttccactgggacagttcagtggcaccggctcactccaggagactgagatggctgaaaatgaagaacaggtgtatcttgcaaatctccccacatataaacattctacgtggacttcacctacaaaacgcaagctcagaaataaaattggtatcacaacagttctctgggaagccaagtcagctaccaataatcacagcagtaaaaatctgaagatgagggctgacgaaggcttttctgaaacttgttgccgatgctcggctgggcttgaagaggtgaagacagttgctgagcgtaaagcagttaaattacaccataaaattcaggtgaggaaacagacgcacacagaggtgaagcagcttccccaaaggcgcatggctaagagtggttatttgtctccttgtcacgctgttttgagggaaggattcctacactaggattatgaagatcgccaaacagatgacgctggatcccagaaaagtggggcagaatgcagtttagttgtcacatatgctcacagcctagggaagaagacagcggacagcccacagggccacgcgatggttcaagaacagagtgaacagccagggcctgtgaaagggaggaatctcccagtgtttgtgccatgttttgatctgactgaaagccataaacatagccgaagcctgggccatccacagaagacccaatgttctctttttccaagtgggcattttgtatctctgaagagttctagactgagctacatcagtagacctctgcatttaaagggagcaattctcatccgaggatcctgattcttctactgtagtgcaatttcaccactctctccaaatgtctccaagcaaattcaaagcagctgaaaataactgcatgcctgagaggaccacgaagcttcaggccagccctgtcccgaagtcttctgtgcttcatgtcgagtggtctgcagtggactgtgtctgcttgaagcgatgctccggagggcttattgttgtgtggggtaaagcatgagatcactgaaaaatgagagaaatcgagcatacgaaatgtgaagcatatctgttgacaccatgcgctccctttgcttgcactggatggcgcatggtttccgtgcgcagtgcctgaggtgtggggcaggcgaggcccatgcagcctggctcctttccagaaggttgctgttcattacagctcgagtgtgctgggttctgcagatattatctattttaaattaacgctccgtaaaaggaatttaaagttttctgaaaagaaaccaatgaatgaagctaatagtaataatgcaaacacaagcaagctgccaagtaagccatttttctattacggagcccttcatcagtcatattattaaagaaaaaacaacaatactagtaataatgatcacctattcaagaccaagaggttgatcctccaaaattcaaacaaggaaaaatctctcccaatctctcctttcctccatcccttttctttacttctcatcccatatataatattatataatgcatacgtaataaaag

SEQ ID NO: 460223 - DNA, 1225 bp, Homo sapiens
gttttaatcaccatgacatttgcagtcatttattacaacagcagcaggaaacaaacagtgctcatgatgtccacatgtcatgagtggagggaccccgatcactggattagggcccaccgctcatctttacgaatcacatctggaaagaccctctttccaaacaaggtccattctgtgtttcctgagactcacgggttccttaggggtaaagaaactagtagtgatgatggtagtgatgatggtgatgatgatggtgatgatggtgagcatgatggtgatgatggtgaagatggtgatgatgatggtgatggtgatgtgatgatggtggtgatgatggtgatggtggtgatggtgacggtggtgatgatgatggtgatggtgattgatgatggtgatggtggtgatgatggtgatgatggtgatggtggtgatgatgatggtgatggtgatgatggtaataatgatggtggtagtgatggtgatgatgaccagatcaaagactggctgaaaaacaggaaggaggtgaaagcagcccttcataagacacgcccaccagtgcaatgtcagtttaccattgccatgggaacacccataagacacgcctaccagtgttatgtcagtttaccattgccatggcaacacccagaagttactgccccttttgcaagacaacgacccagaagttcccaccctttttctagaaatttctgaataagctcacccttgtctgggatggaattaaaagtagatataaatatggctgcagaactgccctgggctgctgctctcaggcactgcctgtgggccctgctctgctgtggtgtggtggtcacggggctgctaccctgcacctccataaagctgcttcctcctaccaccagctcgctcctaagcacagccaaaatccttcccgggctaagcccagtgtggggttcgcctgccctgcttcagacggattgaagatcagatcagatacagcggaagaaagaactactggactggaagttaccaacatgactcaccagacggagatgggaagagatgcctgcagcccccggcgagcgtttcctccacgcagtgagcctcaggagcacaggtcatcacggagtgcattgaagctgagttctcttctacctttatttccaatacaattgctttaaatgtacatttatgtaatttaatttttaataattctgtgtttacaactggctcacaaaattcctgg

SEQ ID NO: 460224 - DNA, 5144 bp, Homo sapiens
ggcggcgggagagctgctggctcgcccggatcccgggagctgcctggaggcgggcccggcccggggaaggtgagcggctgcgggacccagcccctcgccgggagcgggcaccatggtgctgtcggtgcctgtgatcgcgctgggcgccacgctgggcacagccaccagcatcctcgcgttgtgcggggtcacctgcctgtgtcggcacatgcaccccaagaaggggctgctgccgcgggaccaggaccccgacctggagaaggcgaagcccagcttgctcgggtctgcacaacagttcaatgttaaaaagtccacggaacctgttcagccccgtgccctcctcaagttcccagacatctatggacccaggccagctgtgacggctccagaggtcatcaactatgcagactattcactgaggtctacggaggagcccactgcacctgccagcccccaacccccgaatgacagtcgcctcaagaggcaggtcacagaggagctgttcatcctccctcagaatggtgtggtggaggatgtctgtgtcatggagacctggaacccagagaaggctgccagttggaaccaggcccccaaactccactactgcctggactatgactgtcagaaggcagaattgtttgtgactcgcctggaagctgtgaccagcaaccacgacggaggctgtgactgctacgtccaagggagtgtggccaataggaccggctctgtggaggctcagacagccctaaagaagcggcagctgcacaccacctgggaggagggcctggtgctccccctggcggaggaggagctccccacagccaccctgacgctgaccttgaggacctgcgaccgcttctcccgtcacagcgtggccggggagctccgcctgggcctggacgggacatctgtgcctctaggggctgcccagtggggcgagctgaagacttcagcgaaggagccatctgcaggagctggagaggtcctactatccatcagctacctcccggctgccaaccgcctcctggtggtgctgattaaagccaagaacctccactctaaccagtccaaggagctcctggggaaggatgtctctgtcaaggtgaccttgaagcaccaggctcggaagctgaagaagaagcagactaaacgagctaagcacaagatcaaccccgtgtggaacgagatgatcatgtttgagctgcctgacgacctgctgcaggcctccagtgtggagctggaagtgctgggccaggacgattcagggcagagctgtgcgcttggccactgcagcctgggcctgcacacctcgggctctgagcgcagccactgggaggagatgctcaaaaaccctcgccggcagattgccatgtggcaccagctgcacctgtaaccagctgcccagctgcctcccttcttggacagccctgacccgtcctctgcaacctcctttctgtgcccctttcctcattctgacacccagaagacagtgacagatgtgtttgcaaggctgggatggctctctcatcatactcttgtttcttagaaataagcaagacagagcaggaaatggaatatgcgggtcacactgaggaatgcattttgctcatctgtgttattgaaggaggtgcttattaaatacagttcctatgcctgttttataggtggggttaggccagatgcagagaaagctaaatgtgggaatcatggatgcaaagaagaatttggctttttgaaaaacaagcatttcaaaaatgatgaaggaagtgaaagtatcctggatcaactcctagagttagagattgcccaggtggaaagaaaccttagccagcgttcaatcaagctcaccatgcagggcagtcacccggcagttctcaaactttagcatgtgaagagtcaccagcagattcctgggctcgcctggagacattcctagtcggtattcctggtcgaagcccaggagccttcctttttaacaagctgatgtagagggtggagcactgtatgtggagaaattccttctacaatattccacacaggtttttggccacagtccttgatggagtcccaaaaccatggtgcagccagttccaatgctggacacctcaaccatcagggtgaaatctggggcctcagctttttaatttaattattttaattcttaatactttaatttgtgcatttcataagccccctgctcttggactgaattttgtgctttttattgaagaattttattgtttttatcttaaaatcagtttctattatccttggggagaccatccctaacaaagtacaggtgggatctcctgtgagtcattggctgggttctgattgctagatgtcacacccaccagcatcaccaaagtgactctgagatagaccggtcccttctcagcgttccagtcacttcaggaggaatttagttattgacttagtctatgacatctggctacatgtaggtagagaagaaagacaattttaaaaaggaaatcaggtcttttgcaactgtgcctccctctgtctgttttcacttgaatgggtaaataaccagcagctaggttttgaattcctaccttgttattctaaacagatgtccacattgttaattaaatctaaattatgagccttgctgagtggatacggtacttacacctgaaccaggattcctgggttctgttgttgacattgcccttcagcacctgtttggccagctgtataagataggactaatgactaggaagcctaccccaatgaatgatatactagatgaaatagtgttcaaaacctgtaggcactctctggctaaaaacaaactctgaggccaccagcagatcatctttaagctaagttactatttttcacctttttttttagacggagttttgctctttgttgcccaggctggagtgcagtggcacgatctcggctcactgcaacctccgcctcccaagttcaagcgattctcctgtctcagcctcctgggtagctgggattacaggtgcccaccaacatgcctggctaatttttgtacttttagtagagatggggtttcaccatgttggccaggctggtcttcaactccagatctcaggtgatctaccctcctcggcctcccaaagtactgggattacaggcctgagccaccgcgcccggcctatttttcactttaatttggcagctgagaatgcccaaaaagtgccagaagcatcgtggcatttccagaaccatggattctgcctttggacccctctctattaatattaaaactctgggccttcagatgtcaccctaatccactgccctaagacagaatttctggacaagatgggtaagggcttcattccttcaacaagtcaagtcatacttggcctctccctgagaatctgagcaggagccttataacctgtggtcattattttttctttctgtacagaaatagaaaagcattagaaataacttctaaccatcctctgaaaaaacagaaaaaatatcgaatccctctttcatgagaagtcttttggataattggaaaccttcatcactgaggttggccagcccctgccaagtgttgtgtaggcaaagcacttgttagtggcttcctatgaaatgttttagagatctcttcaccatactggtttcttctctttggttggtgtgggtaaaagaaaacaaaacatttcctataagctgaaagctgaccagcattctcttcttggtaacatctactactccaacctagaaaatttggattctagaccaaaaatcaggaaacatggctccttataaatctgtgcagctgccttatagtaccatcaaaggaatttcaggtgggctgggcggggccccgatcccagaattatcaactccacccatcatcatttggtcatgaagcatcctttcattcttcttcttcttttttttggggggggcggggcgggggagggatctcaaagttttagtcttccagaatccaaattaaaggttgcccctgatgggggccaggttccgccacagaacatcttagatgtcagccttgacctcacttagcagggattacagaaatgagatacattttgaaggagagttgtctgttatgttcactgtattctaagtgcctgggataaagctgtctcatgggtgctccatatatattcatatatatttgttgagtgaattaatgaattaagagtggctggcagagtaggcagaaaaagacactgcaaatggcataaaaattaaagtcctagctgagttctcaatggtaaaggcatcagatgtcttagcagtcaagctagaaattcatgacaatgagtattactatttgcctaatgacaactcattgctctccatgtaaatgtaatcaacagatgaagagaatataattgctctgcttttccactaaaactccatcttagtgaattttaaattatccagagatgtcaaactgccaaataaaaatatttcagtagtctttgcatcagcttaccttgtaccagaaacatttccaatttactatcaaattatagtaactgagcctgtgtgaagtatctcatcattttcgaaaggaacaccttgtgtgatgccagtgagcatttctaaaaagggtgtgaggtagaggtaaaaataaggtgagagaccatttcagaatgcactgttgctcaaaaaggtgatctggttctttcttcagagatttctacggggatagaaaatcgggagtctgccctcattaatctgtgactccacctcttgcatcaaatcaatatctatttgttgagcacttattgattaagaccttgcatatgtctgtccattttgatttgagatacaactttttgtgtgggttgaatgacaaatcactccaaacaaagctgggcacagagaatcagctaggagaccagttattcagggtccatttctcttggatgtaaaggagtcctgggtaaaatgtggctgtaacctaaaccaactagtccttgtgatttgtttctgccctctgtgtttcctgttgtcaaatgctaagtgtgtgttttgcagtcatgaactaaagcacaaaaagatgcatgagacattgtagtcatatgtctggtgtgacactttggagcaaaaaccttgcagtggtaaataaaaaatttccaacaggg

SEQ ID NO: 460225 - DNA, 412 bp, Homo sapiens
tgatttggtgagcacttattgatttggtgcaagaggtggaatcacagattaatgagggcagaccttgcatatgtctgtccattttgatttgagatacaactttttgtgtgggttgaatgacaaatcactccaaacaaagctgggcacagagaatcagctaggagaccagttattcagggtccatttctcttggatgtaaaggagtcctgggtaaaatgtggctgtaacctaaaccaactagtccttgtgatttgtttctgccctctgtgtttcctgttgtcaaatgctaagtgtgtgttttgcagtcatgaactaaagcacaaaaagatgcatgagacattgtagtcatatgtctggtgtgacactttggagcaaaaaccttgcagtggtaaataaaaaatttccaacaggg

SEQ ID NO: 460226 - DNA, 4618 bp, Homo sapiens
ggcggcgggagagctgctggctcgcccggatcccgggagctgcctggaggcgggcccggcccggggaaggtgagcggctgcgggacccagcccctcgccgggagcgggcaccatggtgctgtcggtgcctgtgatcgcgctgggcgccacgctgggcacagccaccagcatcctcgcgttgtgcggggtcacctgcctgtgtcggcacatgcaccccaagaaggggctgctgccgcgggaccaggaccccgacctggagaaggcgaagcccagcttgctcgggtctgcacaacagttcaatgttaaaaagtccacggaacctgttcagccccgtgccctcctcaagttcccagacatctatggacccaggccagctgtgacggctccagaggtcatcaactatgcagactattcactgaggtctacggaggagcccactgcacctgccagcccccaacccccgaatgacagtcgcctcaagaggcaggtcacagaggagctgttcatcctccctcagaatggtgtggtggaggatgtctgtgtcatggagacctggaacccagagaaggctgccagttggaaccaggcccccaaactccactactgcctggactatgactgtcagaaggcagaattgtttgtgactcgcctggaagctgtgaccagcaaccacgacggaggctgtgactgctacgtccaagggagtgtggccaataggaccggctctgtggaggctcagacagccctaaagaagcggcagctgcacaccacctgggaggagggcctggtgctccccctggcggaggaggagctccccacagccaccctgacgctgaccttgaggacctgcgaccgcttctcccgtcacagcgtggccggggagctccgcctgggcctggacgggacatctgtgcctctaggggctgcccagtggggcgagctgaagacttcagcgaaggagccatctgcaggagctggagaggtcctactatccatcagctacctcccggctgccaaccgcctcctggtggtgctgattaaagccaagaacctccactctaaccagtccaaggagctcctggggaaggatgtctctgtcaaggtgaccttgaagcaccaggctcggaagctgaagaagaagcagactaaacgagctaagcacaagatcaaccccgtgtggaacgagatgatcatgtttgagctgcctgacgacctgctgcaggcctccagtgtggagctggaagtgctgggccaggacgattcagggcagagctgtgcgcttggccactgcagcctgggcctgcacacctcgggctctgagcgcagccactgggaggagatgctcaaaaaccctcgccggcagattgccatgtggcaccagctgcacctgtaaccagctgcccagctgcctcccttcttggacagccctgacccgtcctctgcaacctcctttctgtgcccctttcctcattctgacacccagaagacagtgacagatgtgtttgcaaggctgggatggctctctcatcatactcttgtttcttagaaataagcaagacagagcaggaaatggaatatgcgggtcacactgaggaatgcattttgctcatctgtgttattgaaggaggtgcttattaaatacagttcctatgcctgttttataggtggggttaggccagatgcagagaaagctaaatgtgggaatcatggatgcaaagaagaatttggctttttgaaaaacaagcatttcaaaaatgatgaaggaagtgaaagtatcctggatcaactcctagagttagagattgcccaggtggaaagaaaccttagccagcgttcaatcaagctcaccatgcagggcagtcacccggcagttctcaaactttagcatgtgaagagtcaccagcagattcctgggctcgcctggagacattcctagtcggtattcctggtcgaagcccaggagccttcctttttaacaagctgatgtagagggtggagcactgtatgtggagaaattccttctacaatattccacacaggtttttggccacagtccttgatggagtcccaaaaccatggtgcagccagttccaatgctggacacctcaaccatcagggtgaaatctggggcctcagctttttaatttaattattttaattcttaatactttaatttgtgcatttcataagccccctgctcttggactgaattttgtgctttttattgaagaattttattgtttttatcttaaaatcagtttctattatccttggggagaccatccctaacaaagtacaggtgggatctcctgtgagtcattggctgggttctgattgctagatgtcacacccaccagcatcaccaaagtgactctgagatagaccggtcccttctcagcgttccagtcacttcaggaggaatttagttattgacttagtctatgacatctggctacatgtaggtagagaagaaagacaattttaaaaaggaaatcaggtcttttgcaactgtgcctccctctgtctgttttcacttgaatgggtaaataaccagcagctaggttttgaattcctaccttgttattctaaacagatgtccacattgttaattaaatctaaattatgagccttgctgagtggatacggtacttacacctgaaccaggattcctgggttctgttgttgacattgcccttcagcacctgtttggccagctgtataagataggactaatgactaggaagcctaccccaatgaatgatatactagatgaaatagtgttcaaaacctgtaggcactctctggctaaaaacaaactctgaggccaccagcagatcatctttaagctaagttactatttttcacctttttttttagacggagttttgctctttgttgcccaggctggagtgcagtggcacgatctcggctcactgcaacctccgcctcccaagttcaagcgattctcctgtctcagcctcctgggtagctgggattacaggtgcccaccaacatgcctggctaatttttgtacttttagtagagatggggtttcaccatgttggccaggctggtcttcaactccagatctcaggtgatctaccctcctcggcctcccaaagtactgggattacaggcctgagccaccgcgcccggcctatttttcactttaatttggcagctgagaatgcccaaaaagtgccagaagcatcgtggcatttccagaaccatggattctgcctttggacccctctctattaatattaaaactctgggccttcagatgtcaccctaatccactgccctaagacagaatttctggacaagatgggtaagggcttcattccttcaacaagtcaagtcatacttggcctctccctgagaatctgagcaggagccttataacctgtggtcattattttttctttctgtacagaaatagaaaagcattagaaataacttctaaccatcctctgaaaaaacagaaaaaatatcgaatccctctttcaaaggttgcccctgatgggggccaggttccgccacagaacatcttagatgtcagccttgacctcacttagcagggattacagaaatgagatacattttgaaggagagttgtctgttatgttcactgtattctaagtgagtgaattaatgaattaagagtggctggcagagtaggcagaaaaagacactgcaaatggcataaaaattaaagtcctagctgagttctcaatggtaaaggcatcagatgtcttagcagtcaagctagaaattcatgacaatgagtattactatttgcctaatgacaactcattgctctccatgtaaatgtaatcaacagatgaagagaatataattgctctgcttttccactaaaactccatcttagtgaattttaaattatccagagatgtcaaactgccaaataaaaatatttcagtagtctttgcatcagcttaccttgtaccagaaacatttccaatttactatcaaattatagtaactgagcctgtgtgaagtatctcatcattttcgaaaggaacaccttgtgtgatgccagtgagcatttctaaaaagggtgtgaggtagaggtaaaaataaggtgagagaccatttcagaatgcactgttgctcaaaaaggtgatctggttctttcttcagagatttctacggggatagaaaatcgggagtctgccctcattaatctgtgactccacctcttgcatcaaatcaatatctatttgttgagcacttattgattaagaccttgcatatgtctgtccattttgatttgagatacaactttttgtgtgggttgaatgacaaatcactccaaacaaagctgggcacagagaatcagctaggagaccagttattcagggtccatttctcttggatgtaaaggagtcctgggtaaaatgtggctgtaacctaaaccaactagtccttgtgatttgtttctgccctctgtgtttcctgttgtcaaatgctaagtgtgtgttttgcagtcatgaactaaagcacaaaaagatgcatgagacattgtagtcatatgtctggtgtgacactttggagcaaaaaccttgcagtggtaaataaaaaatttccaacaggg

SEQ ID NO: 460227 - DNA, 2599 bp, Homo sapiens
gggctgtacggtccggaatatttgggatctacttgttattctaaacagatgtccacattgttaattaaatctaaattatgagccttgctgagtggatacggtacttacacctgaaccaggattcctgggttctgttgttgacattgcccttcagcacctgtttggccagctgtataagataggactaatgactaggaagcctaccccaatgaatgatatactagatgaaatagtgttcaaaacctgtaggcactctctggctaaaaacaaactctgaggccaccagcagatcatctttaagctaagttactatttttcacctttttttttagacggagttttgctctttgttgcccaggctggagtgcagtggcacgatctcggctcactgcaacctccgcctcccaagttcaagcgattctcctgtctcagcctcctgggtagctgggattacaggtgcccaccaacatgcctggctaatttttgtacttttagtagagatggggtttcaccatgttggccaggctggtcttcaactccagatctcaggtgatctaccctcctcggcctcccaaagtactgggattacaggcctgagccaccgcgcccggcctatttttcactttaatttggcagctgagaatgcccaaaaagtgccagaagcatcgtggcatttccagaaccatggattctgcctttggacccctctctattaatattaaaactctgggccttcagatgtcaccctaatccactgccctaagacagaatttctggacaagatgggtaagggcttcattccttcaacaagtcaagtcatacttggcctctccctgagaatctgagcaggagccttataacctgtggtcattattttttctttctgtacagaaatagaaaagcattagaaataacttctaaccatcctctgaaaaaacagaaaaaatatcgaatccctctttcatgagaagtcttttggataattggaaaccttcatcactgaggttggccagcccctgccaagtgttgtgtaggcaaagcacttgttagtggcttcctatgaaatgttttagagatctcttcaccatactggtttcttctctttggttggtgtgggtaaaagaaaacaaaacatttcctataagctgaaagctgaccagcattctcttcttggtaacatctactactccaacctagaaaatttggattctagaccaaaaatcaggaaacatggctccttataaatctgtgcagctgccttatagtaccatcaaaggaatttcaggtgggctgggcggggccccgatcccagaattatcaactccacccatcatcatttggtcatgaagcatcctttcattcttcttcttcttttttttggggggggcggggcgggggagggatctcaaagttttagtcttccagaatccaaattaaaggttgcccctgatgggggccaggttccgccacagaacatcttagatgtcagccttgacctcacttagcagggattacagaaatgagatacattttgaaggagagttgtctgttatgttcactgtattctaagtgcctgggataaagctgtctcatgggtgctccatatatattcatatatatttgttgagtgaattaatgaattaagagtggctggcagagtaggcagaaaaagacactgcaaatggcataaaaattaaagtcctagctgagttctcaatggtaaaggcatcagatgtcttagcagtcaagctagaaattcatgacaatgagtattactatttgcctaatgacaactcattgctctccatgtaaatgtaatcaacagatgaagagaatataattgctctgcttttccactaaaactccatcttagtgaattttaaattatccagagatgtcaaactgccaaataaaaatatttcagtagtctttgcatcagcttaccttgtaccagaaacatttccaatttactatcaaattatagtaactgagcctgtgtgaagtatctcatcattttcgaaaggaacaccttgtgtgatgccagtgagcatttctaaaaagggtgtgaggtagaggtaaaaataaggtgagagaccatttcagaatgcactgttgctcaaaaaggtgatctggttctttcttcagagatttctacggggatagaaaatcgggagtctgccctcattaatctgtgactccacctcttgcatcaaatcaatatctatttgttgagcacttattgattaagaccttgcatatgtctgtccattttgatttgagatacaactttttgtgtgggttgaatgacaaatcactccaaacaaagctgggcacagagaatcagctaggagaccagttattcagggtccatttctcttggatgtaaaggagtcctgggtaaaatgtggctgtaacctaaaccaactagtccttgtgatttgtttctgccctctgtgtttcctgttgtcaaatgctaagtgtgtgttttgcagtcatgaactaaagcacaaaaagatgcatgagacattgtagtcatatgtctggtgtgacactttggagcaaaaaccttgcagtggtaaataaaaaatttccaacaggg

SEQ ID NO: 460228 - DNA, 4413 bp, Homo sapiens
ggcggcgggagagctgctggctcgcccggatcccgggagctgcctggaggcgggcccggcccggggaaggtgagcggctgcgggacccagcccctcgccgggagcgggcaccatggtgctgtcggtgcctgtgatcgcgctgggcgccacgctgggcacagccaccagcatcctcgcgttgtgcggggtcacctgcctgtgtcggcacatgcaccccaagaaggggctgctgccgcgggaccaggaccccgacctggagaaggcgaagcccagcttgctcgggtctgcacaacagttcaatgttaaaaagtccacggaacctgttcagccccgtgccctcctcaagttcccagacatctatggacccaggccagctgtgacggctccagaggtcatcaactatgcagactattcactgaggtctacggaggagcccactgcacctgccagcccccaacccccgaatgacagtcgcctcaagaggcaggtcacagaggagctgttcatcctccctcagaatggtgtggtggaggatgtctgtgtcatggagacctggaacccagagaaggctgccagttggaaccaggcccccaaactccactactgcctggactatgactgtcagaaggcagaattgtttgtgactcgcctggaagctgtgaccagcaaccacgacggaggctgtgactgctacgtccaagggagtgtggccaataggaccggctctgtggaggctcagacagccctaaagaagcggcagctgcacaccacctgggaggagggcctggtgctccccctggcggaggaggagctccccacagccaccctgacgctgaccttgaggacctgcgaccgcttctcccgtcacagcgtggccggggagctccgcctgggcctggacgggacatctgtgcctctaggggctgcccagtggggcgagctgaagacttcagcgaaggagccatctgcaggagctggagaggtcctactatccatcagctacctcccggctgccaaccgcctcctggtggtgctgattaaagccaagaacctccactctaaccagtccaaggagctcctggggaaggatgtctctgtcaaggtgaccttgaagcaccaggctcggaagctgaagaagaagcagactaaacgagctaagcacaagatcaaccccgtgtggaacgagatgatcatgtttgagctgcctgacgacctgctgcaggcctccagtgtggagctggaagtgctgggccaggacgattcagggcagagctgtgcgcttggccactgcagcctgggcctgcacacctcgggctctgagcgcagccactgggaggagatgctcaaaaaccctcgccggcagattgccatgtggcaccagctgcacctgtaaccagctgcccagctgcctcccttcttggacagccctgacccgtcctctgcaacctcctttctgtgcccctttcctcattctgacacccagaagacagtgacagatgtgtttgcaaggctgggatggctctctcatcatactcttgtttcttagaaataagcaagacagagcaggaaatggaatatgcgggtcacactgaggaatgcattttgctcatctgtgttattgaaggaggtgcttattaaatacagttcctatgcctgttttataggtggggttaggccagatgcagagaaagctaaatgtgggaatcatggatgcaaagaagaatttggctttttgaaaaacaagcatttcaaaaatgatgaaggaagtgaaagtatcctggatcaactcctagagttagagattgcccaggtggaaagaaaccttagccagcgttcaatcaagctcaccatgcagggcagtcacccggcagttctcaaactttagcatgtgaagagtcaccagcagattcctgggctcgcctggagacattcctagtcggtattcctggtcgaagcccaggagccttcctttttaacaagctgatgtagagggtggagcactgtatgtggagaaattccttctacaatattccacacaggtttttggccacagtccttgatggagtcccaaaaccatggtgcagccagttccaatgctggacacctcaaccatcagggtgaaatctggggcctcagctttttaatttaattattttaattcttaatactttaatttgtgcatttcataagccccctgctcttggactgaattttgtgctttttattgaagaattttattgtttttatcttaaaatcagtttctattatccttggggagaccatccctaacaaagtacaggtgggatctcctgtgagtcattggctgggttctgattgctagatgtcacacccaccagcatcaccaaagtgactctgagatagaccggtcccttctcagcgttccagtcacttcaggaggaatttagttattgacttagtctatgacatctggctacatgtaggtagagaagaaagacaattttaaaaaggaaatcaggtcttttgcaactgtgcctccctctgtctgttttcacttgaatgggtaaataaccagcagctaggttttgaattcctaccttgttattctaaacagatgtccacattgttaattaaatctaaattatgagccttgctgagtggatacggtacttacacctgaaccaggattcctgggttctgttgttgacattgcccttcagcacctgtttggccagctgtataagataggactaatgactaggaagcctaccccaatgaatgatatactagatgaaatagtgttcaaaacctgtaggcactctctggctaaaaacaaactctgaggccaccagcagatcatctttaagctaagttactatttttcacctttttttttagacggagttttgctctttgttgcccaggctggagtgcagtggcacgatctcggctcactgcaacctccgcctcccaagttcaagcgattctcctgtctcagcctcctgggtagctgggattacaggtgcccaccaacatgcctggctaatttttgtacttttagtagagatggggtttcaccatgttggccaggctggtcttcaactccagatctcaggtgatctaccctcctcggcctcccaaagtactgggattacaggcctgagccaccgcgcccggcctatttttcactttaatttggcagctgagaatgcccaaaaagtgccagaagcatcgtggcatttccagaaccatggattctgcctttggacccctctctattaatattaaaactctgggccttcagatgtcaccctaatccactgccctaagacagaatttctggacaagatgggtaagggcttcattccttcaacaagtcaagtcatacttggcctctccctgagaatctgagcaggagccttataacctgtggtcattattttttctttctgtacagaaatagaaaagcattagaaataacttctaaccatcctctgaaaaaacagaaaaaatatcgaatccctctttcatgagaagtcttttggataattggaaaccttcatcactgaggttggccagcccctgccaagtgttgtgtaggcaaagcacttgttagtggcttcctatgaaatgttttagagatctcttcaccatactggtttcttctctttggttggtgtgggtaaaagaaaacaaaacatttcctataagctgaaagctgaccagcattctcttcttggtaacatctactactccaacctagaaaatttggattctagaccaaaaatcaggaaacatggctccttataaatctgtgcagctgccttatagtaccatcaaaggaatttcaggtgggctgggcggggccccgatcccagaattatcaactccacccatcatcatttggtcatgaagcatcctttcattcttcttcttcttttttttggggggggcggggcgggggagggatctcaaagttttagtcttccagaatccaaattaaaggttgcccctgatgggggccaggttccgccacagaacatcttagatgtcagccttgacctcacttagcagggattacagaaatgagatacattttgaaggagagttgtctgttatgttcactgtattctaagtgcctgggataaagctgtctcatgggtgctccatatatattcatatatatttgttttattcagggtccatttctcttggatgtaaaggagtcctgggtaaaatgtggctgtaacctaaaccaactagtccttgtgatttgtttctgccctctgtgtttcctgttgtcaaatgctaagtgtgtgttttgcagtcatgaactaaagcacaaaaagatgcatgagacattgtagtcatatgtctggtgtgacactttggagcaaaaaccttgcagtggtaaataaaaaatttccaacaggg

SEQ ID NO: 460229 - DNA, 3794 bp, Homo sapiens
  misc_feature (3)..(4): n is a, c, g, or t
  misc_feature (8)..(8): n is a, c, g, or t
gannctanccattaggtggagaagaggagggaggaagggagaagggagaaggaagaggcaaggggagcagatgagagcagcagagtggggaccacctgcagcaggtccaggcaatatccatgggcgcagccataggatggatgggccgatggatggaggagttcaatgttaaaaagtccacggaacctgttcagccccgtgccctcctcaagttcccagacatctatggacccaggccagctgtgacggctccagaggtcatcaactatgcagactattcactgaggtctacggaggagcccactgcacctgccagcccccaacccccgaatgacagtcgcctcaagaggcaggtcacagaggagctgttcatcctccctcagaatggtgtggtggaggatgtctgtgtcatggagacctggaacccagagaaggctgccagttggaaccaggcccccaaactccactactgcctggactatgactgtcagaaggcagaattgtttgtgactcgcctggaagaaagtcccacgcctgtgttgttctccttgcctgcagctgtgaccagcaaccacgacggaggctgtgactgctacgtccaagggagtgtggccaataggaccggctctgtggaggctcagacagccctaaagaagcggcagctgcacaccacctgggaggagggcctggtgctccccctggcggaggaggagctccccacagccaccctgacgctgaccttgaggacctgcgaccgcttctcccgtcacagcgtggccggggagctccgcctgggcctggacgggacatctgtgcctctaggggctgcccagtggggcgagctgaagacttcagcgaaggagccatctgcaggagctggagaggtcctactatccatcagctacctcccggctgccaaccgcctcctggtggtgctgattaaagccaagaacctccactctaaccagtccaaggagctcctggggaaggatgtctctgtcaaggtgaccttgaagcaccaggctcggaagctgaagaagaagcagactaaacgagctaagcacaagatcaaccccgtgtggaacgagatgatcatgtttgagctgcctgacgacctgctgcaggcctccagtgtggagctggaagtgctgggccaggacgattcagggcagagctgtgcgcttggccactgcagcctgggcctgcacacctcgggctctgagcgcagccactgggaggagatgctcaaaaaccctcgccggcagattgccatgtggcaccagctgcacctgtaaccagctgcccagctgcctcccttcttggacagccctgacccgtcctctgcaacctcctttctgtgcccctttcctcattctgacacccagaagacagtgacagatgtgtttgcaaggctgggatggctctctcatcatactcttgtttcttagaaataagcaagacagagcaggaaatggaatatgcgggtcacactgaggaatgcattttgctcatctgtgttattgaaggaggtgcttattaaatacagttcctatgcctgttttataggtggggttaggccagatgcagagaaagctaaataaatagaaaagcattagaaataacttctaaccatcctctgaaaaaacagaaaaaatatcgaatccctctttcatgagaagtcttttggataattggaaaccttcatcactgaggttggccagcccctgccaagtgttgtgtaggcaaagcacttgttagtggcttcctatgaaatgttttagagatctcttcaccatactggtttcttctctttggttggtgtgggtaaaagaaaacaaaacatttcctataagctgaaagctgaccagcattctcttcttggtaacatctactactccaacctagaaaatttggattctagaccaaaaatcaggaaacatggctccttataaatctgtgcagctgccttatagtaccatcaaaggaatttcaggtgggctgggcggggccccgatcccagaattatcaactccacccatcatcatttggtcatgaagcatcctttcattcttcttcttcttttttttggggggggcggggcgggggagggatctcaaagttttagtcttccagaatccaaattaaaggttgcccctgatgggggccaggttccgccacagaacatcttagatgtcagccttgacctcacttagcagggattacagaaatgagatacattttgaaggagagttgtctgttatgttcactgtattctaagtgcctgggataaagctgtctcatgggtgctccatatatattcatatatatttgttgagtgaattaatgaattaagagtggctggcagagtaggcagaaaaagacactgcaaatggcataaaaattaaagtcctagctgagttctcaatggtaaaggcatcagatgtcttagcagtcaagctagaaattcatgacaatgagtattactatttgcctaatgacaactcattgctctccatgtaaatgtaatcaacagatgaagagaatataattgctctgcttttccactaaaactccatcttagtgaattttaaattatccagagatgtcaaactgccaaataaaaatatttcagtagtctttgcatcagcttaccttgtaccagaaacatttccaatttactatcaaattatagtaactgagcctgtgtgaagtatctcatcattttcgaaaggaacaccttgtgtgatgccagtgagcatttctaaaaagggtgtgaggtagaggtaaaaataaggtgagagaccatttcagaatgcactgttgctcaaaaaggtgatctggttctttcttcagagatttctacggggatagaaaatcgggagtctgccctcattaatctgtgactccacctcttgcatcaaatcaatatctatttgttgagcacttattgattaagaccttgcatatgtctgtccattttgatttgagatacaactttttgtgtgggttgaatgacaaatcactccaaacaaagctgggcacagagaatcagctaggagaccagttattcagggtccatttctcttggatgtaaaggagtcctgggtaaaatgtggctgtaacctaaaccaactagtccttgtgatttgtttctgccctctgtgtttcctgttgtcaaatgctaagtgtgtgttttgcagtcatgaactaaagcacaaaaagatgcatgagacattgtagtcatatgtctggtgtgacactttggagcaaaaaccttgcagtggtaaataaaaaatttccaacagggtcagctgcctggtgttttctttttttccgttttacctaatattttggcatataaaatgcagaagaaatcatctgataagcacttatgagccactgccatgtttaataaaacttgacaactacaattgaagtaccctcagtgccctttactcagaagaccatgaccttggatttggggtttatcatcccaggcattccctcatacttttattacatgtctctgtaagccctgagttccataaagtgtttttaaacttcatttaaattgtatcacactattttcactcaacattaaatatttcagtttcatctgtgcagacacatgcagctccagtttatttctttttcactgatgtatgatattccattgtatggatatgccacagtcctatgcagttgatgtatatctacatgtttctttttcttttttttttttttactgttacaagaaatgctgctatgacattcctctgcatgtctccttgtgc

SEQ ID NO: 460230 - DNA, 5448 bp, Homo sapiens
ggcggcgggagagctgctggctcgcccggatcccgggagctgcctggaggcgggcccggcccggggaaggtgagcggctgcgggacccagcccctcgccgggagcgggcaccatggtgctgtcggtgcctgtgatcgcgctgggcgccacgctgggcacagccaccagcatcctcgcgttgtgcggggtcacctgcctgtgtcggcacatgcaccccaagaaggggctgctgccgcgggaccaggaccccgacctggagaaggcgaagcccagcttgctcgggtctgcacaacagttcaatgttaaaaagtccacggaacctgttcagccccgtgccctcctcaagttcccagacatctatggacccaggccagctgtgacggctccagaggtcatcaactatgcagactattcactgaggtctacggaggagcccactgcacctgccagcccccaacccccgaatgacagtcgcctcaagaggcaggtcacagaggagctgttcatcctccctcagaatggtgtggtggaggatgtctgtgtcatggagacctggaacccagagaaggctgccagttggaaccaggcccccaaactccactactgcctggactatgactgtcagaaggcagaattgtttgtgactcgcctggaagctgtgaccagcaaccacgacggaggctgtgactgctacgtccaagggagtgtggccaataggaccggctctgtggaggctcagacagccctaaagaagcggcagctgcacaccacctgggaggagggcctggtgctccccctggcggaggaggagctccccacagccaccctgacgctgaccttgaggacctgcgaccgcttctcccgtcacagcgtggccggggagctccgcctgggcctggacgggacatctgtgcctctaggggctgcccagtggggcgagctgaagacttcagcgaaggagccatctgcaggagctggagaggtcctactatccatcagctacctcccggctgccaaccgcctcctggtggtgctgattaaagccaagaacctccactctaaccagtccaaggagctcctggggaaggatgtctctgtcaaggtgaccttgaagcaccaggctcggaagctgaagaagaagcagactaaacgagctaagcacaagatcaaccccgtgtggaacgagatgatcatgtttgagctgcctgacgacctgctgcaggcctccagtgtggagctggaagtgctgggccaggacgattcagggcagagctgtgcgcttggccactgcagcctgggcctgcacacctcgggctctgagcgcagccactgggaggagatgctcaaaaaccctcgccggcagattgccatgtggcaccagctgcacctgtaaccagctgcccagctgcctcccttcttggacagccctgacccgtcctctgcaacctcctttctgtgcccctttcctcattctgacacccagaagacagtgacagatgtgtttgcaaggctgggatggctctctcatcatactcttgtttcttagaaataagcaagacagagcaggaaatggaatatgcgggtcacactgaggaatgcattttgctcatctgtgttattgaaggaggtgcttattaaatacagttcctatgcctgttttataggtggggttaggccagatgcagagaaagctaaatgtgggaatcatggatgcaaagaagaatttggctttttgaaaaacaagcatttcaaaaatgatgaaggaagtgaaagtatcctggatcaactcctagagttagagattgcccaggtggaaagaaaccttagccagcgttcaatcaagctcaccatgcagggcagtcacccggcagttctcaaactttagcatgtgaagagtcaccagcagattcctgggctcgcctggagacattcctagtcggtattcctggtcgaagcccaggagccttcctttttaacaagctgatgtagagggtggagcactgtatgtggagaaattccttctacaatattccacacaggtttttggccacagtccttgatggagtcccaaaaccatggtgcagccagttccaatgctggacacctcaaccatcagggtgaaatctggggcctcagctttttaatttaattattttaattcttaatactttaatttgtgcatttcataagccccctgctcttggactgaattttgtgctttttattgaagaattttattgtttttatcttaaaatcagtttctattatccttggggagaccatccctaacaaagtacaggtgggatctcctgtgagtcattggctgggttctgattgctagatgtcacacccaccagcatcaccaaagtgactctgagatagaccggtcccttctcagcgttccagtcacttcaggaggaatttagttattgacttagtctatgacatctggctacatgtaggtagagaagaaagacaattttaaaaaggaaatcaggtcttttgcaactgtgcctccctctgtctgttttcacttgaatgggtaaataaccagcagctaggttttgaattcctaccttgttattctaaacagatgtccacattgttaattaaatctaaattatgagccttgctgagtggatacggtacttacacctgaaccaggattcctgggttctgttgttgacattgcccttcagcacctgtttggccagctgtataagataggactaatgactaggaagcctaccccaatgaatgatatactagatgaaatagtgttcaaaacctgtaggcactctctggctaaaaacaaactctgaggccaccagcagatcatctttaagctaagttactatttttcacctttttttttagacggagttttgctctttgttgcccaggctggagtgcagtggcacgatctcggctcactgcaacctccgcctcccaagttcaagcgattctcctgtctcagcctcctgggtagctgggattacaggtgcccaccaacatgcctggctaatttttgtacttttagtagagatggggtttcaccatgttggccaggctggtcttcaactccagatctcaggtgatctaccctcctcggcctcccaaagtactgggattacaggcctgagccaccgcgcccggcctatttttcactttaatttggcagctgagaatgcccaaaaagtgccagaagcatcgtggcatttccagaaccatggattctgcctttggacccctctctattaatattaaaactctgggccttcagatgtcaccctaatccactgccctaagacagaatttctggacaagatgggtaagggcttcattccttcaacaagtcaagtcatacttggcctctccctgagaatctgagcaggagccttataacctgtggtcattattttttctttctgtacagaaatagaaaagcattagaaataacttctaaccatcctctgaaaaaacagaaaaaatatcgaatccctctttcatgagaagtcttttggataattggaaaccttcatcactgaggttggccagcccctgccaagtgttgtgtaggcaaagcacttgttagtggcttcctatgaaatgttttagagatctcttcaccatactggtttcttctctttggttggtgtgggtaaaagaaaacaaaacatttcctataagctgaaagctgaccagcattctcttcttggtaacatctactactccaacctagaaaatttggattctagaccaaaaatcaggaaacatggctccttataaatctgtgcagctgccttatagtaccatcaaaggaatttcaggtgggctgggcggggccccgatcccagaattatcaactccacccatcatcatttggtcatgaagcatcctttcattcttcttcttcttttttttggggggggcggggcgggggagggatctcaaagttttagtcttccagaatccaaattaaaggttgcccctgatgggggccaggttccgccacagaacatcttagatgtcagccttgacctcacttagcagggattacagaaatgagatacattttgaaggagagttgtctgttatgttcactgtattctaagtgcctgggataaagctgtctcatgggtgctccatatatattcatatatatttgttgagtgaattaatgaattaagagtggctggcagagtaggcagaaaaagacactgcaaatggcataaaaattaaagtcctagctgagttctcaatggtaaaggcatcagatgtcttagcagtcaagctagaaattcatgacaatgagtattactatttgcctaatgacaactcattgctctccatgtaaatgtaatcaacagatgaagagaatataattgctctgcttttccactaaaactccatcttagtgaattttaaattatccagagatgtcaaactgccaaataaaaatatttcagtagtctttgcatcagcttaccttgtaccagaaacatttccaatttactatcaaattatagtaactgagcctgtgtgaagtatctcatcattttcgaaaggaacaccttgtgtgatgccagtgagcatttctaaaaagggtgtgaggtagaggtaaaaataaggtgagagaccatttcagaatgcactgttgctcaaaaaggtgatctggttctttcttcagagatttctacggggatagaaaatcgggagtctgccctcattaatctgtgactccacctcttgcatcaaatcaatatctatttgttgagcacttattgattaagaccttgcatatgtctgtccattttgatttgagatacaactttttgtgtgggttgaatgacaaatcactccaaacaaagctgggcacagagaatcagctaggagaccagttattcagggtccatttctcttggatgtaaaggagtcctgggtaaaatgtggctgtaacctaaaccaactagtccttgtgatttgtttctgccctctgtgtttcctgttgtcaaatgctaagtgtgtgttttgcagtcatgaactaaagcacaaaaagatgcatgagacattgtagtcatatgtctggtgtgacactttggagcaaaaaccttgcagtggtaaataaaaaatttccaacagggaaaaaaaaaaaaaaaaaaaaacaaaaaactttttgcgcccgccgcgggcccctagaaaaaagccttctaaaaacccagtctcgtgtgcggcggcggcgggcccacatcaagctatcacggcaccctggcccatgcgtgggccataagaggacccggcggccgctggcatatgcggtgggttctccaccacaatcaaaaatggtcggctgcgcccacggccgtttggcaacacacagccaggagtctcgagcgcaaacgggaccatacgaggcgccagcgacgcgataaagtagccccagaggat

SEQ ID NO: 460231 - DNA, 3759 bp, Homo sapiens
ggcggcgggagagctgctggctcgcccggatcccgggagctgcctggaggcgggcccggcccggggaaggtgagcggctgcgggacccagcccctcgccgggagcgggcaccatggtgctgtcggtgcctgtgatcgcgctgggcgccacgctgggcacagccaccagcatcctcgcgttgtgcggggtcacctgcctgtgtcggcacatgcaccccaagaaggggctgctgccgcgggaccaggaccccgacctggagaaggcgaagcccagcttgctcgggtctgcacaacagttcaatgttaaaaagtccacggaacctgttcagccccgtgccctcctcaagttcccagacatctatggacccaggccagctgtgacggctccagaggtcatcaactatgcagactattcactgaggtctacggaggagcccactgcacctgccagcccccaacccccgaatgacagtcgcctcaagaggcaggtcacagaggagctgttcatcctccctcagaatggtgtggtggaggatgtctgtgtcatggagacctggaacccagagaaggctgccagttggaaccaggcccccaaactccactactgcctggactatgactgtcagaaggcagaattgtttgtgactcgcctggaagctgtgaccagcaaccacgacggaggctgtgactgctacgtccaagggagtgtggccaataggaccggctctgtggaggctcagacagccctaaagaagcggcagctgcacaccacctgggaggagggcctggtgctccccctggcggaggaggagctccccacagccaccctgacgctgaccttgaggacctgcgaccgcttctcccgtcacagcgtggccggggagctccgcctgggcctggacgggacatctgtgcctctaggggctgcccagtggggcgagctgaagacttcagcgaaggagccatctgcaggagctggagaggtcctactatccatcagctacctcccggctgccaaccgcctcctggtggtgctgattaaagccaagaacctccactctaaccagtccaaggagctcctggggaaggatgtctctgtcaaggtgaccttgaagcaccaggctcggaagctgaagaagaagcagactaaacgagctaagcacaagatcaaccccgtgtggaacgagatgatcatgtttgagctgcctgacgacctgctgcaggcctccagtgtggagctggaagtgctgggccaggacgattcagggcagagctgtgcgcttggccactgcagcctgggcctgcacacctcgggctctgagcgcagccactgggaggagatgctcaaaaaccctcgccggcagattgccatgtggcaccagctgcacctgtaaccagctgcccagctgcctcccttcttggacagccctgacccgtcctctgcaacctcctttctgtgcccctttcctcattctgacacccagaagacagtgacagatgtgtttgcaaggctgggatggctctctcatcatactcttgtttcttagaaataagcaagacagagcaggaaatggaatatgcgggtcacactgaggaatgcattttgctcatctgtgttattgaaggaggtgcttattaaatacagttcctatgcctgttttataggtggggttaggccagatgcagagaaagctaaatgtgggaatcatggatgcaaagaagaatttggctttttgaaaaacaagcatttcaaaaatgatgaaggaagtgaaagtatcctggatcaactcctagagttagagattgcccaggtggaaagaaaccttagccagcgttcaatcaagctcaccatgcagggcagtcacccggcagttctcaaactttagcatgtgaagagtcaccagcagattcctgggctcgcctggagacattcctagtcggtattcctggtcgaagcccaggagccttcctttttaacaagctgatgtagagggtggagcactgtatgtggagaaattccttctacaatattccacacaggtttttggccacagtccttgatggagtcccaaaaccatggtgcagccagttccaatgctggacacctcaaccatcagggtgaaatctggggcctcagctttttaatttaattattttaattcttaatactttaatttgtgcatttcataagccccctgctcttggactgaattttgtgctttttattgaagaattttattgtttttatcttaaaatcagtttctattatccttggggagaccatccctaacaaagtacaggtgggatctcctgtgagtcattggctgggttctgattgctagatgtcacacccaccagcatcaccaaagtgactctgagatagaccggtcccttctcagcgttccagtcacttcaggaggaatttagttattgacttagtctatgacatctggctacatgtaggtagagaagaaagacaattttaaaaaggaaatcaggtcttttgcaactgtgcctccctctgtctgttttcacttgaatgggtaaataaccagcagctaggttttgaattcctaccttgttattctaaacagatgtccacattgttaattaaatctaaattatgagccttgctgagtggatacggtacttacacctgaaccaggattcctgggttctgttgttgacattgcccttcagcacctgtttggccagctgtataagataggactaatgactaggaagcctaccccaatgaatgatatactagatgaaatagtgttcaaaacctgtaggcactctctggctaaaaacaaactctgaggccaccagcagatcatctttaagctaagttactatttttcacctttttttttagacggagttttgctctttgttgcccaggctggagtgcagtggcacgatctcggctcactgcaacctccgcctcccaagttcaagcgattctcctgtctcagcctcctgggtagctgggattacaggtgcccaccaacatgcctggctaatttttgtacttttagtagagatggggtttcaccatgttggccaggctggtcttcaactccagatctcaggtgatctaccctcctcggcctcccaaagtactgggattacaggcctgagccaccgcgcccggcctatttttcactttaatttggcagctgagaatgcccaaaaagtgccagaagcatcgtggcatttccagaaccatggattctgcctttggacccctctctattaatattaaaactctgggccttcagatgtcaccctaatccactgccctaagacagaatttctggacaagatgggtaagggcttcattccttcaacaagtcaagtcatacttggcctctccctgagaatctgagcaggagccttataacctgtggtcattattttttctttctgtacagaaatagaaaagcattagaaataacttctaaccatcctctgaaaaaacagaaaaaatatcgaatccctctttcatgagaagtcttttggataattggaaaccttcatcactgaggttggccagcccctgccaagtgttgtgtaggcaaagcacttgttagtggcttcctatgaaatgttttagagatctcttcaccatactggtttcttctctttggttggtgtgggtaaaagaaaacaaaacatttcctataagctgaaagctgaccagcattctcttcttccgaaggtattacaactatggaccctactagggagtcctgga

SEQ ID NO: 460232 - DNA, 1827 bp, Homo sapiens
agctctgaaatgttcgtacgcgcgaccgaccatccttacgccctggtgaccgcggcggggcgggcgcagtccgggagctgctcccatctgtgaagacagcggcggtcagcggggcgggcggagggtccccgcggagggcagctcgcagccccgaccccgccagggagcagccgcggcccctgtcgctccctcccctccgcgggcggcctgggggctgcgcctggggctggcggaggcggtgccggtggggaccggtggggggctcggaccgaacgcgccagcggcagatgcgtctccttctccatatttaaaaatcaatctgcgccccactcccggctccggagccaaactcaaccatctcgggctgcacaaagccagaggcgcgccggggggtttgcaccgggaaccggcaccgagtgacccgcccgccccagcccggccgcggcgcctgctctgcctggatgtggctcgagctccgggccgggcgcgcggggcgggggccctggattatccgtggcgcctcccgccccagcggagccgaaagttactcggagctgctttcctcgcggccagcgtcacctcggggcgcgagcttttctgccgagccgcggccccgcgcgtccctcccgccgcccagacccgcgcgtccttcccacctgctgtggccgaagcggctgccggggcggccgggccgcgctcccggagacagacgcgctgcgctccccccgccggggacccgctctccattcgcgagggcagcggccgagctgggaccgagttatcaacagattgcggggctgcggcgccggccggtgagtcacagccccgcgcacgagcggcccagcccggccagcagcgccgccgcctctgcgcgcacctcccgcggcgacagcggggacccggggccggaggcaggcgcgtaaccatggggaccggggcgggcgatggcggcgggcgggctcctgccgcagggtggggatggctcttccagccgggcggccgccgtcacactgcagagcgtatttaaagagacacctcgctccgcgctcgctccccagcaccagaccctcgccggaaaacgccgccgggcggactgcacgaccctgtgttattcccaaagacaatctccatccgtggagaagctgcaggaacagaaatatacacaagaaaatggatttggaaggaattttccatcctttatttaacattctcaagtccagatatgccagaaccgaggtgcacctgtcgtgaacccgtctgagtgacctggccgccctgactccctggacaccgttcccttggagcctcggagccccccctggtgtcccctgggtgatggtcctggacaagagggctgggaagaagcgggcagcaaggggaggattctgccccagacgtccccaggccgggggtccccatgggctctgccctgacgtcttactcctgcacccagcggctcccaccacagagactgctccagttgcaggttagaccccacttgcggttgtgtgttccagaagtctccgggcgctgtgtggcaggatgaggagctgcccccctggaggatcacgcaggcctctgggtggcattcagcagggttggctgcggcaccggctgaccacagggcccacctttccagtcccggcaggagagaagcgtctcaaccatgttgcaggcacacgggtgagggtgctgcctgcctccctgactcttacctccccaagagaggaaaacaaaagaaaaaaagataagaccaggaaatggaaataagacaaagaagaatgaaattttaaaatccgaacaaacccaaacatgctgtttcaaaac

SEQ ID NO: 460233 - DNA, 2234 bp, Homo sapiens
ttgtggttattacctctttggttgtgatcatcacctccttcgttgtggttaccacctccctggtttcaccacctccctggtcatggttatcactcccccgtttgcagttatcacctccctgggtgtggttatcacctccctggttgtgatcatcacctgccttgttctggttatcactgccctgggtgtagttatcacctccctgggtgtagttgtcacctccctggtcatggttatcactcccctggttgcagttatcactcccctgggtgtagttatcacctccctggttgtggtcatcacctccctggtcatggttatcacttcccttactgtggtcattacctcctccattgtggtcatcactcccctggtcatggttatcacttcccttactgtgatcatcacctccctctttgtggtcatcactcccctggtcatggttatcactttcctgattgtggttaacacctctctggttgtggttcttatcactcttattgtctccctggttgtggttatcaccttcctggttgtggctatcacttccctggttgtggttatcacctccctggttgtggttatcacctctctggttgtggtcatccctccttcattgtggttatcactcccctgggtgtggtcctcattcccctggttgtggttctcacctccctggttgtggttcttacctctcttgtttgtggtcaccacctcccttgttgtggttctcacctctctgattgtgagcatcacctccctctttgtggtcatcattcccctggttgtggttatcacttccctgattgtggttatcacctctctggttgtggttcttatcgctgttattgtggtcaccccctccctcattgtggttatcagctccctggttgtggttattgcctccctggttgtggtttttatctctctcattgtggtcatcagctccctcattgtggttatcacttccctggttgtggttatcacctccctggttgtggtcatcacctccctcattgtggttatcacttccctggtcgtggttatcacctccctggttgtggtcatcacctccctcattgtggtcatcattcccctggttgtggttatcacttcctttgttgtgagagaaagctggctacaaggactcttattcccaagaatgctacaacagaaacccatcataaacggagaagcaacatgcaaaggacatgtagcttctacagccatcaccatgaagacagacactgccaggacagcagggggccacatatgaatagcaccatgttttaataaaagacacagtaataacgtcaccaattgtgttaacaagaacaggaacaatacgttccatttctctactaagtctcatcatcatgactggcagaacattctgcaacctcacaatcacaattatgaagacagcatggaaaatggctaatgatccaatattcgctgagaaacacagggccaagatgtaactatcctctcatcaaaaccgtaggaattctgtgaatacagaagttcaaacaccggatggaaatggggagaaaatgaaaactgccttttttttagagtagtgggttcgtggaggatttgtctttaggcttttggtttgcatttgatgctgacacaatattgtttatccagtgaatgcaagtttttgttttgttttgtttgtttgtcttttaaagaggagagtggagaagaggaaagttctcttctgccatcgttcctcatttgtctgagaaacaggcaccgcacctggcccaatggaaaagaaattccagaagaagggaagagggaaggaatggagttgagtgtgtctggatctaaaggcttgctgctccgccctggcttcctgtccccacaggaagcacaccaggcctctctctctccccaactcactccaacgggtgacctccactgggcagcctgcctcaggaatgcctctcctctcatccttcttcaggcacagaggcccgccctccatacaacttccagaaagacagctctgcacacctaaagaacctcccagacccctgcatcaggacaacagcctctcctggcactcaggaccagcctcctcctagctgcctgcaaatttgttcccgaaacacacctgtcggtctgaacccatgcctttcaatcttgggtggctctctggtcagagaacctccacaaccctgggtgcaggtgccagcaacggcacgttggatgaagtgaacccccct

SEQ ID NO: 460234 - DNA, 4471 bp, Homo sapiens
ttgtggttattacctctttggttgtgatcatcacctccttcgttgtggttaccacctccctggtttcaccacctccctggtcatggttatcactcccccgtttgcagttatcacctccctgggtgtggttatcacctccctggttgtgatcatcacctgccttgttctggttatcactgccctgggtgtagttatcacctccctgggtgtagttgtcacctccctggtcatggttatcactcccctggttgcagttatcactcccctgggtgtagttatcacctccctggttgtggtcatcacctccctggtcatggttatcacttcccttactgtggtcattacctcctccattgtggtcatcactcccctggtcatggttatcacttcccttactgtgatcatcacctccctctttgtggtcatcactcccctggtcatggttatcactttcctgattgtggttaacacctctctggttgtggttcttatcactcttattgtctccctggttgtggttatcaccttcctggttgtggctatcacttccctggttgtggttatcacctccctggttgtggttatcacctctctggttgtggtcatccctccttcattgtggttatcactcccctgggtgtggtcctcattcccctggttgtggttctcacctccctggttgtggttcttacctctcttgtttgtggtcaccacctcccttgttgtggttctcacctctctgattgtgagcatcacctccctctttgtggtcatcattcccctggttgtggttatcacttccctgattgtggttatcacctctctggttgtggttcttatcgctgttattgtggtcaccccctccctcattgtggttatcagctccctggttgtggttattgcctccctggttgtggtttttatctctctcattgtggtcatcagctccctcattgtggttatcacttccctggttgtggttatcacctccctggttgtggtcatcacctccctcattgtggttatcacttccctggtcgtggttatcacctccctggttgtggtcatcacctccctcattgtggtcatcattcccctggttgtggttatcacttcctttgttgtgagagaaagctggctacaaggactcttattcccaagaatgctacaacagaaacccatcataaacggagaagcaacatgcaaaggacatgtagcttctacagccatcaccatgaagacagacactgccaggacagcagggggccacatatgaatagcaccatgttttaataaaagacacagtaataacgtcaccaattgtgttaacaagaacaggaacaatacgttccatttctctactaagtctcatcatcatgactggcagaacattctgcaacctcacaatcacaattatgaagacagcatggaaaatggctaatgatccaatattcgctgagaaacacagggccaagatgtaactatcctctcatcaaaaccgtaggaattctgtgaatacagaagttcaaacaccggatggaaatggggagaaaatgaaaactgccttttttttagagtagtgggttcgtggaggatttgtctttaggcttttggtttgcatttgatgctgacacaatattgtttatccagtgaatgcaagtttttgttttgttttgtttgtttgtcttttaaagaggagagtggagaagaggaaagttctcttctgccatcgttcctcatttgtctgagaaacaggcaccgcacctggcccaatggaaaagaaattccagaagaagggaagagggaaggaatggagttgagtgtgtctggatctaaaggcttgctgctccgccctggcttcctgtccccacaggaagcacaccaggcctctctctctccccaactcactccaacgggtgacctccactgggcagcctgcctcaggaatgcctctcctctcatccttcttcaggcacagaggcccgccctccatacaacttccagaaagacagctctgcacacctaaagaacctcccagacccctgcatcaggacaacagcctctcctggcactcaggaccagcctcctcctagctgcctgcaaattgtcacagaacacaccggcgagtttcacccggggaagaccctgcctgccagtgccagccacgcacgttggatgacagctgaccccctctgcaaccaaaaccttccaaaccatggccaagcagatggctcccttctctctcccatcccccatgactgtaaggacctcaaatacacagattgatcaagtgtacacttatggatgataaaatgacagggtctcttccctcattgtcccaagtgagggagacaggcaatgtacatataaaccagcaattaagcaagtataaattgcaacacacgctatgaaggtcctcagtattttcttggaataattccctttctccgccttatagtgtcaatgtcaggactttctccttcctctcctcctcccttctccaccccaaccacctgcagcttcccactgcctggaactgtgccttgcaagtcagtgctctctgcaaaaaaagtcccctcattatcttcctcgtacaaggcaataaggttttctattttcacttcttgcttcctgcttctgtttctcatttgttttttgtttgttgtaaatgtctctttcaatagtaggaaaaatgaacaagtttttcctgagggagaaagatttctacagtaacctagcagactccatatggggaagttgctcaaaatattgacttctttcccattcccaggagccaggaatccaaatggcaaatcatttctggcttgaacactcttcaggattgatgggcgctctcctggacagtctctagttgataactgctgagctgtgggatcgcacaggggtctcccagtgtcacccaagggggctgcactgattatccaaaggtccctcttggctccagtagtgatcagtcgcctagagtaatgaagcatactccgcttgctttccttgtaagaaaagagccccaagtctccatgcatgacaactatttacagataacagctacctagagtctctgtgcaattcactcattttaaatgcattgggatttattgcttttgacattaattgcactgagttgatatttgtctcatttctgagctcaagaagctgtcctgagatgtccagtgagcaaagcggagttaacacaccagtgctccataaaatggaatggcaagcagagccatataaataccctcaaaatgtagagcagcagggatgattcacagccctcaagtccaaacacattctcttgatttctgaagagcaagacagcaagaagatttcttagcacatcccacctctaagtctgtgctgacaggtgtctggaagctgtgtgtgagtatctcaagttagatcacatcaagacaaaccgggcttgttcattccatgggattggagctccgcttaattactctgacctcagaaacatcttccacatttgtagtggatggctgctcccctcccttagcacctacaagccctccctttgagtcatgttaatttgcccttgctgaatccttgttctgtaaatgtattcagaaggacatttctgcatgttctgtctcttcagattcttagctctctaaggatttctcatttgccagctcctccccatgctttctagcacatgctgggggtgggcacagaacaggatttcataggcaccgcacttagcgtaggtactgcctttttagcttgtcctaataaacacaccgtcccttcccccttctgcactcggtatgcaaatgctgtcaaaagctcagaactattgggtttctataattaaatctggggaaaaatctcatctgggattgtcttttctttctaaaaatactaagagctatgaagctattaaccagtagttctgaaacctggctggacagcagaataacaaaaagaggatttaagaaatctggatccccaggcccctgtctcctaaggattctactttaattggcctgagacggggctcaattatcagtagcttcacaaattttcccaggtgattccaatatgcaaccaagattgaaactctgagaaactgaataataaggggtagtgctatagtctctcagtgctgttttcccatctgtagataacaataacaacagtccctacccttctagagttattaggaggactgaacgtgatcatgtatgtaagttgatcctatgtgaatatttcccactattattatctatgtcatcctagatcctttttcttcttcaactctgcatatgaccaacatccttaaatcagtgatagcactcaaaaacacaataattctcaagacctagaatattaactgagaagaacctggattcaaattgtgtttcaacaatctgccagccaggaagccttcctctggtcacctgaacccagaatcttgaaatgacaagcattt

SEQ ID NO: 460235 - DNA, 1870 bp, Homo sapiens
ttagccaaaagcctgatagtgatatggacaataaggttcaggctgaggtggtctcagatggagatgaggaacttgttgggaactggagcaaaagtgattctgttattgtcctggaggcagcggtttctcttgggggtgaagacttgaccccattctatggtctgctgtctggtggccgggaaggaaaattctacagggagctagaagactacttctactattctcagctccgcagtcaaggcatcgacacaatggagaccagaaaggtgtcagaacacatttgcctgtcagagcttccttttgtcatgagagcaattggcttttacccatctgaagagaaggtgttaatggggcacctttggaagctgggtgcttgtctggactgtggagcacggagggtgcagccgtccctcatgaccgtgctgcagaagcacccctagatgcaagaagccccaagcagagtcaagaagcatctcagggaaatgttcctcatgtaaactgttgtttaaagtgcagttcgctttccttgtgtatatcgtctcttgagcatctcttcacatggcccagaccttaatagacactgaataaatatttgctgaccccagtgactaagattgaaaaccagaatgcagaactgttctagtaataattgagagacttgtatttcattggctttgcactaaaccaaatgctcagtaactactagtaaatcgagtaaaattaactagggcactaaatgattattctaagcttcttcccctaaccgcgagtgatccgccaacctcggcctcccgaggtgccgggattgcagacggagtctcgttcactcagtgctcaatggtgcccaggctggagtgcagtggcgtgatctcggctcactacaacctacacctcccagccgcctgccttggcctcccaaagtgccgagattgcagcctctgcccggccgccaccccgtctgggaagtgaggagtgtctctgcctggccgcccatcgtcggggatgtgaggagcccctctgcctggctgcccagtctggaaagtgaggagcgtctccacccggccgccatcccatctaggaagtgaggagcgcctcttcccagccgccatcacatctaggaagtgaggagcgtctctgcccggccgcccatcgtctgagatgtggggagcgcctctgccccgccgccccatctgggatgtgaggagtgcctctgcccggccgagaccccgtctgggagattgatgatatatttaacgaaatcaaatttggtgaatatgtggacactggaaagctaatcgacaagatcaacttaccagatttcctaaaagtgtaccttaaccacaagccaccttttggtaacaccatgagtggcatccacaagagctttgaggtgctcggttataccaactccaaagggaaaaaggccattcgaagagaggacttcctgagactgctcgttactaaaggtgagcatatgacggaggaggagatgttggattgctttgcttcactgtttggcctgaatcccgagggatggaaatccgagcctgcaacctgctccgtcaaaggttcagaaatttgccttgaagaagaacttccagacgaaatcactgcagaaatattcgcgactgaaattcttggcttaaccatttcagaagattccggccaggatggtcagtgaagttaccaggaatgtttaaagcacaaaggactttgggtgtgtgtgcatgcacatgtgtgtgttttccatgaggcactgctttttatgcatttccctcccccctctcatctttagaacatttagacattaaagcaagtttctggtgagcaatggaattcacaaagttggacattccactgtttctgaaat

SEQ ID NO: 460236 - DNA, 1942 bp, Homo sapiens
gggttaatccaacacattctcggggtggtcggagctgtgcttcatgccctgggcaaagcccaccatctctggcctatctctgtgggctgtgattgccatggagttaggcaccattgttgcattactgagttttcttaatgcaaagccgaccatctctggcctatctccgtgggctgtgattgccatggagttaggcaccattgttgcattactgagctttcttaatgcaaagcccaccatctctggcctatctccatgggctgtgattgccatggagttaggcaccacatctcccaggaactcagggaaaggtgctcgagttgttaatacagatgctgttaatacatcctgtgtgccatccagggtgctggtgacagagggacacattgaaggattgtgccgacgtgctgtgaatgacttggagcatcacttttcaaaagtagcaaggtgctccatgaagagcactggcctaagagcccagagttcagaatttcaagtctggttcatccacacatccacacatgtaggctatgacagcacaaaagaaggagtgaaaactcagtttcgaagggacaaagtcaaggagacttcaaagatgagaaatgattgcactgggccttagagaggaagttcagcagaacaaggtgggaagggcacgatatcagagctgcttgtgcattcttcacctcccattgtctctgtctctctctttctcctctgcttcccctcaccccacaaccaaagtcaagagcgcagaccccatgatcacctgatacttccaagcaagcaggtgttcttttcagaagccagaagctgataacctgggctttctgatctaaccccagcccaaattcattgcaatggaggaattggggaggagattcttcctactgagaagtgggtgccaactctccctttcaaatttgttcatcaacaaactaaaggggatgccagaaatgtctggagcaatggaagaaccactggaataatgctcctgcctgattgtatctacttaacccactctccaagagccagaatcagatttcaaccgtatggaatcatctacaatgcagcagatgggtttacaagtctcttggtctcttcatgaagaaggcgcagcaatcgtgtcccaagtccttgaggacttcacagggtgttctagtgtcctgagaatatacctgcctaaggcactgtggtgggattctgccattcgagaatctcagactaagatcatctgtttcaacaagcatcgatcaagcacccacattgcagctggcactctgcttgatggtgagatgagtgtcaagaccagttccttattttacagggaaggccatcaaggttgaaagtggaaatttcccaaggtcagagacagagtggtagagccagtccatgcattctggtctcctgtctcctgttccagtgctcattcgtgacactgctgctctccctaacacttcatcccacgagaatactcttgagaatattgttcttggctgttccaaatagaaagatcatctgtccattattcaggtgatatgggctgaggtcttgcctcttctagtcacttggagaaagttccagaagcaaagactatgtacctaatattcctttaactctgttttcctggggccatatttaactgtgggtgttttctgtttcaactggtggcctgtgggaaagaggtagtgcctggcaggctggccaaggacacggggactaaagaacaatgttggaaggagatgggggcagcgtgagggaggaggcgaagacatattgtgggggagtcttcaccccaattgaagtcacctaaaatcactcctttgtaactagaagactaagaaacacttgtgaaagcaggtgaaagctgaaagcacatctgtgtgtgtgtcggggggaagtgactcaggagttgaggaagactgagctctacacccctcac

SEQ ID NO: 460237 - DNA, 1320 bp, Homo sapiens
gggttaatccaacacattctcggggtggtcggagctgtgcttcatgccctgggcaaagcccaccatctctggcctatctctgtgggctgtgattgccatggagttaggcaccattgttgcattactgagttttcttaatgcaaagccgaccatctctggcctatctccgtgggctgtgattgccatggagttaggcaccattgttgcattactgagctttcttaatgcaaagcccaccatctctggcctatctccatgggctgtgattgccatggagttaggcaccacatctcccaggaactcagggaaaggtgctcgagttgttaatacagatgctgttaatacatcctgtgtgccatccagggtgctggtgacagagggacacattgaaggattgtgccgacgtgctgtgaatgacttggagcatcacttttcaaaagtagcaaggtgctccatgaagagcactggcctaagagcccagagttcagaatttcaagtctggttcatccacacatccacacatgtaggctatgacagcacaaaagaaggagtgaaaactcagtttcgaagggacaaagtcaaggagacttcaaagatgagaaatgattgcactgggccttagagaggaagttcagcagaacaaggtgggaagggcacgatatcagagctgcttgtgcattcttcacctcccattgtctctgtctctctctttctcctctgcttcccctcaccccacaaccaaagtcaagagcgcagaccccatgatcacctgatacttccaagcaagcaggtgttcttttcagaagccagaagctgataacctgggctttctgatctaaccccagcccaaattcattgcaatggaggaattggggaggagattcttcctactgagaagtgggtgccaactctccctttcaaatttgttcatcaacaaactaaaggggatgccagaaatgtctggagcaatggaagaaccactggaataatgctcctgcctgattgtatctacttaacccactctccaagagccagaatcagatttcaaccgtatggaatcatctacaatgcagcagatgggtttacaagtctcttggtctcttcatgaagaaggcgcagcaatcgtgtcccaagtccttgaggacttcacagggtgttctagtgtcctgagaatatacctgcctaaggtttctcatctcttaaataagtataataagattcccctcgtctattgtgcagagaaaatttgtgaaggaaaaaataccattctgtgtgtcaagctgctctgaaaacataaagttgtctgtgattatgaaagat

SEQ ID NO: 460238 - DNA, 1362 bp, Homo sapiens
gggttaatccaacacattctcggggtggtcggagctgtgcttcatgccctgggcaaagcccaccatctctggcctatctctgtgggctgtgattgccatggagttaggcaccattgttgcattactgagttttcttaatgcaaagccgaccatctctggcctatctccgtgggctgtgattgccatggagttaggcaccattgttgcattactgagctttcttaatgcaaagcccaccatctctggcctatctccatgggctgtgattgccatggagttaggcaccacatctcccaggaactcagggaaaggtgctcgagttgttaatacagatgctgttaatacatcctgtgtgccatccagggtgctggtgacagagggacacattgaaggattgtgccgacgtgctgtgaatgacttggagcatcacttttcaaaagtagcaaggtgctccatgaagagcactggcctaagagcccagagttcagaatttcaagtctggttcatccacacatccacacatgtaggctatgacagcacaaaagaaggagtgaaaactcagtttcgaagggacaaagtcaaggagacttcaaagatgagaaatgattgcactgggccttagagaggaagttcagcagaacaaggtgggaagggcacgatatcagagctgcttgtgcattcttcacctcccattgtctctgtctctctctttctcctctgcttcccctcaccccacaaccaaagtcaagagcgcagaccccatgatcacctgatacttccaagcaagcaggtgttcttttcagaagccagaagctgataacctgggctttctgatctaaccccagcccaaattcattgcaatggaggaattggggaggagattcttcctactgagaagtgggtgccaactctccctttcaaatttgttcatcaacaaactaaaggggatgccagaaatgtctggagcaatggaagaaccactggaataatgctcctgcctgattgtatctacttaacccactctccaagagccagaatcagatttcaaccgtatggaatcatctacaatgcagcagatgggtttacaagtctcttggtctcttcatgaagaaggcgcagcaatcgtgtcccaagtccttgaggacttcacagggtgttctagtgtcctgagaatatacctgcctaaggaatttggctatagctggtattgggttcctcaaaccagcccacctgcgctatgggaatgtcaaaattgtcctggcaagctgagggggcatccagaggtcacccagctttcccctgaagcgttgctcagaggccactgtaccataaaagggagttcccatcccacactggttctga

SEQ ID NO: 460239 - DNA, 1266 bp, Homo sapiens
gggttaatccaacacattctcggggtggtcggagctgtgcttcatgccctgggcaaagcccaccatctctggcctatctctgtgggctgtgattgccatggagttaggcaccattgttgcattactgagttttcttaatgcaaagccgaccatctctggcctatctccgtgggctgtgattgccatggagttaggcaccattgttgcattactgagctttcttaatgcaaagcccaccatctctggcctatctccatgggctgtgattgccatggagttaggcaccacatctcccaggaactcagggaaaggtgctcgagttgttaatacagatgctgttaatacatcctgtgtgccatccagggtgctggtgacagagggacacattgaaggattgtgccgacgtgctgtgaatgacttggagcatcacttttcaaaagtagcaaggtgctccatgaagagcactggcctaagagcccagagttcagaatttcaagtctggttcatccacacatccacacatgtaggctatgacagcacaaaagaaggagtgaaaactcagtttcgaagggacaaagtcaaggagacttcaaagatgagaaatgattgcactgggccttagagaggaagttcagcagaacaaggtgggaagggcacgatatcagagctgcttgtgcattcttcacctcccattgtctctgtctctctctttctcctctgcttcccctcaccccacaaccaaagtcaagagcgcagaccccatgatcacctgatacttccaagcaagcaggtgttcttttcagaagccagaagctgataacctgggctttctgatctaaccccagcccaaattcattgcaatggaggaattggggaggagattcttcctactgagaagtgggtgccaactctccctttcaaatttgttcatcaacaaactaaaggggatgccagaaatgtctggagcaatggaagaaccactggaataatgctcctgcctgattgtatctacttaacccactctccaagagccagaatcagatttcaaccgtatggaatcatctacaatgcagcagatgggtttacaagtctcttggtctcttcatgtaattaacagccaagaagtctaaagcttgcattgtttacgtggaagatgtttcttgcccattcccatgccatgccatctgaaatcgctcctttttttattttttctgtgcagtttttttaactttgtgggatcctctgcatataaaactccattcaact

SEQ ID NO: 460240 - DNA, 1401 bp, Homo sapiens
gggttaatccaacacattctcggggtggtcggagctgtgcttcatgccctgggcaaagcccaccatctctggcctatctctgtgggctgtgattgccatggagttaggcaccattgttgcattactgagttttcttaatgcaaagccgaccatctctggcctatctccgtgggctgtgattgccatggagttaggcaccattgttgcattactgagctttcttaatgcaaagcccaccatctctggcctatctccatgggctgtgattgccatggagttaggcaccacatctcccaggaactcagggaaaggtgctcgagttgttaatacagatgctgttaatacatcctgtgtgccatccagggtgctggtgacagagggacacattgaaggattgtgccgacgtgctgtgaatgacttggagcatcacttttcaaaagtagcaaggtgctccatgaagagcactggcctaagagcccagagttcagaatttcaagtctggttcatccacacatccacacatgtaggctatgacagcacaaaagaaggagtgaaaactcagtttcgaagggacaaagtcaaggagacttcaaagatgagaaatgattgcactgggccttagagaggaagttcagcagaacaaggtgggaagggcacgatatcagagctgcttgtgcattcttcacctcccattgtctctgtctctctctttctcctctgcttcccctcaccccacaaccaaagtcaagagcgcagaccccatgatcacctgatacttccaagcaagcaggtgttcttttcagaagccagaagctgataacctgggctttctgatctaaccccagcccaaattcattgcaatggaggaattggggaggagattcttcctactgagaagtgggtgccaactctccctttcaaatttgttcatcaacaaactaaaggggatgccagaaatgtctggagcaatggaagaaccactggaataatgctcctgcctgattgtatctacttaacccactctccaagagccagaatcagatttcaaccgtatggaatcatctacaatgcagcagatgggtttacaagtctcttggtctcttcatgaagaaggcgcagcaatcgtgtcccaagtccttgaggacttcacagggtgttctagtgtcctgagaatatacctgcctaagggcgtatctgttagggagactcccatgagggaggggagccgagggaagaggctgagtgaggtgaagagagtgtgtttgtccctccagctgtgccagggtcttctcagcccttctcacagagggctgtctgtggacctctgttcctggaatcacccctctgcaccacccaaactccctgattatgaattacacaatacatccctaattcaagcat

SEQ ID NO: 460241 - DNA, 2487 bp, Homo sapiens
tccccagagcagcagcatgtcatctcctggagctgttagaaatgcaagttctccggtcccctttggatcagaaactaggagtggagccaagtgttcaacaagccctcctggtgattctgatgagaaccatcactttaaagagaaaggaactgaggctcagagatggcgcctacatcacaactcctcagtgcatcctgtggtcaagtaccagactgagtggctggaggactgctgagcatggtgactgcctagaggccttaaaaaaaaaagtgcttgaaagagaaggggacaaaggaacaccagtattaagaggattttccagtgtttctggcagttggtccagaaggatgcctccattcctgcttctcacctgcctcttcatcacaggcacctccgtgtcacccgtggccctagatccttgttctgcttacatcagcctgaatgagccctgggaggaacactgaccaccagttggatgagtctcaaggtcctcctctatgtgacaaccatgtgaatggggagtggtaccacttcacgggcatggcgggagatgccatgcctaccttctgcataccagaaaaccactgtggaacccacgcacctgtctggctcaatggcagccaccccctagaaggcgacggcattgtgcaacgccaggcttgtgccagcttcaatgggaactgctgtctctggaacaccacggtggaagtcaaggcttgccctggaggctactatgtgtatcgtctgaccaagcccagcgtctgcttccacgtctactgtggtcatttttatgacatctgcgacgaggactgccatggcagctgctcagataccagcgagtgcacatgcgctccaggaactgtgctaggccctgacaggcagacatgctttggtaagaaactcatcaaagatgaaaatgaatgtgagcaaaacaacggtggctgcagtgagatctgtgtgaacctcaaaaactcctaccgctgtgagtgtggggttggccgtgtgctaagaagtgatggcaagacttgtgaagctatgctgctggtccaaggagcacacctggactggccaggtaatagaggcagtagcataaccactggccgacagctgtgtttcccaaacttccctgctgctgagaagcacctggggcttttacgcttagcccctcccagaccctctcctggagccttggcttcagaggagctaagatggggacttcgagtttgtgtttttaacaaattattcccttttctgttggtttctactgcagacgttgaaggatgccacaataacaatggtggctgcagccactcttgccttggatctgagaaaggctaccagtgtgaatgtccccggggcctggtgctgtctgaggataaccacacttgccaagtccctgtgttgtgcaaatcaaatgccattgaagtgaacatccccagggagctggttggtggcctggagctcttcctgaccaacacctcctgccgaggagtgtccaacggcacccatgtcaacatcctcttctctctcaagacatgtggtacagtggtcgatgagtccagtcaagggacaaacacaggagcagtcaagacaagtgggacttggatccaggtggaagtgtgtgtgtggtttacacagcagagaggaaaagaaagggcctttcagataggaaacaacttcctcattatcttcatcattatcatcattatcttcatcatcatcttcatcttcttcatcgtcatcatcatcatcatcatcatcttcctcagcagcaagtttgttgaagatcagagagttgtggtgaatgacaagattgtggccagcaacctcgtgacaggtctacccaagcagaccccggggagcagcggggacttcatcatccgaaccagcaagctgctgatcccggtgacctgcgagtttccacgcctgtacaccatttctgaaggatacgttcccaaccttcgaaactccccactggaaatcatgagccgaaatcatgggatcttcccattcactctggagatcttcaaggacaatgagtttgaagagccttaccgggaagctctgcccaccctcaagcttcgtgactccctctactttggcattgagcccgtggtgcacgtgagcggcttggaaagcttggtggagagctgctttgccacccccacctccaagatcgacgaggtcctgaaatactacctcatccgggatggctgtgtttcagatgactcggtaaagcagtacacatcccgggatcacctagcaaagcacttccaggtccctgtcttcaagtttgtgggcaaagaccacaaggaagtgtttctgcactgccgggttcttgtctgtggagtgttggacgagcgttcccgctgtgcccagggttgccaccggcgaatgcgtcgtggggcaggaggagaggactcagccggtctacagggccagacgctaacaggcggcccgatccgcatcgactgggaggactagttc

SEQ ID NO: 460242 - DNA, 1621 bp, Homo sapiens
accactttctcttctcagaagccagacctgtcctcagaatgctacaaggtcccagtctcattccagacaccagaccaacttggactgtgcccccaaataacgtgtcatccctactatcttctgtccagtcatactcctattcacctttttcaattcatacaaaaccatatccaggccatcaccaatcattctatacgacaaatgtttcttctaacaacctcacaatatcaccccttaccacaagatcttccttcagcttaatctctcccactctaggttcccacaccgccactaatcccgctcgaagcagccctgagaaacatcgcccattctctctccataccacccccaaaaatttgcgccaccccaacacttcaacactattttgttttatttttcttattaatagtatacgatgtggaatggggttaaatcaagctaattaatatatccatcaccacaagtacttataattgttttatgagctcagattctcgactctcattccttgcgacactgaacctgatgttgtcacctcacctatctgcatgaaacagtgtatgaagtatgcatactgctagaggcaagtgagagcttggcatctggggaaggaggatgtatgagtgggcaggtgtgtgtgtgtatatgtgtgtatgcatgtgtgtgtgcactcatgtcttcagctgtgggaacatagcgttcaaggtgccatcttagaagcagaaagcaggcctcaatagacactaaacctgctagcaacttgttcttagacttccatccccagtactgtgaggcatacgtttctgttcttattaactgtccagtatcaggaatgttatgctgattaaatgagttaatgtatgtaaggtcttttgaaagttcctgggttttcgggcaactcaaagaatatgtgtaacctctactcaccaaatggccacttggctctattttaaatttaggcccagttagctacttgggatccatcatgaaggactggctctttcaggttcacatttgttcaccaagtgatgaacctcatttttgagtgtggagattggaacttagggaagtgatttgtaactttgctccagcttgagacttggcttggaaataacctccaaggcctggaataccagcattgacagccttacctgggtgcacctcaggagtatgctcaaagagtgagaaaggagtttggagacagaaagacggaagagttgatattccgctcacagatgtcaattttcaaagaaatttctgcccattatggatgcaccacaaatactaaagtctatgcaatatatattttgaaaagaatttttttcgtgaaactgtaattttcgttcataagagtatatttcctgacttagcattttattgactagattaaaattttgttccccaaaattagatgttctaaaggaaaggttcatttattgttgtttggagaataactttaaaatgctcatgacattagacccagggatcttattgaaatatattttcttaaagagataattgcacaagtgtattagtccattcttaaactgacataaagaactacatgacactgggtaatttataaagaaaagaagcttaatcagctcatggttccatgggc

SEQ ID NO: 460243 - DNA, 1291 bp, Homo sapiens
tgcctttttccaggacaagaagcagagatatattttcatttttccctctttttttcaagggcgaagcccagttgatatccaagagaagacctgatcaattctcatttaaagctagataatccttgctaaaaatcattttcataaaaggagtactacgctttcacccaaagaaaacaagaaaagggttcctgcaaggaagcagcattcattacctctcatcagggaacagcctgcacttctggtctggtgcaccacacggggaacagcccacctcagcaaaaaccggacactgggttttaagcagcaacgccgtctgaaacacaaaaccatcattatgtcttccagggctactgtcagttatctgaatggtatgacagccaaacttagaggtctctcttaaatcatctttttacaatcctagtctgctctccttcattaagaaatgctgtgctacttagaccacttaacattattttacttaatgctgtaatggaatgcatcatttatattagctactattagctggcaaggactcaggagacaaactataatggtaggtttttggtagcattgtatattagcatttttatagctgatcagccatgaacacttgctaaaaggttgcagttagtaatttagtcaaacaaataaaatgttttcccttattatttatttttatgacatgatatttttcttcattccatcattatttcccttggtttctgaaaggcaggattatgtttattctgtcttcagtgaaagcaaacagccatcctgtgaagcaggttggccaaaaagcagttcactttggcacaccaaggatcatacctggctgtgtatttacctgaaagacaacgagaatgcagcgtataatacaggtatctccattaaccatggccttctccataatgtcacaaatactgctaagatgatgtgcttcaattggatgctgcttgcccaagacacttgtgattggaagattggggttggtggcaagaagattgagttggtgtatgcacatcgcaccaacgtgccccctctggcagcaaagctgctgcttttcactatcttctccaccctgagagaaattactgtgctgaccaagcttgaggtggtcagcatagtaattctctcaatgcagactgaggtggaggataggagcagttctagctaagaacaccatggacttccactgttcttacccaaagttcaaggttttttaaaatgaataacaactctcaatttagtgtatgccttggcaatttccagggcctggaaatggttgtttttg

SEQ ID NO: 460244 - DNA, 701 bp, Homo sapiens
ccggatagcccagctatccttcgccactgccgtttttatgcacatgtatacatttagggtcggaagcccagttcgaatccaaaagaagacctgatcaattctcatttaaagctagataatccttgctaaaaatcattttcataaaaggagtactacgctttcacccaaagaaaacaagaaaagggttcctgcaaggaagcagcattcattacctctcatcagggaacagcctgcacttctggtctggtgcaccacacggggaacagcccacctcagcaaaaaccggacactgggttttaagcagcaacgccgtctgaaacacaaaaccatcattatgtcttccagggctactgtcagttatctgaatggtatgacagccaaacttagaggtctctcttaaatcatctttttacaatcctagtctgctctccttcattaagaaatgctgtgctacttagaccacttaacattattttacttaatgctgtaatggaatgcatcatttatattagctactattagctggcaaggactcaggagacaaactataatggtaggtttttggtagcattgtatattagcatttttatagctgatcagccatgaacacttgctaaaaggttgcagttagtaatttagtcaaacaaataaaatgttttcccttaaaacaaaaacaaaaaatgggcctagttggtcccaag

SEQ ID NO: 460245 - DNA, 378 bp, Homo sapiens
tgcctttttccaggacaagaagcagagatatattttcatttttccctctttttttcaagggcgaagcccagttgatatccaagagaagacctgatcaattctcatttaaaggtactcagaaaaaaaaaaaagatactgtaaaggatctttaagattggccactttgcaaatcccacagggttagcatcctgtaaacatttccttttgttgatatctacatgacaattgttgaaaactccaggagtctacatagctacttttcaccataatttttactaaagaaaggtgccttcaaaggttctcttacctactgtaattgaactctcaaggacgacatggagcctgaggttgtggaatacaaactcctaagacttaaac

SEQ ID NO: 460246 - DNA, 1421 bp, Homo sapiens
cagacatcagaaacaactctaaaaatgtggttctcccgcctgtcgattggaccttgcaggaagccccgcctcatcaactcagtcaagggctttagttggcccggcgtcggtgagtggcgggtcttagctccgccctggccgtccgctgcgctgcctgggtcggcgccgtttccagttgagagatggcggccgccgcaggtagatcgctcctgctgctcctctcctctcggggcggcggcggcgggggcgccggcggctgcggggcgctgactgccggctgcttccctgggctgggcgtcagccgccaccggcagcagcagcaccaccggacggtgagcgagcgcgcccggaggctccggggagggcggggcggcgctggcgtgtgggagccgccggcgggcaggccgccggggcagcaggcgagttacctcaactcccggccgctccggaggttgccgggcaccgaggagccgccgactggggacaccagggcggggaaggcacgggacttgaacctctccccgactcgcccccaatcgcgttccctcccttcttcgttcttaacagccctgccccaaggctccctgaacggagccagatggaagttatagaggaatagatatagaagaaaccatctaagacctgaggacattgttacttcatttaatttttactataaccctatgagaggtattaacccagttttatagatttaagtgtcataaactggtttagtgctagggatgcactgaaaggcaggacgcatgttttggatttaagcctgagtctggctagagtgagaactgtactgttctgggtgtcagtgtgggtcatccttccttttcctttctgctcctttagcatgttcttcctcaagtatctgctgctgttttccttcaagagatctcgacatccttcctactgactacatttcttgttgttttgagacggagtcttactctgtcgcccaggctggagttgcagtgagctgacatggtgccattgcaccccagcctggacaacaagaacgaaactgtgtctcaaaaaaagaaagaaaaaaaaaaaagcaaacatttggaaatataatgtgactggaaaagtgtggtcagcattccgggcagcaccaatctgacatgacctcatgagggagtaagatgtatttgagaagcagccactggtttgttacaactggagtatgcgcaagaatagctggagattaggctggacaatagtagttataccaatgataatatttttcaagtatatcatgtgccaagaattttacatagattatctcatttaattcttgtgatacactatgacccaggtactgtttttatcctcattttatagatagtgaaactaagttacccactgagttaaatgatttgcccagagtcacagctgttaagtgacacaca

SEQ ID NO: 460247 - DNA, 841 bp, Homo sapiens
aggtggcgctgttgctttagccatcaagaaaggcaaggctggggacgccgcatccccgggtgcggagggcgatgcctaggggcgatgctgtgcctgtggcggccaaacagtgccacccactccgggaaacaaagccaagcgccggacgctagcttcctaggtcttccacgtgttcaacggaaattcacaaattctctagtagcagaagccaagaacaagttctctggatcacataggctcctctgctgcttcctcagaaacagagatggtacttggtgccgaagaaagagacagagactgggaaggagaaggaagtcagcagaaagaagaaagacgcacaggaaagagagaagggtagctaaaagaaagagtcagggagatggttccaggagaagaaaagaaagtcagttgctttctgagatcaggtgggaagtttatcctgtcaactccacctttagagtgctagtctctggagccacaaggactgaaactctgcttcagagacccaccactgatgacaaccatcaggctcaggaactgaaaagaaatggtgcaaatgtggccgagggacttgggttttacatttattgccgagtctggttttcttgagtttcagatgataaaattgaagcccagagaagcttgggagcctcaactattaatggaaaaaccataactagaactgagttttcctgagacattttttactattcattcccctgctcttgggccactccagggcactgagcacacttgctttggctatttggagaagaggccaatagacacaactggcttcatcttcagggacacccaatatctggcagccctcagccccagc

SEQ ID NO: 460248 - DNA, 3193 bp, Homo sapiens
gtcaaagttgattgaatcgggatggtattcaaaattcggagtatggttaatcctggaagatgccatcagcagtgttcagtgagcatgatggcaaaatcctggtatctcatgaaaccacaggaagatcatctttcagaacaaacaagaaataaagatagggcatttcttctaagacgctcaaatatccaaatcaccttgccttgtgccgtgggctacccagcggaggtatcaggctccaggctggtattggggagtgtctgcaaagagccctgtgatgtgacctgttatcagctcccacacagcctgcatcctgaaaggctggtctcactcctactgtgctcctgcaacagcaccaagtatatttccaggcaactggtgagcagggctgagaacttgccccagaccacaagtctcccagctgagaaagcacagctcctcagttgtcccacagagcctgcagtggcaatccacctccttcaaaagttctgtgaattctctcagctttcctggaacacttcatacaggatgggccaataatgcaaggactaatgggacttggtagagagacaacggcatccaatactggaagatcatctgtcagtggtgtgcaggatgcaagaagttgccgaggatgatggccggagggtagcttaggagcctactagcatagtccgtgtacaaaatgagggactgactaggggaaggctgtagagaaacacagaaacggaggaagatatgaaatatttaggagatagaattgagtggatttggtacctcattagatataatcaacggggaaggaaaaggtatcgaggataaatgtcaggtttctggcttggttaattgcattctcagtgttttcactcataacaataagaaatgcaggatcttgtagactgaattttgaccatccccattcatgtgttggagccctaaccctcaacatccctgggtttggagatggggcctttaaggaggacaggctagatgctgacagcttgatcttggacctcaagttttccgaattgtgataaatagatgtttataataaagccacccagtctgtggtatcttgttgtgatagctggacctgactaatacacagggcatgtggcaagtttaaggggaagatgtctttctgaaacatttgaatcaatcagaagttcttttggaacaactaaggaaagatgtcagcttgctgcctcaaaatgctgtttgatgacactggtttagaaaatagaaaacagatttttcttttctccgaagaaatagaaaactttcctctgtactccaagggatatacaggaagaatagaaatatgaatttgaactgtgactaagagtcagcatgtactttcccttctctggaaaaagaaaagaaaaaagctggagaagtaaagctcagaagcacggttgggtatggctgagttaagtagactacatgaaaaataaacagtcaacaatcttacagagaaaatgaattttgctctttgatgtaagaaaaagcccactcacctttatttttaaaatgtcctgagttgaggtaaacaatatctatttttgctattaaaaaattctatttctgtctgatatttttcccaattgatagaaatcagaagaacactcctagagaaattaacactaaaatgcaaaagcactgtaatagctcctctttgatattatgaattgactttaacctgatttgctctctaaatttcttaggttatttctgaattttgtttatagtttattagcatgttaaatattttttgtggttttgatttgcatacatatacaatattttggttatattaaaaataaaataactggtatgtgtttcctacctcctgatttgctttctgttactggtataagcctatttttacattgctgtcaggcctgtttagttaataggatgtgttagccagtgttttctgtatatacttcagaggctttagagttttgcagttcagcccattgcctttttaaattactaggttagagtggttttaggtttacagtgaaattaagcaaaaagtgtggagtttccacatactgcaacttctcccccttcccctaccccatccctataatacacagtctgcctcaccattgagatgccctaccatgaacaactataagccaataaattggaaaaactagaagaaatggataaattcctggatacatacaatctaccaaaattgaataattaagaaacagaaaatctgaacagatcaatatcaagtaacaaaattgaatcagtagtgaaatgtctcccatcaaagaaaaccccaggacccgatgccttcactgctgaattctgtcaaacatttaaagaagaacaatctgaacagatcaatatctagtaagaaaattgaataagtaataaaatgcctcccgtcaaagaaaagcccaggacctgatgccttcactgccacattctctcaaacatttaaagaactaacaccaatactctgtaaactattccaaaaattgaagagaagggaatacttccaaactcaatctatgaggacagtattaccctaatacaaaatcagacaaggacacaaccaaagaagaaaactacaggccaatatccctgatgcacatagatgcaaaaatctcaacaaaatattagcaagccaaattcaacagcacattaaaaataccattaaccatgatcaagtaggattcatcccaggtatgcaagaatgattcaagaatatggaaacccagctgggtgcggtggctcatgcctgtaatcccagcactctgggaggccgaagtgggcagatcacctgaggtcgggagttcgagaccagcctgaccaacatggagaaaccccatctctactaaaaatacaaaattagccgggagtggtggcgcactccagcctggacatcaagagtgaaactctttctcaaaaaaaaaaaaaaatggaaaccagtaaacttgatatatcacattaacaaaatcaagcacaaaacccatgtggttatttcaaaaatcagtagcattttatacaccaatagtaaactatatgaaaaagaaagaaagaaggcaatcccatttataacacctaaaaaaatacataggagtaaattcaaccaaggaggtgaaagatctctacaattaaaagtataaaacattgatggaagaaattgaatgaaaagatattttatgtacaagaa

SEQ ID NO: 460249 - DNA, 1408 bp, Homo sapiens
  misc_feature (3)..(3): n is a, c, g, or t
  misc_feature (5)..(5): n is a, c, g, or t
  misc_feature (7)..(7): n is a, c, g, or t
  misc_feature (9)..(10): n is a, c, g, or t
  misc_feature (14)..(15): n is a, c, g, or t
agntncntnnatgnngggaaacggcgggtgaaggcctggtgcatccaggtgaacagacagtctcacggactgcgaggcgcttgccagagcccagcgccgcagctcggagcacccccgcggtgcgggcagtcccgggacggtgccggctctttgggctggagctccgcaggctctttccgcccgtctgggccatgcagggccgggtagggccgggctgagtctactgagccggccgcgccgcgggggaaggagtttccggcggactcggctaggtgccgcttcctgtccccttctccgcgctgcctcacggtgcctgcacgggacgccgctcgatccccgagccccctcgccgtccccgacagcccccccggcgccatgcaatcccggcttctactcctcggggcacccggaggccacggcggcccggcctcgcggcgcatgcggctgctcctgcggcaggtggtgcagcgcaggccgggtggcgacaggcagcggccggaggtcagactgttgcacgccggctcgggggccgacacaggtgatacagttaatattggagatgtatcctacaagttgaaaattcctaagaatccagaacttgtgccacagaactacaatttgcctctaggcccagcaggtaatttgagtgtaaactcaggagcctattcatatccaccaaatccacactatacagcctggtgtccagggtacacagcagagataggagtttgcagaaaaggaatcttagaatataggatcaagctctttgggattattttgacatcggtttattattatgtggactcctggaaggagctgaccaaacgggaggtcgaatacattgccctgtcaagggacaccactgaaactgatctcaaacagcgacgagagatccgtgcaggcacagccttttacattgatcaggcaagttctgtcacactctagcccatgactgtgtactccaggtctatacaagattgatttttaaagtagaaagagagtagctcatataacagtaaaagattcaaagttcttacattaaaatgcaaattaaaaattttaaataatttatagtcaaattttaaaacaaagaatagaattatcagatataattttatagtataattttaccagggaatttttaaagagctctttgtgctcatgtacattacctataaatggtaatagcttcctcagtacttttacaccgtagctattttgagtaaatttgaagctttatggactctatttttattaaataatgactacattaataatagtttatattttagtaggttcagttactttaaatttttttttgcagtactgctttgactcttaaactgttacactgtataataccccttgaggatattctaattttgtaaatgaggacaaagacatccag

SEQ ID NO: 460250 - DNA, 650 bp, Homo sapiens
  misc_feature (3)..(3): n is a, c, g, or t
  misc_feature (5)..(5): n is a, c, g, or t
  misc_feature (7)..(7): n is a, c, g, or t
  misc_feature (9)..(10): n is a, c, g, or t
  misc_feature (14)..(15): n is a, c, g, or t
agntncntnnatgnngggaaacggcgggtgaaggcctggtgcatccaggtgaacagacagtctcacggactgcgaggcgcttgccagagcccagcgccgcagctcggagcacccccgcggtgcgggcagtcccgggacggtgccggctctttgggctggagctccgcaggctctttccgcccgtctgggccatgcagggccgggtagggccgggctgagtctactgagccggccgcgccgcgggggaaggagtttccggcggactcggctaggtgccgcttcctgtccccttctccgcgctgcctcacggtgcctgcacgggacgccgctcgatccccgagccccctcgccgtccccgacagcccccccggcgccatgcaatcccggcttctactcctcggggcacccggaggccacggcggcccggcctcgcggcgcatgcggctgctcctgcggcaggtggtgcagcgcaggccgggtggcgacaggcagcggccggaggtcagactgttgcacgccggctcgggggccgacacaggtgatacagttaatattggagatgtatcctacaagttgaaaattcctaagaatccagaacttgtgccacagaactacatttcagactctctggctcaatctgtagttcagca

SEQ ID NO: 460251 - DNA, 2289 bp, Homo sapiens
ctgtttccccaggctgctccccttgactgctatacgaggatgcctttcatcgtcagggcccctgtgtccactgctgtgacatttggtgaggaacagctcccttcctggagccaaagagcattcattgtctggccacaggaaaagcacgccacatgtcccctgacgacctgaagatgaatcctgactgcctggacatgcctgggcgggtgtacccatggcctgtggttgaaccagccacaccttgtctcttggccagaggctgccctgaggctgagggctgtgagtcctgggatctgctggggaagtccaaggcatatcgcaccagctgcccctagctgctgcctgcagctggaggccacaggccccccatgttgaagaagtgtcaccttcaaagggaggtcaccatgcagcagcatcatggctggaaaggaccagaggggaagtcacagggcagcagcagtttcctaaactcatcctttgccttctttctgagcctggcccttatctcctccaaggagacacaaaagcgcagcctcatcaccagccacatggtgatgcttccgaagagcctcctggtagctcaaagtgggatcaaagtgccccagggcgggcagcattgcagcgagacacggaacaacctcccgggcagtatgtgcaggagctcggcacttgctgggggcctcagcaagtcatttcgagagagcacagctgtcctctgcttgggggtttgcgacacagggcaacgggagtggctgaatatgcaacagcaaaggagactgcagccgtggagtcagggtcagggcaccgcagtcctcattctaaccaacgccactgacaagcagtgtgaccttgggcaagtcactctacctctctgagcctcagtttcctttcctgcaaaatgtcaataataaaaatacagttcctacctggaaggttgtttctgtgcataaatgttgtcagctgtcaaaatcataaaattcatggctgctccatcccagatcaagtgaatcagaatctctgggggatgggaccaggtctggttggtgttttttgtttgtttgttttgttttgttctgtttttgttttttaggtatcctgggtaatttttgttttctggttgtaaatatgaagactttttaaaaattttattttactttaagttccgggacacatgtgcaggtttgttacatagaaatttgaattgttctattgtcttttggcttctaatggggagagactcaatgccattataatcttggtcctttgcatgtagatatttcccctctttcctagtgggaagcttgtagaattttgtctcagtctgaaatgtaatcatcacatgccttcatgtaggtgtgctttcatccattatgctggtacctggtaagccttttcaatcggaagctcaaggccttcgtcttgaattatttctttgatgttttcttcctctgttttttctgttctgtcattctggggtgcctattattttcatgctggacttcttgaagttgtcccctcattttctgtatttttctttaccgtttgctctgcttatctttaacttctaagtcttctattgagtttatttctgctatcttaaggttatttttggttcactaaatgtttctttttttaaaaaacagtgtcttgttcagatttcctggagttaatatttttgctattctctttgaaaatctaaaactgaaaaattagtggttcctcctcctccaaagattttccctccctgcagtttgttttcttcaagttgtttttatatacttgatttttttttttttttggtctgtctttcgtgtacaaagttttacttcgctatcctggcaacccttgcctatccagtcatatttaaaattatgtactaagatgctgactgggcactctgattgcaggagtggtcttatcaagtgcaggcctcactggatgacagtgatgttcaatttttgctgcatgttggaatcacctggggagcttttattttttaggagagggagcttttcaaacccggatgtctgggccctccccagattaattaaatcagaatctctggagggtggggctctgggattggtattttttaaagctcccagagtggttctaattgcagtcagttgagaacgttgctccagggtgattgagttcagctgttttgagaaacaaccataacagtagaaacgtaagtagactctggaaacttgtagtcgtacctgtcaagtatggtatactgattcccaccctctaaaatagaaaatgtgggaaataatacagagtggg

SEQ ID NO: 460252 - DNA, 2170 bp, Homo sapiens
tgcactctggtactaacagacatgatgctgctgcatggtgacctccctctgaagatgaatcctgactgcctggacatgcctgggcgggtgtacccatggcctgtggttgaaccagccacaccttgtctcttggccagaggctgccctgaggctgagggctgtgagtcctgggatctgctggggaagtccaaggcatatcgcaccagctgcccctagctgctgcctgcagctggaggccacaggccccccatgttgaagaagtgtcaccttcaaagggaggtcaccatgcagcagcatcatggctggaaaggaccagaggggaagtcacagggcagcagcagtttcctaaactcatcctttgccttctttctgagcctggcccttatctcctccaaggagacacaaaagcgcagcctcatcaccagccacatggtgatgcttccgaagagcctcctggtagctcaaagtgggatcaaagtgccccagggcgggcagcattgcagcgagacacggaacaacctcccgggcagtatgtgcaggagctcggcacttgctgggggcctcagcaagtcatttcgagagagcacagctgtcctctgcttgggggtttgcgacacagggcaacgggagtggctgaatatgcaacagcaaaggagactgcagccgtggagtcagggtcagggcaccgcagtcctcattctaaccaacgccactgacaagcagtgtgaccttgggcaagtcactctacctctctgagcctcagtttcctttcctgcaaaatgtcaataataaaaatacagttcctacctggaaggttgtttctgtgcataaatgttgtcagctgtcaaaatcataaaattcatggctgctccatcccagatcaagtgaatcagaatctctgggggatgggaccaggtctggttggtgttttttgtttgtttgttttgttttgttctgtttttgttttttaggtatcctgggtaatttttgttttctggttgtaaatatgaagactttttaaaaattttattttactttaagttccgggacacatgtgcaggtttgttacatagaaatttgaattgttctattgtcttttggcttctaatggggagagactcaatgccattataatcttggtcctttgcatgtagatatttcccctctttcctagtgggaagcttgtagaattttgtctcagtctgaaatgtaatcatcacatgccttcatgtaggtgtgctttcatccattatgctggtacctggtaagccttttcaatcggaagctcaaggccttcgtcttgaattatttctttgatgttttcttcctctgttttttctgttctgtcattctggggtgcctattattttcatgctggacttcttgaagttgtcccctcattttctgtatttttctttaccgtttgctctgcttatctttaacttctaagtcttctattgagtttatttctgctatcttaaggttatttttggttcactaaatgtttctttttttaaaaaacagtgtcttgttcagatttcctggagttaatatttttgctattctctttgaaaatctaaaactgaaaaattagtggttcctcctcctccaaagattttccctccctgcagtttgttttcttcaagttgtttttatatacttgatttttttttttttttggtctgtctttcgtgtacaaagttttacttcgctatcctggcaacccttgcctatccagtcatatttaaaattatgtactaagatgctgactgggcactctgattgcaggagtggtcttatcaagtgcaggcctcactggatgacagtgatgttcaatttttgctgcatgttggaatcacctggggagcttttattttttaggagagggagcttttcaaacccggatgtctgggccctccccagattaattaaatcagaatctctggagggtggggctctgggattggtattttttaaagctcccagagtggttctaattgcagtcagttgagaacgttgctccagggtgattgagttcagctgttttgagaaacaaccataacagtagaaacgtaagtagactctggaaacttgtagtcgtacctgtcaagtatggtatactgattcccaccctctaaaatagaaaatgtgggaaataatacagagtggg

SEQ ID NO: 460253 - DNA, 1738 bp, Homo sapiens
tactgacgtcagctcactgtctccatagccggcagccctgggagctgaactcactagatcaatgaaaacatcaaccatgccagacgtgcctgccctgctccaagcctgccaaggagccaggggttcaggtgcagagccgggccatctgtcattaggctctgctgttaattgctgtgctaatgaacaagtcatccatctactcaacaaatactggcttggtcgtggccaccatgtcaaatgccagggctccagagatgacaacaacagggtccctaccctcaggggatcatatcctaccaggggagatagagaggtgaacaaacaggacaaatacaggttgacaagtgctaagagagaagtcagaggctgtgggaacagagaggaggagtatctaaccagcctggagtatctggaagacttcctgaaggaggagaaaacacctgggctaaatcttaaaggaagaccagaagctacccagggaaagaagtgaaggaaggcattataaacagagaggccaggagattccagcctcagcattcccagagaaggcccaggatctccctgagaggcccagttggtgtttgtggaatcatcactcctctggtgatcacgcagtttgcctcactttctaccatggagctctttgctaaaggacattctcctccagctgtgaaggaaaagcccaacaaaaggcagggtactttgttctaactgaggatgtctactgacacagccaagctgtaaagcagaccacggacggcagtgcagcggggagaacaactctacatctggttggaggtggagtaatgtccagtctgggcacagagagatggcaggtgtgcagctgcactcagcatgggatagagcaccacctgccaggccagaacagaaagaagggcgacggagactggcagagaaacagcaattactgctcagtgagaagtaaacagcgtctgcttccagaggctttacggaccagaaagcccacaggaaatagctcctgcttcccagcctggaggtcctcatgcactagccctccctgctgcaattttgatggtttttcgcatatttacagaattgtgcaaccatcaccatgatcagtcttagaagagttaatcacccctgaccccagaaaactctgtattcattagcagtcactccctttcccctttccacccctctccaacattaggcaaccactaatctactctctgtctccataaactggtctattttggacatttcacataagcctccctggatcccagtttaagcatcctggggtttgtctgcctgccagagccatggtgccactggggctacctgtcctgtgggatgacaaggcaggtccaaacctttgcctgctctcccatccattccttttgtgttagtccatgtgtctcccgactgttctctccaacaacaacacagactgacaaaacctactgacttggagtcaggaacagactttgctattttctggctgtgtgatcctgatgagtcccttgaacctcctggacttgttcctcagcctaaaaaccaagactaataaatcaagtctatctcacagccttacgtggggatcaaaaaacatggagcatgtgaacacacattgtacatcacgaagctgtgtgcaaataaatatcgtgtaactccagccctttttgagtttataaataaaagtgaaaacctcataaccctaagtcctccccttccttgcctctattcctctgtgctc

SEQ ID NO: 460254 - DNA, 1986 bp, Homo sapiens
tactgacgtcagctcactgtctccatagccggcagccctgggagctgaactcactagatcaatgaaaacatcaaccatgccagacgtgcctgccctgctccaagcctgccaaggagccaggggttcaggtgcagagccgggccatctgtcattaggctctgctgttaattgctgtgctaatgaacaagtcatccatctactcaacaaatactggcttggtcgtggccaccatgtcaaatgccagggctccagagatgacaacaacagggtccctaccctcaggggatcatatcctaccaggggagatagagaggtgaacaaacaggacaaatacaggttgacaagtgctaagagagaagtcagaggctgtgggaacagagaggaggagtatctaaccagcctggagtatctggaagacttcctgaaggaggagaaaacacctgggctaaatcttaaaggaagaccagaagctacccagggaaagaagtgaaggaaggcattataaacagagaggccaggagattccagcctcagcattcccagagaaggcccaggatctccctgagaggcccagttggtgtttgtggaatcatcactcctctggtgatcacgcagtttgcctcactttctaccatggagctctttgctaaaggacattctcctccagctgtgaaggaaaagcccaacaaaaggcagggtactttgttctaactgaggatgtctactgacacagccaagctgtaaagcagaccacggacggcagtgcagcggggagaacaactctacatctggttggaggtggagtaatgtccagtctgggcacagagagatggcaggtgtgcagctgcactcagcatgggatagagcaccacctgccaggccagaacagaaagaagggcgacggagactggcagagaaacagcaattactgctcagtgagaagtaaacagcgtctgcttccagaggctttacggaccagaaagcccacaggaaatagctcctgcttcccagcctggaggtcctcatgcactagccctccctgctgcaattttgatggtttttcgcatatttacagaattgtgcaaccatcaccatgatcagtcttagaagagttaatcacccctgaccccagaaaactctgtattcattagcagtcactccctttcccctttccacccctctccaacattaggcaaccactaatctactctctgtctccataaactggtctattttggacatttcacataagcctccctggatcccagtttaagcatcctggggtttgtctgcctgccagagccatggtgccactggggctacctgtcctgtgggatgacaaggcaggtccaaacctttgcctgctctcccatccattccttttgtgttagtccatgtgtctcccgactgttctctccaacaacaacacagactgacaaaacctactgacttggagtcaggaacagactttgctattttctggctgtgtgatcctgatgagtcccttgaacctcctggacttgttcctcagcctaaaaaccaagactaataaatcaagtctatctcacagccttacgtggggatcaaaaaacatggagcatgtgaacacacattgtacatcacgaagctgtgtgcaaataaatatcgtgtaactccagccctttttgagtttataaataaaagtgaaaacctcaaaagaaaaaaaaaaaaaaaagaaaaaaacactttggggcggccggggcccttggaaaggttttcgaagacacaagtacgaggggcgcacgggccccagaagggtagcagaaccggggaccataaggatcccgaggggaacaccggggcaggagaaaagcgaccaggactaccaccaaaaacaaacggcccggggggaacacaagggttcgagaaaaatcccgacggacacgagagcaaagcggggaaccacgaacgaaggtccgagagactccaaatcaataggccgcgcgg

SEQ ID NO: 460255 - DNA, 484 bp, Homo sapiens
ccaagactataaccacagctgaaatctaaggtttctgatggagaagaagaccttagtaatttggtttttgttttgtttcatagaaagaacactgaccataagatctgccctcttaacacatttttaagagcgtgatacaggattgttaacaataaggaacatggttgtttgtttttctcttaattgcttttttattacgaagctaaatgatttttaagagcgaaatttgaatataaagaaaataatagggcttttgacttttctactacaagaaggtggcttcctcaaggcatatgattgcaatccaagcgatgctatttccagatggtaaacaaccctcttttttacaatcatgttgcctacaagtctaggcagacaacccttggtacttacatacaccaggtactagagaaaagctggaaaatgcagccagtggtctcaaggctttcaaaaatgagaccttaataaagagttaatatgaact

SEQ ID NO: 460256 - DNA, 1434 bp, Homo sapiens
aattatgttttcacttgggccataaagacatttgggctaagtcacaggaaataggacgctgataaatgaggactgcagtttcttctcttgaaccattgaataccccccgcaggaagtacacgggagaaaataggagggagattgtttgcggagggctgcagctgagcaaaagaacactgaccataagatctgccctcttaacacatttttaagagcgtgatacaggattgttaacaataaggaacatggttgtttgtttttctcttaattgcttttttattacgaagctaaatgatttttaagagcgaaatttgaatataaagaaaataatagggcttttgacttttctactacaagaaggtggcttcctcaaggcatatgattgcaatccaagcgatgctatttccagatggtaaacaaccctcttttttacaatcatgttgcctacaagtctaggcagacaacccttggtacttacatacaccaggtactagagaaaagctggaaaatgcagccagtggtctcaaggctttcaaaaatgagaccttaataaagagttaatatgaactgagtgtttatccttgagcagggtctctctgaggttggccaaggatgggctaccgccactgaaggaggagaagggggatctgcttccaagatggtgtgctcactgggctctgaacgcttgcatgtcctcgtgacatggcccctgacttctcccagagggagtgatccccagagagagcaagaaggagactaccctgacttccacgacctagtcacagaagtcacacaccattgcttctgccatgctttatttcttaggagtgagtcactgagtctggcccacactcaagggggaggaattagttttcacctcttgaagggtggaacatcaaataatgcattatattttaaagccaccagagatctctttagaaaatggggctccacattggcctgtggggctagtgagctggtgaagggctccgcctccacccccgaggcgggaggcacctgcggaaactcagcgaggtcacacgatgtgcacatctccacttgacatgagacaccatggagatcaggggccatagtgttttccctcctccctgtgcttttagcagtttctagtcatttccttgtcatcctcacattgctatgaacacttagtaatgtgaacacaaacctcccagtggactcacatgctcagagggcactcaagactgggggaagcaatgcaatcacagcagcataaatattcatgaagtctgggagcctcaagacagaaactaggtcaccagggcctgctagtctggaggagctggtgtgctccctttagtgtgcatgtgaatgaagacaccgtcagagatattcctaggggccacaaattctcctgcatccttgcttgctcctccgaagggagggtcagatgac

SEQ ID NO: 460257 - DNA, 1488 bp, Homo sapiens
gcgcagccttaagagctgtaacacacaccgcgaggtggccattctaactggagtgagaggtctcattgtggttttcattgcatttctctggtgattagtgatgttgggcatttccttactggccatctccacagaaggcagaactctcattttggaaggtttggaaaaggcagagaggaatgttttgcctgttttgaacaacttgctggaaaacagagagatgcagcttgaagatggacgcttcctgatgtctgctgagcctttgactgacccttgtgtttacggtgtgcgagtgaaaagggtgttgttccaagaagatggagtagtgttggtgaagcagcatcatgtgtttggagagctgcagttgggagatggattggagcacagggatcataccaaaaaagagttggattcttggaaaattgtccgagttagtgaaaatttccgagtgattgccttgggcttgccagtgccaaggtattctgggaatccattagacccccctcttcgttctcgatttcaagccagggatatttattatttacccttcaagaaagacctacagcaattgctgttggaagagaaagctaggaggcacaagagagaatgcaaacagatctgaggggatctgatagagtacagacattgtccactacagtttcacaaagggcatggcggtcatgtctggagtgataaaaggcccaggaagtcaaagcacaggcaaatgtgtttaatcacaaaagggcctagtatctttggagaatgagaataagttgtatccctaaagcaagtgtgtgtggtagagggagaagtcagaccgctattgtgaaatgttttgcatgatgaatgaagtttcctggattttatgatatggaaaaagtggcttatcagacaatattaagttggtgggctatgaatgtgaccagacttatgttggaggaagacacctttgttggaagtgagggaatgactaggaagcttttgtaacactcagtgagaccctgtggaggagggcaccatccaagatagtgggaatactatcttaggcaagagacttatttttaaacttgtatgtatgtatgtatgtatgtatgtatgtatgtatgtatgtatatatgtatgtttcatgtgagtcagggagcctaggtattgttgacattgttctatacatccagaacagaatttctcctcctgtttatcaaatcttatacttttatcaaatctttttgtttttgcttagaacattttattttgaaaattcttatgaaatcttttgtttttgcttagaacattttactttgaaaattctcaaatgtaaaaaaaagttgaaaaacagtaaaacattcataatcccctcacctacaatcacccattattaatatattgccacatttgtttgcatgtgcttttttctttttttttttcctgaaccatttggaagtaaattgcagtcagtactcttaaatacttcagtgtgtgtatcagttc

SEQ ID NO: 460258 - DNA, 2395 bp, Homo sapiens
  misc_feature (5)..(7): n is a, c, g, or t
  misc_feature (12)..(14): n is a, c, g, or t
tttcnnnaaacnnnagacacccccaaaacacacaatctaagtcaaataatctctgcaaatgcaacctgcagacaagtcccccaactcttcctggaagagacagattctggaggcgcagaggcactgccaagggggccgcaacagaccccgaaagaccttgcgagcctgccatgtcccggtccggaacgccgcacgcggggcggggcggggcacatgcgcacgcgcggccccgcctcccaggcgtggggcggggcgggcgccggggcggggccgtgacgtcagttgcgcgcgtggctctggctgcgcaggaacagctggtgcctccgagggcggtcggcgagcgcgcgggcgtggggcgctggggggccggtcgggcagcgctgcgggagcagccgccggcaccgccgccttgcaccatcgcatcatgtccgggcagctggagcgttgcgagcgcgaatggcacgagctggagggagaatttcaagaactgcaggtagggccaggccacctggtcccgcaactctgctgcccgcggtgcagcgccttgcccttcctgagccccccggcccgggcggtggggacagtcagggcctagggagtgccccggagaggccctgggggcggacgggaggcatggaccagccccctcccatcacccggcgcttcagctcttcgtccacgtggggcgccgggtcgcagccccctcttccgccgccctcccactggctctctgctccacgcacccccttcgctgcagaaagttggtctgtggcctctgaggcaagttccaggcgtgttcatctgtgggggtggttcaaagagaacagcccagcccccacctctgcagggtctccccagatctcaccccgccccctcccatctgcttttggtagctcagctcccaccccgtgctctggcggggcagcactatcctgcagctctgttttgggaggtgtacttaagagctgttcaccttgaacctctaggttgtgcttggggattagggacccctatttcctgtctttgggggctctgacgctgctgcaggctgattttggcgtggagagcatctgtcagttcggacagctgagtagcctcacccagtgataggggaaactcccagctctatccttctggcccggagccttacacggggtggagtgagggcgggtgtaaggcgggggtcccctgagagaatggcattgctgctggtcacgggattgtttttcggggggttggctttgcctgaaattacattgcacactatcaccccagtcctctcatttggagcagtgacattgtccctgtccatgtacctctttgatgcaagggccttgaaggccatggtaaagattttggcttttactgctaatgacatgtacatccgtctggctgctgtgtatagaatagacatcagggagacaggctcgaagcaagaagatcagcattatttcattaataaccctatgaaattgatcctagaatctctgttttacagagtcactgtggcactgattggccaggtcacggtcacatatctgctcctgaagcctaaaagtgggatcagtgccaccacactacatgaaacgagttggggagggatggtcccatgaaggaaaatcaaaaagctgggttatgggatccagtttttcggacccaaggagtattatgagggtgactggtgtggcagccagcgcagtgatgtgggccgcatgtattacagcaacggcgacatctacgagggacagtgggagaacgacaagcccaacggggagggcatgctgcgcctgagtcaaaatcctagaccctgatggtgtgctggcggagccttggccatgttcaggaagacagaggaaggagattgatgccagagaacacaaacgcttcaggagaaattcaagcctgtgtcacccgatcgctcagaccagtgcggctctggctggaggagtcagcagcagctccaggcatgaccccggcaccctcatagggcccctcactacccccagcactgggtcatttcttgccaataggaaggctggtgcttctctcccaggctgtcctcgggaccctcttcattctctgatctcatcctggaatgcatgagaataaagaataaccaagtggtataagcctgggcctatgggataaggatggggcactcgagggggctcagcagggctttcaggtttagaagagggaagacctgccttggctgggctgcctgggtttagcttgggggagtaagggcaggtcttaggccgggtgcagtggctcattcctgtaatcccagaacttgggaggccaaggtaagaggactgcctgaggccaggagttcgagaccagcttaggcaacatagcaagaccctgactctacaaaaaaaaattttaaaatata

SEQ ID NO: 460259 - DNA, 671 bp, Homo sapiens
atgcgggacgatgatcgactttggccgtgacgaggcccctgagcccactcagttccccattcctgaggtcaaaatcctagaccctgatggtgtgctggcggagccttggccatgttcaggaagacagaggaaggagattgatgccagagaacacaaacgcttcaggagaaattcaagcctgtgtcacccgatcgctcagaccagtgcggctctggctggaggagtcagcagcagctccaggcatgaccccggcaccctcatagggcccctcactacccccagcactgggtcatttcttgccaataggaaggctggtgcttctctcccaggctgtcctcgggaccctcttcattctctgatctcatcctggaatgcatgagaataaagaataaccaagtggtataagcctgggcctatgggataaggatggggcactcgagggggctcagcagggctttcaggtttagaagagggaagacctgccttggctgggctgcctgggtttagcttgggggagtaagggcaggtcttaggccgggtgcagtggctcattcctgtaatcccagaacttgggaggccaaggtaagaggactgcctgaggccaggagttcgagaccagcttaggcaacatagcaagaccctgactctacaaaaaaaaattttaaaatata

SEQ ID NO: 460260 - DNA, 1063 bp, Homo sapiens
tgatttagaaggactaatagggccatggtattcaggatagatttgaagagggagaggctagctctatacctgtgtgccctcccctcacgcacatgcacctgctcacacatgcacataggcccccagtacctagcaaactgtcaggctactgtatggcacctaaattataatgtccttcgggaattatatctgcctttgcatgttttagtggccctgccccaattatcataccatcttggtgaaaacaatgtctggctagtagttccatggcaccaacattgtgccatagttggccaagcatttaatggtctatgggtcatgaggttggggggtgctggtgttggtgatgcacacacggttactttgccctggattctcccctctgtcaatattgacctgcctctgtttcccctagggacatggttgggcaggtaccggatagatgctgtcactgctgaaaaagaaaaaaatatccaaagtattcacgttgtacctgctgagtgccagtactgcatgctctggggattccattcctgcccctatggaagaggggtcaacttttccaaaacatcatcttctagaggaagaagctgaagcccagcaaggaaaagtaacataacgaagatctcagcagaatgacggttatctgagcatctatattctggggttgcaaaaagaacaagaacgtagggttcaatggacctgagttccaggcctcactctgtcaccagctgactgtaagaagcccacccacctccaccttctctagatcacatgttttatggccgcctcaaaggcgtgaagcaggtgagtcgtgctgcctctgccaacatctgctttgtgagcctgggagtatttcacggagatgtttctctcgacaggtttatggctggtcttggctcagtgccttgaaaacactgatcatgtgatgaaacgagaatgtcatgctgcgggccatcaataaaccacactggcattcccgctcccaccccgacaccactccacccatgcaatttccctccccttcagcctcctccctccccacctcccaaagatatccaga

SEQ ID NO: 460261 - DNA, 706 bp, Homo sapiens
acatttccaccatttcccgcctcaccatgcctcagaggactacaggctccccaagacgggacatggttgggcaggtaccggatagatgctgtcactgctgaaaaagaaaaaaatatccaaagtattcacgttgtacctgctgagtgccagtactgcatgctctggggattccattcctgcccctatggaagaggggtcaacttttccaaaacatcatcttctagaggaagaagctgaagcccagcaaggaaaagtaacataacgaagatctcagcagaatgacggttatctgagcatctatattctggggttgcaaaaagaacaagaacgtagggttcaatggacctgagttccaggcctcactctgtcaccagctgactgtaagaagcccacccacctccaccttctctagatcacatgttttatggccgcctcaaaggcgtgaagcaggtgagtcgtgctgcctctgccaacatctgctttgtgagcctgggagtatttcacggagatgtttctctcgacaggtttatggctggtcttggctcagtgccttgaaaacactgatcatgtgatgaaacgagaatgtcatgctgcgggccatcaataaaccacactggcattcccgctcccaccccgacaccactccacccatgcaatttccctccccttcagcctcctccctccccacctcccaaagatatccaga

SEQ ID NO: 460262 - DNA, 1509 bp, Homo sapiens
ggattagtgtttatatgcggcaagtactgcagttagttaataatgtcaagatcattgagcttccctaatgaaagagatacacaacatcaactctccatttcacaggatttcaggggagaaacggtggattttcacaagagccgcaaaactgccggttctgtgaaaaagaaattgcttcagcagctggaatccaggaggacaaataggtacactgattatatcttcattgttcaccagagccacagcactcactatcattcatcctcacctagccacgaattctgcccttttattcaacagccatcatcttcagtcttgagctgctctttgggccaggagtgggccaatgtggaggccatatgcctgcttcccccttccctttctcaggactctgcatccttaaaatacacccctgctatttgctcaactggatcccatctgagagaagagacccggacaagtcactgataggaagagtgaattggttgtcgccttttaattttttcagtgaggatgggaagagcttttattgacaaggctgtaatgcaaatgtgattctatcacaatgcgttattggcattcttattatctggctctgctgtaatcttgccctcagctccctccccaacctatcttcttttatcctttcactgattgttctagtagaaaaactgcagactacaatactctgtggattcatggttagaaatatatatccacacttctgattaaagactagatgcaacggattgtagtttcgtattttttcttccctccgtattgatcacatttttctcccgtcattgagagcaagagctaacatctatgggcacttcctatggctctgtgatgtcatttccttttgtagctattagttccctgcagcgtctgtactttactccacccaggctgcctgataacagatgtgatttccagctgtgtctatataccaaccatacacacagataatgaagctgttcacaatggcatgagagtacagaagagaaactagagcccatgaaaaggatgcttacctgccagagaactctgcaagtctgtgctgttggaagaaagagagaagtctatggaaagccctctcttatacacagagctgcatttttcttcttaggtgtgtgaagtacagaagacgcttatcaaagtaatgcattggacacatcaaaattgacaaacgacttacttaacaaaagatatttgaatgcatctgtttctacacttgtgtgatgccattccttctgccccactcttcacctgaataatttccatgggggctcagccatgttgaagcatgtatgtcaaactgatgtaagagtttgacagaaatgtatttgcatgaattgctgaagagcctcctgagagaatactcgtattagggtagaaagaatacaggtgctgaaatgagctcaacccattaacactatttattgaaataaaaaagtgattctgaggatagcatgagtttatcactagcagttgtctcattccaattcc

SEQ ID NO: 460263 - DNA, 271 bp, Homo sapiens
ctcatggtctgatcttgagtatcctgaagtccaggaagggcgtcctgaactccttcttcaacctggaatgctgtgtgagcggcacccacagcatggacctggtggccctggcaccctttggggagtataccgtgctgccggggctggactgcaccttttctaagtgcgtgcctgagcccctgccccgccagtcctcccaccaggctccccagggcaccggggctggctgagctccgctcttgcttgggtatgggagggacaggagaccatt

SEQ ID NO: 460264 - DNA, 1851 bp, Homo sapiens
agcggccgctcgcgatctagaactagctccagacctcccggctactcagaagccctcggactgcccggaccgcgcgatggagtcgaccggcagcgtcggggaggccccgggcggaccccgggtgctggtggtgggcggcggcatcgcggggctgggcgcggcgcagaggctctgcggccactccgccttcccgcacctgcgggtcctggaggccacggcccgcgccgggggccgcatccgctcggagcgctgcttcggtggcgtggtggaggtgggcgcgcactggatccatgggccctcccggggtaaccccgtcttccagctggctgctgagtacgggctgctgggggagaaggagctgtcccaggagaaccagctggtggagaccgggggtcacgtgggcctgccctccgtgagctacgccagctccggggccagcgtgagcctccagctggtggcggagatggcgactctgttctacggcctgatagaccagacccgggagttcctgcacgctgcagagaccccggtgcccagcgtcggggagtacctcaagaaggagattggccagcacgtggccggctggacagaggatgaggagaccaggaagctgaagctggccgtcctgaactccttcttcaacctggaatgctgtgtgagcggcacccacagcatggacctggtggccctggcaccctttggggagtataccgtgctgccggggctggactgcaccttttctaagggctatcaaggactcacaaactgcatgatggccgccctgccggaggacactgtagtttttgagaagcctgtgaagaccatccactggaacgggtccttccaggaggcagcctttcccggggagacctttccagtgtcggtagagtgtgaggatggagaccggttcccggcgcaccatgtcatcgtcaccgtgcccttaggttttcttagggaacatttggacaccttctttgaccctcccctgccggctgagaaggcagaagcaatcaggaagataggctttgggaccaacaacaaaatcttcctggagtttgaggagcccttctgggagccagactgccagctgatccagctggtgtgggaggacacgtcgcccctggaggatgctgcccctgagctacaggacgcctggttccggaagctcattggctttgtggtcctgcctgcctttgcgtctgtccacgttctctgtgggttcattgccggacttgagtctgagttcatggagactctgtcggatgaagaagtacttctgtgtctcacccaagtgctccggagagtgacaggaaacccacggctccccgcgcccaagagcgtcctgcggtctcgctggcacagcgccccgtacactagggggtcctacagctacgtggccgtgggcagtactgggggcgacctggacctgctggctcagcccctccctgcagacggcgccggcgcccagctccagatcctgtttgcgggggaagccacacatcgcacgttttactccacgacgcacggggctctgctgtcgggatggagggaggccgaccgcctcctcagtctgtgggccccgcaggtgcagcagcccaggccgaggctctagctgggcccagcctactctgttccacccgtgtcgggggtaggctgggaccgtcatttcttctgacagatttcagtctggcttgaaatttggggatgttaatgagggtcctctggtttttggtaaccagggccaccttctcagttcttgtgtctgttattggagtctggccagggttgacttgagctgagacaccagatgctcacggagatgctggacacataaagcaagttacagccaca

SEQ ID NO: 460265 - DNA, 1600 bp, Homo sapiens
tcgctccgcctccggcctcctccgagagctccagacctcccggctactcagaagccctcggactgcccggaccgcgcgatggagtcgaccggcagcgtcggggaggccccgggcggaccccgggtgctggtggtgggcggcggcatcgcggggctgggcgcggcgcagaggctctgcggccactccgccttcccgcacctgcgggtcctggaggccacggcccgcgccgggggccgcatccgctcggagcgctgcttcggtggcgtggtggaggtgggcgcgcactggatccatgggccctcccggggtaaccccgtcttccagctggctgctgagtacgggctgctgggggagaaggagctgtcccaggagaaccagctggtggagaccgggggtcacgtgggcctgccctccgtgagctacgccagctccggggccagcgtgagcctccagctggtggcggagatggcgactctgttctacggcctgatagaccagacccgggagttcctgcacgctgcagagaccccggtgcccagcgtcggggagtacctcaagaaggagattggccagcacgtggccggctggacagaggatgaggagaccaggaagctgaagctggccgtcctgaactccttcttcaacctggaatgctgtgtgagcggcacccacagcatggacctggtggccctggcaccctttggggagtataccgtgctgccggggctggactgcaccttttctaagggctatcaaggactcacaaactgcatgatggccgccctgccggaggacactgtagtttttgagaagcctgtgaagaccatccactggaacgggtccttccaggaggcagcctttcccggggagacctttccagtgtcggtagagtgtgaggatggagaccggttcccggcgcaccatgtcatcgtcaccgtgcccttaggtctgtccacgttctctgtgggttcattgccggacttgagtctgagttcatggagactctgtcggatgaagaagtacttctgtgtctcacccaagtgctccggagagtgacaggaaacccacggctccccgcgcccaagagcgtcctgcggtctcgctggcacagcgccccgtacactagggggtcctacagctacgtggccgtgggcagtactgggggcgacctggacctgctggctcagcccctccctgcagacggcgccggcgcccagctccagatcctgtttgcgggggaagccacacatcgcacgttttactccacgacgcacggggctctgctgtcgggatggagggaggccgaccgcctcctcagtctgtgggccccgcaggtgcagcagcccaggccgaggctctagctgggcccagcctactctgttccacccgtgtcgggggtaggctgggaccgtcatttcttctgacagatttcagtctggcttgaaatttggggatgttaatgagggtcctctggtttttggtaaccagggccaccttctcagttcttgtgtctgttattggagtctggccagggttgacttgagctgagacaccagatgctcacggagatgctggacacataaagcaagttacagccaca

SEQ ID NO: 460266 - DNA, 1511 bp, Homo sapiens
tcgctccgcctccggcctcctccgagagctccagacctcccggctactcagaagccctcggactgcccggaccgcgcgatggagtcgaccggcagcgtcggggaggccccgggcggaccccgggtgctggtggtgggcggcggcatcgcggggctgggcgcggcgcagaggctctgcggccactccgccttcccgcacctgcgggtcctggaggccacggcccgcgccgggggccgcatccgctcggagcgctgcttcggtggcgtggtggaggtgggcgcgcactggatccatgggccctcccggggtaaccccgtcttccagctggctgctgagtacgggctgctgggggagaaggagctgtcccaggagaaccagctggtggagaccgggggtcacgtgggcctgccctccgtgagctacgccagctccggggccagcgtgagcctccagctggtggcggagatggcgactctgttctacggcctgatagaccagacccgggagttcctgcacgctgcagagaccccggtgcccagcgtcggggagtacctcaagaaggagattggccagcacgtggccggctggacagaggatgaggagaccaggaagctgaagctggccgtcctgaactccttcttcaacctggaatgctgtgggctatcaaggactcacaaactgcatgatggccgccctgccggaggacactgtagtttttgagaagcctgtgaagaccatccactggaacgggtccttccaggaggcagcctttcccggggagacctttccagtgtcggtagagtgtgaggatggagaccggttcccggcgcaccatgtcatcgtcaccgtgcccttaggtctgtccacgttctctgtgggttcattgccggacttgagtctgagttcatggagactctgtcggatgaagaagtacttctgtgtctcacccaagtgctccggagagtgacaggaaacccacggctccccgcgcccaagagcgtcctgcggtctcgctggcacagcgccccgtacactagggggtcctacagctacgtggccgtgggcagtactgggggcgacctggacctgctggctcagcccctccctgcagacggcgccggcgcccagctccagatcctgtttgcgggggaagccacacatcgcacgttttactccacgacgcacggggctctgctgtcgggatggagggaggccgaccgcctcctcagtctgtgggccccgcaggtgcagcagcccaggccgaggctctagctgggcccagcctactctgttccacccgtgtcgggggtaggctgggaccgtcatttcttctgacagatttcagtctggcttgaaatttggggatgttaatgagggtcctctggtttttggtaaccagggccaccttctcagttcttgtgtctgttattggagtctggccagggttgacttgagctgagacaccagatgctcacggagatgctggacacataaagcaagttacagccaca

SEQ ID NO: 460267 - DNA, 1832 bp, Homo sapiens
tcgctccgcctccggcctcctccgagagctccagacctcccggctactcagaagccctcggactgcccggaccgcgcgatggagtcgaccggcagcgtcggggaggccccgggcggaccccgggtgctggtggtgggcggcggcatcgcggggctgggcgcggcgcagaggctctgcggccactccgccttcccgcacctgcgggtcctggaggccacggcccgcgccgggggccgcatccgctcggagcgctgcttcggtggcgtggtggaggtgggcgcgcactggatccatgggccctcccggggtaaccccgtcttccagctggctgctgagtacgggctgctgggggagaaggagctgtcccaggagaaccagctggtggagaccgggggtcacgtgggcctgccctccgtgagctacgccagctccggggccagcgtgagcctccagctggtggcggagatggcgactctgttctacggcctgatagaccagacccgggagttcctgcacgctgcagagaccccggtgcccagcgtcggggagtacctcaagaaggagattggccagcacgtggccggctggacagaggatgaggagaccaggaagctgaagctggccgtcctgaactccttcttcaacctggaatgctgtgtgagcggcacccacagcatggacctggtggccctggcaccctttggggagtataccgtgctgccggggctggactgcaccttttctaagggctatcaaggactcacaaactgcatgatggccgccctgccggaggacactgtagtttttgagaagcctgtgaagaccatccactggaacgggtccttccaggaggcagcctttcccggggagacctttccagtgtcggtagagtgtgaggatggagaccggttcccggcgcaccatgtcatcgtcaccgtgcccttaggttttcttagggaacatttggacaccttctttgaccctcccctgccggctgagaaggcagaagcaatcaggaagataggctttgggaccaacaacaaaatcttcctggagtttgaggagcccttctgggagccagactgccagctgatccagctggtgtgggaggacacgtcgcccctggaggatgctgcccctgagctacaggacgcctggttccggaagctcattggctttgtggtcctgcctgcctttgcgtctgtccacgttctctgtgggttcattgccggacttgagtctgagttcatggagactctgtcggatgaagaagtacttctgtgtctcacccaagtgctccggagagtgacaggaaacccacggctccccgcgcccaagagcgtcctgcggtctcgctggcacagcgccccgtacactagggggtcctacagctacgtggccgtgggcagtactgggggcgacctggacctgctggctcagcccctccctgcagacggcgccggcgcccagctccagatcctgtttgcgggggaagccacacatcgcacgttttactccacgacgcacggggctctgctgtcgggatggagggaggccgaccgcctcctcagtctgtgggccccgcaggtgcagcagcccaggccgaggctctagctgggcccagcctactctgttccacccgtgtcgggggtaggctgggaccgtcatttcttctgacagatttcagtctggcttgaaatttggggatgttaatgagggtcctctggtttttggtaaccagggccaccttctcagttcttgtgtctgttattggagtctggccagggttgacttgagctgagacaccattatctgggcgaacacaagtccgc

SEQ ID NO: 460268 - DNA, 494 bp, Homo sapiens
gtggggaacagaggctcacgcctgtaatcccagcagtttgggaggccaaagtgggaggactgagccagggaggtcaaggctgcagtgagccctgatcatggtgctgcatgcactctagcctgggcaacagagcaagaccctatctcaaaaacaaggacaaaaaagtaaaactgcttgtgtgaatgtgtctgtaggataaacaccagcaggggaaattgctggatccaaggtctggacagacaggacttccgtggagggctttatgtgatgtaagaagagtccaattctgaattccaggttttcttagggaacatttggacaccttctttgaccctcccctgccggctgagaaggcagaagcaatcaggaagataggctttgggaccaacaacaaaatcttcctggagtttgaggagcccttctgggagccagactgccagctgatccagctggtgtgggaggacacgtcgcccctggaggatgctgcccctgag

SEQ ID NO: 460269 - DNA, 2463 bp, Homo sapiens
tcgctccgcctccggcctcctccgagagctccagacctcccggctactcagaagccctcggactgcccggaccgcgcgatggagtcgaccggcagcgtcggggaggccccgggcggaccccgggtgctggtggtgggcggcggcatcgcggggctgggcgcggcgcagaggctctgcggccactccgccttcccgcacctgcgggtcctggaggccacggcccgcgccgggggccgcatccgctcggagcgctgcttcggtggcgtggtggaggtgggcgcgcactggatccatgggccctcccggggtaaccccgtcttccagctggctgctgagtacgggctgctgggggagaaggagctgtcccaggagaaccagctggtggagaccgggggtcacgtgggcctgccctccgtgagctacgccagctccggggccagcgtgagcctccagctggtggcggagatggcgactctgttctacggcctgatagaccagacccgggagttcctgcacgctgcagagaccccggtgcccagcgtcggggagtacctcaagaaggagattggccagcacgtggccggctggacagaggatgaggagaccaggaagctgaagctggccgtcctgaactccttcttcaacctggaatgctgtgtgagcggcacccacagcatggacctggtggccctggcaccctttggggagtataccgtgctgccggggctggactgcaccttttctaagggctatcaaggactcacaaactgcatgatggccgccctgccggaggacactgtagtttttgagaagcctgtgaagaccatccactggaacgggtccttccaggaggcagcctttcccggggagacctttccagtgtcggtagagtgtgaggatggagaccggttcccggcgcaccatgtcatcgtcaccgtgcccttaggttttcttagggaacatttggacaccttctttgaccctcccctgccggctgagaaggcagaagcaatcaggaagataggctttgggaccaacaacaaaatcttcctggagtttgaggagcccttctgggagccagactgccagctgatccagctggtgtgggaggacacgtcgcccctggaggatgctgcccctgagctacaggacgcctggttccggaagctcattggctttgtggtcctgcctgcctttgcgtctgtccacgttctctgtgggttcattgccggacttgagtctgagttcatggagactctgtcggatgaagaagtacttctgtgtctcacccaagtgctccggagagtgacaggaaacccacggctccccgcgcccaagagcgtcctgcggtctcgctggcacagcgccccgtacactagggggtcctacagctacgtggccgtgggcagtactgggggcgacctggacctgctggctcagcccctccctgcagacggcgccggcgcccagctccagatcctgtttgcgggggaagccacacatcgcacgttttactccacgacgcacggggctctgctgtcgggatggagggaggccgaccgcctcctcagtctgtgggccccgcaggtgcagcagcccaggccgaggctctagctgggcccagcctactctgttccacccgtgtcgggggtaggctgggaccgtcatttcttctgacagatttcagtctggcttgaaatttggggatgttaatgagggtcctctggtttttggtaaccagggccaccttctcagttcttgtgtctgttattggagtctggccagggttgacttgagctgagacaccagatgctcacggagatgctggacacataaagcaagttacagccacagctcccagagccatctttcctgccttgaggctgtcctgtccttcctgccttggggctccagcatctgctgctgttgtctttgtcttgctccgggcccagcctggatctgcagggctcctctcttctcaccctctggtctctgttcaaattgcccctcctaggatgttccctgaccccaccctcccgagccccagcctccctctgtagccagcagccccacctgcatttgctgtgtcaccagactgttctctctggggacacctgcccatcagacgcctgggagagaaattcagattccacagggttttattgtggttttgtgctcctaggaccatgagggaatgcagcttccttaaagtacaaaaatctttatcattgacatttagggtttcatcaattctgtatcccagggagaaaggcagcaagacccaggctgccccctctgggtgtgagggaccggcttggtgaggagggggcttgggggcattgacctagcaggaggccctgactgcccccactcagcccagaaaccacctgggaggcttctgtcttccacggaggggccactctctcatgcccaaaaatatttacagctaggcgttagggtatt

SEQ ID NO: 460270 - DNA, 1853 bp, Homo sapiens
tcgctccgcctccggcctcctccgagagctccagacctcccggctactcagaagccctcggactgcccggaccgcgcgatggagtcgaccggcagcgtcggggaggccccgggcggaccccgggtgctggtggtgggcggcggcatcgcggggctgggcgcggcgcagaggctctgcggccactccgccttcccgcacctgcgggtcctggaggccacggcccgcgccgggggccgcatccgctcggagcgctgcttcggtggcgtggtggaggtgggcgcgcactggatccatgggccctcccggggtaaccccgtcttccagctggctgctgagtacgggctgctgggggagaaggagctgtcccaggagaaccagctggtggagaccgggggtcacgtgggcctgccctccgtgagctacgccagctccggggccagcgtgagcctccagctggtggcggagatggcgactctgttctacggcctgatagaccagacccgggagttcctgcacgctgcagagaccccggtgcccagcgtcggggagtacctcaagaaggagattggccagcacgtggccggctggacagaggatgaggagaccaggaagctgaagctggccgtcctgaactccttcttcaacctggaatgctgtgtgagcggcacccacagcatggacctggtggccctggcaccctttggggagtataccgtgctgccggggctggactgcaccttttctaagggctatcaaggactcacaaactgcatgatggccgccctgccggaggacactgtagtttttgagaagcctgtgaagaccatccactggaacgggtccttccaggaggcagcctttcccggggagacctttccagtgtcggtagagtgtgaggatggagaccggttcccggcgcaccatgtcatcgtcaccgtgcccttaggttttcttagggaacatttggacaccttctttgaccctcccctgccggctgagaaggcagaagcaatcaggaagataggctttgggaccaacaacaaaatcttcctggagtttgaggagcccttctgggagccagactgccagctgatccagctggtgtgggaggacacgtcgcccctggaggatgctgcccctgagctacaggacgcctggttccggaagctcattggctttgtggtcctgcctgcctttgcgtctgtccacgttctctgtgggttcattgccggacttgagtctgagttcatggagactctgtcggatgaagaagtacttctgtgtctcacccaagtgctccggagagtgacaggaaacccacggctccccgcgcccaagagcgtcctgcggtctcgctggcacagcgccccgtacactagggggtcctacagctacgtggccgtgggcagtactgggggcgacctggacctgctggctcagcccctccctgcagacggcgccggcgcccagctccagatcctgtttgcgggggaagccacacatcgcacgttttactccacgacgcacggggctctgctgtcgggatggagggaggccgaccgcctcctcagtctgtgggccccgcaggtgcagcagcccaggccgaggctctagctgggcccagcctactctgttccacccgtgtcgggggtaggctgggaccgtcatttcttctgacagatttcagtctggcttgaaatttggggatgttaatgagggtcctctggtttttggtaaccagggccaccttctcagttcttgtgtctgttattggagtctggccagggttgacttgagctgagacaccagatgctcacggagatgctggacacataaagcaagttacagccaca

SEQ ID NO: 460271 - DNA, 1695 bp, Homo sapiens
tcgctccgcctccggcctcctccgagagctccagacctcccggctactcagaagccctcggactgcccggaccgcgcgatggagtcgaccggcagcgtcggggaggccccgggcggaccccgggtgctggtggtgggcggcggcatcgcggggctgggcgcggcgcagaggctctgcggccactccgccttcccgcacctgcgggtcctggaggccacggcccgcgccgggggccgcatccgctcggagcgctgcttcggtggcgtggtggaggtgggcgcgcactggatccatgggccctcccggggtaaccccgtcttccagctggctgctgagtacgggctgctgggggagaaggagctgtcccaggagaaccagctggtggagaccgggggtcacgtgggcctgccctccgtgagctacgccagctccggggccagcgtgagcctccagctggtggcggagatggcgactctgttctacggcctgatagaccagacccgggagttcctgcacgctgcagagaccccggtgcccagcgtcggggagtacctcaagaaggagattggccagcacgtggccggctggacagaggatgaggagaccaggaagctgaagctggccgtcctgaactccttcttcaacctggaatgctgtgtgagcggcacccacagcatggacctggtggccctggcaccctttggggagtataccgtgctgccggggctggactgcaccttttctaagggctatcaaggactcacaaactgcatgatggccgccctgccggaggacactgtagtttttgagaagcctgtgaagaccatccactggaacgggtccttccaggaggcagcctttcccggggagacctttccagtgtcggtagagtgtgaggatggagaccggttcccggcgcaccatgtcatcgtcaccgtgcccttaggttttcttagggaacatttggacaccttctttgaccctcccctgccggctgagaaggcagaagcaatcaggaagataggctttgggaccaacaacaaaatcttcctggagtttgaggagcccttctgggagccagactgccagctgatccagctggtgtgggaggacacgtcgcccctggaggatgctgcccctgagctacaggacgcctggttccggaagctcattggctttgtggtcctgcctgcctttgcgtctgtccacgttctctgtgggttcattgccggacttgagtctgagttcatggagactctgtcggatgaagaagtacttctgtgtctcacccaagtgctccggagagtgacagctccagatcctgtttgcgggggaagccacacatcgcacgttttactccacgacgcacggggctctgctgtcgggatggagggaggccgaccgcctcctcagtctgtgggccccgcaggtgcagcagcccaggccgaggctctagctgggcccagcctactctgttccacccgtgtcgggggtaggctgggaccgtcatttcttctgacagatttcagtctggcttgaaatttggggatgttaatgagggtcctctggtttttggtaaccagggccaccttctcagttcttgtgtctgttattggagtctggccagggttgacttgagctgagacaccagatgctcacggagatgctggacacataaagcaagttacagccaca

SEQ ID NO: 460272 - DNA, 1364 bp, Homo sapiens
gcatgcctgtaatcccagctactcgggaggctgaggcaggagaattgcttgaacctgggaggcggaggttgcagtgagccaagactgcgccattgcactccaacctgggcgacagagtgagactccatctcaaaagagaaaaaaagaagaagagtaaagacttctcttgctcctgtatttatgaggggcttcaactgcagagggggccagacaggccctctccctgtggcagggtggctgccaggtaccaggtgcaggggctatcaaggactcacaaactgcatgatggccgccctgccggaggacactgtagtttttgagaagcctgtgaagaccatccactggaacgggtccttccaggaggcagcctttcccggggagacctttccagtgtcggtagagtgtgaggatggagaccggttcccggcgcaccatgtcatcgtcaccgtgcccttaggttttcttagggaacatttggacaccttctttgaccctcccctgccggctgagaaggcagaagcaatcaggaagataggctttgggaccaacaacaaaatcttcctggagtttgaggagcccttctgggagccagactgccagctgatccagctggtgtgggaggacacgtcgcccctggaggatgctgcccctgagctacaggacgcctggttccggaagctcattggctttgtggtcctgcctgcctttgcgtctgtccacgttctctgtgggttcattgccggacttgagtctgagttcatggagactctgtcggatgaagaagtacttctgtgtctcacccaagtgctccggagagtgacaggaaacccacggctccccgcgcccaagagcgtcctgcggtctcgctggcacagcgccccgtacactagggggtcctacagctacgtggccgtgggcagtactgggggcgacctggacctgctggctcagcccctccctgcagacggcgccggcgcccagctccagatcctgtttgcgggggaagccacacatcgcacgttttactccacgacgcacggggctctgctgtcgggatggagggaggccgaccgcctcctcagtctgtgggccccgcaggtgcagcagcccaggccgaggctctagctgggcccagcctactctgttccacccgtgtcgggggtaggctgggaccgtcatttcttctgacagatttcagtctggcttgaaatttggggatgttaatgagggtcctctggtttttggtaaccagggccaccttctcagttcttgtgtctgttattggagtctggccagggttgacttgagctgagacaccagatgctcacggagatgctggacacataaagcaagttacagccaca

SEQ ID NO: 460273 - DNA, 2527 bp, Homo sapiens
attttttcctcttatcagtatgaagagagggatacactggctcacagtgccccacttttaactgaaaaagggaacaatgaggtcttgacatggttttacaaagagaaatgcaaattgtcaccctcactcagtggagcgagaagataggagaactgcagttggccatgcaatcaacctttaatcggttggggtttaggatccagtggagaccaggcctgggttctccaagttaataaaacccagtcaggacctgggagtccaagaaggaaaaggtctctggaaatacttgctacattgtcacaggtgacattaaggggaacattaagttctatgatcacaccctgtctattgttaactggtacagtcacttgaaactgggcgccataagaactctgtccttttcaaagaccccagcaactcctcctactgaaaaatcaaactatcctcctgactgcactttaaaaggtgacctttttgtcttaaggaattttatcattggaacatctgatgccgcggtgtaccacttaacaacagatgggaccaaacttgagaagttatttgtagagcccaaggatgccatttgtgccatctcctgccacccatatcaacccctcattgccatcgggagcatctgtgggatgatcaaagtgtggaattatgaaaacaaacaatatcttttcagcagggtttttgagaaggggcttggagtccagagtctgacctacaaccccgaaggagcccttcttggagctggctttacagaggggacagtttacattcttgatgcaatgtctttagaaaatgaaagcccagagcctttcaaatattccagaaccagtgtgactcatataagcttttcccatgactcccagtatatggcaactgctgatagaagttttactgtggctgtttacatgctggtggtcagaaatggacagagggtctgggagtacttagcaagacttcgctctcatcgcaaaagcattcgaagtctcctgtttggggtttacctggacagcaatgagcctagactgctgagccttgggacagacaggctcttgatagagtatgatcttctcaggagctacaaagaccacctggaagtcctggacattcaccacaccgaccagggctgctatcccacctgcatggtctggtacccaccactcaccagggaactcttcctgcttatttgcaacagtggctacaaagtgaagctttttaatgctactaccaaaatgtgcagaaagacgcttctggggccagcttatggttcccctattgagcagacacaagtcctcccagtgagaagcatggcggagctacagaaacgctacttggtgtttattaacagagacaagttgggacttcagatcttaccagttgacggcaatccacataagacatctgctattgtttgccacccgaacggggtggccggcatggccgtttcctatgatggctgctacgccttcactgcgggagggcacgatcgctcggtggtgcagtggaaaatcaccttaagagtcacaccaagcctaggctggtcttgaactcatgggctcaagccttgggcacctaaagtgttgggattacagatgtgagccactgcacccagctagaaccttccttctgaaatgtttgtcttcttctcagtcgtcgtgggatctggaatggtagaaatttaagaagaagaaaaaaaggcctctgctttccaatagctttcgcctggccagagtccaggcttctgagaatttcaatttaatctgtggtggggacaaaggatcattataaactaattatcacttcattgctgcttctggtgacttaatatgatcagcacttcactaatggagagaaatgtaaaaaacctaaacaagtaaacaaacagaatttcctactagagttactgatgatgagttgtaggggagataaagatgataaatcccctcacattcgatcatttcagtcagtgcaccccttggccccaactgctaccatcacagtctatggcgcttctgccccgggagagccccttccatcccctctctcagggttcattccgcacgccccttcttctcctgctccgtgctagcatgcaccctttctcttctccttgtctggcatctgtttccaaatcctgcattacttttttgtgctcatcctccctgcctcctgtcatcctgctgccctgctcagccaagagcagagagaccccgattcgaatcctagctaatcactacctgcttgctggatgacgccaggcaagtcccttcacttctcggagcctcagttcctccaactcttaaatgggactgctaccaccaagttcagaccattcctcctcctcctcatccagggagcgtttacagagcacctactgtgtgcttgccacagggctgagctttagctcctttccagaagtactgtatggattgctgggtacagagcaggttttcaataagtgtcatttcccttttgtgccctaatgacctcttttctgttgcaagtgttagaaacacaattt

SEQ ID NO: 460274 - DNA, 2437 bp, Homo sapiens
agcctgtatctagagtatccccggcagtgaactttaacagcttatacactcgagacacccttgacgggaagctggttgtctgggacatacaccgcccaccctcatctgcctccacctttttgggctttccctatatcaagccttgtaaattggttcatttgcagaaagagggtatcacggtacttaccacaattgatagctacattgtcacaggtgacattaaggggaacattaagttctatgatcacaccctgtctattgttaactggtacagtcacttgaaactgggcgccataagaactctgtccttttcaaagaccccagcaactcctcctactgaaaaatcaaactatcctcctgactgcactttaaaaggtgacctttttgtcttaaggaattttatcattggaacatctgatgccgcggtgtaccacttaacaacagatgggaccaaacttgagaagttatttgtagagcccaaggatgccatttgtgccatctcctgccacccatatcaacccctcattgccatcgggagcatctgtgggatgatcaaagtgtggaattatgaaaacaaacaatatcttttcagcagggtttttgagaaggggcttggagtccagagtctgacctacaaccccgaaggagcccttcttggagctggctttacagaggggacagtttacattcttgatgcaatgtctttagaaaatgaaagcccagagcctttcaaatattccagaaccagtgtgactcatataagcttttcccatgactcccagtatatggcaactgctgatagaagttttactgtggctgtttacatgctggtggtcagaaatggacagagggtctgggagtacttagcaagacttcgctctcatcgcaaaagcattcgaagtctcctgtttggggtttacctggacagcaatgagcctagactgctgagccttgggacagacaggctcttgatagagtatgatcttctcaggagctacaaagaccacctggaagtcctggacattcaccacaccgaccagggctgctatcccacctgcatggtctggtacccaccactcaccagggaactcttcctgcttatttgcaacagtggctacaaagtgaagctttttaatgctactaccaaaatgtgcagaaagacgcttctggggccagcttatggttcccctattgagcagacacaagtcctcccagtgagaagcatggcggagctacagaaacgctacttggtgtttattaacagagacaagttgggacttcagatcttaccagttgacggcaatccacataagacatctgctattgtttgccacccgaacggggtggccggcatggccgtttcctatgatggctgctacgccttcactgcgggagggcacgatcgctcggtggtgcagtggaaaatcaccttaagagtcacaccaagcctaggctggtcttgaactcatgggctcaagccttgggcacctaaagtgttgggattacagatgtgagccactgcacccagctagaaccttccttctgaaatgtttgtcttcttctcagtcgtcgtgggatctggaatggtagaaatttaagaagaagaaaaaaaggcctctgctttccaatagctttcgcctggccagagtccaggcttctgagaatttcaatttaatctgtggtggggacaaaggatcattataaactaattatcacttcattgctgcttctggtgacttaatatgatcagcacttcactaatggagagaaatgtaaaaaacctaaacaagtaaacaaacagaatttcctactagagttactgatgatgagttgtaggggagataaagatgataaatcccctcacattcgatcatttcagtcagtgcaccccttggccccaactgctaccatcacagtctatggcgcttctgccccgggagagccccttccatcccctctctcagggttcattccgcacgccccttcttctcctgctccgtgctagcatgcaccctttctcttctccttgtctggcatctgtttccaaatcctgcattacttttttgtgctcatcctccctgcctcctgtcatcctgctgccctgctcagccaagagcagagagaccccgattcgaatcctagctaatcactacctgcttgctggatgacgccaggcaagtcccttcacttctcggagcctcagttcctccaactcttaaatgggactgctaccaccaagttcagaccattcctcctcctcctcatccagggagcgtttacagagcacctactgtgtgcttgccacagggctgagctttagctcctttccagaagtactgtatggattgctgggtacagagcaggttttcaataagtgtcatttcccttttgtgccctaatgacctcttttctgttgcaagtgttagaaacacaattt

SEQ ID NO: 460275 - DNA, 2421 bp, Homo sapiens
atctttgcaggacttgaatttaacacaaatactctcagccacaatggaagggaagctggttgtctgggacatacaccgcccaccctcatctgcctccacctttttgggctttccctatatcaagccttgtaaattggttcatttgcagaaagagggtatcacggtacttaccacaattgatagctacattgtcacaggtgacattaaggggaacattaagttctatgatcacaccctgtctattgttaactggtacagtcacttgaaactgggcgccataagaactctgtccttttcaaagaccccagcaactcctcctactgaaaaatcaaactatcctcctgactgcactttaaaaggtgacctttttgtcttaaggaattttatcattggaacatctgatgccgcggtgtaccacttaacaacagatgggaccaaacttgagaagttatttgtagagcccaaggatgccatttgtgccatctcctgccacccatatcaacccctcattgccatcgggagcatctgtgggatgatcaaagtgtggaattatgaaaacaaacaatatcttttcagcagggtttttgagaaggggcttggagtccagagtctgacctacaaccccgaaggagcccttcttggagctggctttacagaggggacagtttacattcttgatgcaatgtctttagaaaatgaaagcccagagcctttcaaatattccagaaccagtgtgactcatataagcttttcccatgactcccagtatatggcaactgctgatagaagttttactgtggctgtttacatgctggtggtcagaaatggacagagggtctgggagtacttagcaagacttcgctctcatcgcaaaagcattcgaagtctcctgtttggggtttacctggacagcaatgagcctagactgctgagccttgggacagacaggctcttgatagagtatgatcttctcaggagctacaaagaccacctggaagtcctggacattcaccacaccgaccagggctgctatcccacctgcatggtctggtacccaccactcaccagggaactcttcctgcttatttgcaacagtggctacaaagtgaagctttttaatgctactaccaaaatgtgcagaaagacgcttctggggccagcttatggttcccctattgagcagacacaagtcctcccagtgagaagcatggcggagctacagaaacgctacttggtgtttattaacagagacaagttgggacttcagatcttaccagttgacggcaatccacataagacatctgctattgtttgccacccgaacggggtggccggcatggccgtttcctatgatggctgctacgccttcactgcgggagggcacgatcgctcggtggtgcagtggaaaatcaccttaagagtcacaccaagcctaggctggtcttgaactcatgggctcaagccttgggcacctaaagtgttgggattacagatgtgagccactgcacccagctagaaccttccttctgaaatgtttgtcttcttctcagtcgtcgtgggatctggaatggtagaaatttaagaagaagaaaaaaaggcctctgctttccaatagctttcgcctggccagagtccaggcttctgagaatttcaatttaatctgtggtggggacaaaggatcattataaactaattatcacttcattgctgcttctggtgacttaatatgatcagcacttcactaatggagagaaatgtaaaaaacctaaacaagtaaacaaacagaatttcctactagagttactgatgatgagttgtaggggagataaagatgataaatcccctcacattcgatcatttcagtcagtgcaccccttggccccaactgctaccatcacagtctatggcgcttctgccccgggagagccccttccatcccctctctcagggttcattccgcacgccccttcttctcctgctccgtgctagcatgcaccctttctcttctccttgtctggcatctgtttccaaatcctgcattacttttttgtgctcatcctccctgcctcctgtcatcctgctgccctgctcagccaagagcagagagaccccgattcgaatcctagctaatcactacctgcttgctggatgacgccaggcaagtcccttcacttctcggagcctcagttcctccaactcttaaatgggactgctaccaccaagttcagaccattcctcctcctcctcatccagggagcgtttacagagcacctactgtgtgcttgccacagggctgagctttagctcctttccagaagtactgtatggattgctgggtacagagcaggttttcaataagtgtcatttcccttttgtgccctaatgacctcttttctgttgcaagtgttagaaacacaattt

SEQ ID NO: 460276 - DNA, 718 bp, Homo sapiens
ttttgctaagaagccgcagtgatgttgacgcggctggtcctcagtgcacacctgagtagcacgacctctccgccctggacgcacgctgccatcagctgggagctggacaacgtgctgatgcctagtcccagaatctggccccaggtgactccaacaggcaggtctgcctctgtcaggagtgagggtaacacctcctcactctggaatttctcagctgggcaggatgtgcatgccatagtaaccagaacctgtgagtctgtgctgagctctgccgtctacacccacggctgtggctgtgtgaggtctgccacaaacattacctgtcagtcctcaggacaacaaaggcaggcggcccggcaggaagaggagaactcaatctgcaaggcccatgatagtagagagggccgcctgggctaccccctcagtgcccatcagcctggttccggtggtcctaactagccctgtctccttgccaatagccctgtgctccccagccccctcccccatgcagacggctgctatgacatccctgttccttaaagtgcggggttcctcgctgccttctcctccctaactggcaccctgtgcaaacctgctgcagagaacagtgtcttgggcagtgcgatagtcctccagttcaccaacagtaaaaatggtctcaatggggagagatgtctgactgcaagcgctgagtccttccagaggagggctggaggga

SEQ ID NO: 460277 - DNA, 2151 bp, Homo sapiens
ccctcccacccttcacccccagggtcacacgcgccgcgcgtccctgggagcgcagagcgttcagccggtattgcccagcgggtgacctgcctgcgcgctgctagagccacgccacctccctcctctcctctttctggtcctctcctgccacctgagcgcagtgcccaacttaacaccgcttcttctcactttttaggaccgcgagtaacccagtacccgcggtgaaggttttgggtcgactttagagtttagttaggagctgcatttctgagacagcttgataacttctttctgaagaaagaaaaaggtgctttcgctggggttgctgaaaatgttagaattctggctgcttttccacaggactgttgcggtttgctgggggtccactgcagtccttagtcatttcgggttttccagtacctacctgaagggcctgcaggctggaacagctgagtcatccaaacagcaaagatggtggcctctactccccacaggaactctgtcccaggtaggggtgacactgttgcccctggttagctggaattccaagccagtgggtcttatcctctgtggtgccatggaagtggggtccgcagaccgttactgcctgcttccctggattcagcccccttcccagggaagcttcttggtgggagcagacaccagacaaacaggccaatgtggggacaggggcggggccctacctgttggtgccactgggctcagtgaggttgcccaggccttggctgcagcactggttggtggagaatttgacttggagatgaactttattatccaggatgctgagagtataacatgtatgacagagcttttggagcactgtgatgtaacatgtcaagcagaaatatggagcatgtttacagccattctacgaaaaagtgttcggaatttacagactagcacagaagttgggctaattgaacaagtattgctgaaaatgagtgctgtagatgacatgatagcagttgatatgttgggggttcttgccagctacagcatcactgtcaaggagttgaagcttttgttcagcatgcttcgaggagaaagtggaatctgggcaattgccttgcctcctattgcaaagtggccttatcagaatggcttcaccttaaacacttggtttcgtatggatccattaaataatattaatgttgataaggataaaccttatctttattgttttcgtactagcaaaggagttggttactctgctcattttgttggcaactgtttaatagtcacatcattgaagtccaaaggaaaaggttttcagcattgtgtgaaatatgattttcaaccacgcaagtggtacatgatcagcattgtccacatttacaatcgatggaggaacagtgaaattcggtgttatgttaatggacaactggtatcttatggtgatatggcttggcatgttaacacaaatgatagctatgacaagtgctttcttggatcatcagaaactgctgatgcaaatagggtattctgtggtcaacttggtgccgtgtatgtgttcagtgaagcactcaacccagcacagatatttgcaattcatcagttaggacctggatataagagtaccttcaagtttaaatctgagagtgatattcatttggcagaacatcataaacaggtgttatatgatgggaaacttgcaagtagcattgcctttacatataatgctaaggccactgatgctcagctctgcctggaatcatcaccaaaagagaatgcatcaatttttgtgcattccccacatgctctaatgcttcaggatgtgaaagcgatagtaacacattcaattcatagtgcaattcattcaattggagggattcaagtgctttttccactttttgcccaattggataataggcagctcaatgacagtcaagtggaaacaactgtctggtaagttttctttgcatgtacaattgctggtattttatacacacttaagactatgcatgatgtactcagtgctgtgtaaatgtattacagtatttgggttctgcccttaaagtgtaataaaaaattttttagaactaatggagatagatatttatacaataaataaagaaaacgctgacatttaggttgttatatcataaaggaatgccttccttgataataaat

SEQ ID NO: 460278 - DNA, 4837 bp, Homo sapiens
tttgtttttcagcctcagaaagcatggtctccggccccgccatcatggaggatgatgaccaggaagtcgattcagcagatgaatctgtctccaatgatatgatgacagcgacggatgagccctccaagatgtcatcggccaccgggcgccgaatccggcgctttaagcaggaatggctgaagaagttctggttcctgcggtactccccaaccctcaatgagatgtggtgccacgtctgccgccagtacacggtgcagtcctcacgcacctcggccttcatcattggctccaagcagtttaagattcacaccatcaaacttcacagccagagcaacctgcacaagaagtgcctgcaactgtacaagctccgcatgcacccggagaagacagaggagatgtgtcgcaacatgaccctgctcttcaacaccgcctaccacctggccttggagggcaggccctacctggacttccggcccctggcggagctgctgaggaagtgtgagctcaaggtggtggaccagtacatgaatgagggagactgccagatcctcatccatcacatcgcccgggccctgcgggaagacctggtggagcgcatccgccagtcaccttgcctcagcgtcatcctggatgggcagagcgacgacctgctggccgacacggtggctgtctatgttcagtacaccagcagtgatgggcccccggccacagagttcctgtccctgcaggagctgggattctctagcacagaaagctatctccaggcacttgaccgggccttctcggccttgggcatccggttgcaggatgaaaagccaactgttggcttgggtgtagacggagccaacatcacagccagcctccgtgccagcatgttcatgaccatccgcaagacgctgccctggctgctgtgcctgcccttcatggtgcaccggccccacctggagatcctggatgccatcagcgggaaggagctcccatgcctggaggagctggagaacaacctgaagcagctgctgagcttctaccgctactcaccgcgcctcatgtgcgagctgcggtccacggcggccaccctttgtgaggagacagagttcctgggcgatatccgggcagtgcggtggatcatcggcgagcagaacgtcctcaacgctctcatcaaggactacctggaggtggtggcccatctcaaggaggtcagcagccagacccagcgggcagacgcctcggccatcgcactggccctgctgcagttcctcatggactaccagtccatcaagctcatctacttcctgctggacgtgattgctgtgctctcgcgtctggcctacatcttccagggcgagtacctgctggtgtcccaggtggatgacaagatcgaggaggccatccaggagatcagccggctggctgactccccgggagaatacctgcaggagttcgaggagaatttccgagagagcttcaacgggatcgccatgaagaacctcagggtggctgaagccaagttccagtccatcagggagaagatctgccagaagacccaggtcatcctggctcagaggttcgactcccgcagccggatctttgtgaaggcctgccaggtgtttgacctggctgcctggcccaggagcagtgaggagctgatgagctatggcaaggaggatatggtgcaaatatttgatcacctggaggccatcccgaccttttcccgggatgtctgtagggaagggctggacccccggggtagtctgttgatggagtggcgagaactcaaggccgattactacaccaaaaatggcttcaaagacctgatcagccacatttgcaagtacaaacagaggtttccactcttgaacaagatcatccaggttcttaaagtcctccccacttccaccgcttgctgcgagaaaggccgcaatgccctccagcgagttcgcaaaaaccaccgctcccgcctgaccctggagcagcttagcgacctgttgacaatcgctgtaaacggaccgccaatcaccaactttgatgccaagcgagccctggacagctggtttgaggagaagtctgggaacagttacgcgctgtctgcagaagtcctcagtaggatgtctgcgctggagcagaagccagcactacagaccatggaccacgggacggagttttaccccgacatttagggagctggcgctgcagagttcactaagctgttgaatatttttttaatctatactcataagctttgatatattatataaatatatattatattatattatattatatatatatatatatataaactcacactgaaaatttttaaaaaccaaggtgacgcgtccaccagaagccactgggagatttcagaaaggaaaaatgttggaaactgactcttgtctacaaaatttggcagctgcaacatacatggcaactcattttcactcacagaagcacgtgctggggcctcctgtgttcccaccttactgtccaccaacagcataagctaaaatgacaggtctctgtcatcacctttaggtagctcattttgtttatgttttcatttgcgggtggcggggctctgggtttgggtttatgttcttgccttttcttttttcatttggttttatgatgggagggagctcctcagcctcctcattgacattctggtccggctgaatcagatctctgacttaagtcagggtgggttgtctgtctgcatttgggaggcaggggggttgacctttctccctccccacctgacttcagcttgagatctttttttattcatttcctgatgagggttccttcactgtcctacaaacaaaagtgtcggtcaaactgtgacactgccacacctcacctctgttgcctcgtccatccctgggttgtggatcccttccttccagccccccctggaaactcacaatattacccattatactgaaggcaacattgcctcaccgctgagcttgaaatcctggggaagggagaaggggtaagcttttagcattcctgtttttacgaggtggaggataaaacaatataattccattccaatccagggcttttggggagatgaagagccaagaagtccagaccccaacaggggagtgatttttggctaaaaaacaaggaaaatgaaaagtacatattcgagttacatggattatttatactttttctttataatcatatcctgtgttgagggtattttttttcctttaataatcaagaaatgcctgctatagttcagtggcaggtagtgtcaatgcaaattgtgccctaagttatgcataactcaaatgagagtctgtagagatgtggtcctccttttgcaacaaggctgataacatgctacatggtcataggaaactggggaatgtgtctctgcctgtaaactcttccttttttgaacagggtagagatgtcctaaagaaatggagaaaagaagagaggactctcaaggcatcagcctacacagacacacacacacacacagacacacacacacacacacagacacacacacacacacacaatcacaatatacaatataagctttagaaatagccacttgcctattccctggggcaagtagtggtttaaactagaggagtctgatcaatgctctttcattcatttaactaccggtatacctcgcaagggagttttaaaaaatgtgcgtgagctgttaaaaacttctgttcatgttcctacatctgatttatgcatattttatatgcagagatcctatcacgtggatgcaggtcattttgggggagggaggaagatctgaattatatacatgtggtcagttctgctgagagcttcatctcttggttggcagaggggcttgtgcagccctgacgggacccagaagcccatttgctcgcagtttcctctctctgtttttttcctcctggaggtaggagagagggcctgaccaggcaccagatgatggagcaagggcagctgcatgctccctctctccagaccagccttctgcttttggggtccgaaggggcatttgctcccatcctgagcctcctctgcccctgtcttgctcttccccaccatcctacaagtacctcagtctccagcaggcccacccctccacctgcagcccagggcgggtctgttctgccaatgcccacctccttgagccacagttagctgccaactgggtcttgggacaccctccagtacctggctcaagagagaccaggccgggccgagccttcttcccactgcagtggactagacccacggccaggggatgggcatccccaggtagcaatcccacaatgcactgtacctcagagagagagcacgccaggggcaccaagggaccgagccctctgtccagagggggacagcggtcacaatactgctcaccaaaagacaaaggccaggctgccctcgggcacctctcagtcttcacttttgtctctccggaagaaccagcagtctgattccgtctatttcagcccccgtctctctcttctccacccccacgctgctgaaccattttcatgtcaatcacaaaggaaaaataagtggggatggggggaaatacctaggagtctattatcacatacatattaatatgttaatactttctttaaaaaaaacctcttgatgttattattttgcagactacgctttatagtacctgtgtgacgggacctagaacactggatacaaatagagctatgttggtttatcataatatgtacgcagaaactttctttttgtcatattatccttgtaatgtaagaagattgttaataaaagcatttaaatttactcaccactgttgaattgctgcctccttgcctct

SEQ ID NO: 460279 - DNA, 4135 bp, Homo sapiens
caacgagtttgcaatttacagtctctggacaggcactcagatgtgggcccgaaaacaaatcaaaacaaaagtcgtgacttcccagatcttaggagggccgaaatctctacctatcaggcaaaaggcaaaaagcccggaagggtcggggagaagcaagctggaaggctccaggaagtgggtggggaggaagctgccggggttggagccaaccctagcaacagcaggtttgcacacgcctagcagaggaagtcccgggcctaagcgtgcagcggtcacaagagcggcagtgctgtccccttcgattccggtcatcacccaaccatccagcccgggggggcggaaaaccggcttgtaaagtgggcggcggccggtgttcccacagctgagtcacagcccagccaacttttacagcgtttcccagaaagaaaatacaaagtctcagtcccggagcccaccgcttctaattcccgctcccctgtgtcacctgacccggggtaactccagccccactactgagatatttcccactcatggcgcaacttcttgcctgcgcaaagcctcgtggtaccccgagcgctctccaagtgctaccaaccccacagatgagagggcaggagagaggggaagggctgcgtcctcacctgcaggacacggacacctccacccgcgtggccgggatggcagcgctcagctggttcaagtccccgatgcccgcagtgctgttgtagcggctgtccatattgggaggaggcgccttggacttgtccggcgcccacaaccacagctcgggcggactgagggctagctcccgtcaggcggggatgggggttgagggtggaggcagaagaaggaggcggaggcagcgcgcgggatgggggagggaagggaggaggcggacctccgcgcagagccacgagggaaccgctagccagtcctgggtgaaactgacgctgccaggcaagtggcgcgcggggatcccggtttcccagcccccttccggcaggcagcagcccgggcgggggacacactccgtgatcccctcctggctggaggggtcaggcttggtggacccagcaagcagcctgatggagaaggtggcaccagacgcagacccctaccgtccaggaccgcaagccctcgccggctctgcgtgcttttaggttttgtctccacctctgcacacccacactcgcctcctgggccgcgacagcttccttctgtcaatcaggtgtggacgggaaggtctcgaagtttcctcgcctgagttgaaagctggaggtgggggcacctctgcccgttcctaactgccccgttataaggtccccctccccacaattggttctcacctcgccctcggagctcttgggagatccctccgtccctcctactgtgccctcgggcagatgagtctggtcccagcttctggactgcccactgtcggccacttgagagttggggacggtggggcattgtgacgctctccaaccttggaacacggtggcaaagtggccgatcaatatatgggacaagtgggggcgggggggcggactctaaggtggaaaaaacaatactacttgggatttaaggaagcaatctggattctgtctccccttggttcttcggagcttagaggtctaacggcgacattcctcctacagtaagggctcttctgggtccctcgtttccaaaggcatgaaagttctgacctgaaaatgggggccggggagggtgatgtcacaaccatataacgcagctccttcagccgactcccacccgcaagaactgagacctgacggataaaagcagagaggagtcagagtgagcgctgcgtttgggaaactgcattccagggcagcaagactggtgccaagacggagtcgtggcaaaagcatccggaggtcttccttaatatatgtcagcagtggagtggtgtgcttaaggagagagagacttggaaaaatacagaccgagaacaaggccatgtggagatagaggcagagactgaagttgtaccaccaaaggcaaagaatatcaagtattatcagtaaccacaggaagctggaagaggccaggaaaggtttttcttagagaccttggaaggagcctgaccctggaacaccttgattttagacttctgaccctcaaaattgtgaaagaataaatttctgttgttttaagcaattcggcttgcagtaatttgttacagcagccctaagaaaagtaatacatatcgataacatttattatttccattttgctgactctttcaagttctgtgcttataaattcatcatagtgaagtaagctttaaatgataaaactttgaaagtatactcaaattctgttgctatagttagcacaatacagaaaggaatataatttttaaaaataaattttaataatataaatataaattatgacatgtctaaacttttattttggagattttataataaaaagtttatatttattaaaattcatttaaattaataacataaagcccttggaatatgctaaaaatcaaagataagttacatttactataacgtaataaaccatcattcactgaatcagtgatttagcagacattaattcaatgtctgctatgcactaggcactgtactagatctaagagctaaagctccttctggcacttatagaccaagtaaaagttagcaaggagatacattattgggtaaagattatactgactgagtcatcgagctctgttttttaaatagtttcaacttttagatctctgacgtacatgtgcagtgtacaccgatgtgagtgaggtgctatgtggccaaggactgttaaaagtatctaaattcactttgatatgtttagttcagcaacagctgagcacttggatggactgtccaacaggcatttgggactggtgagaggacaagattgttgatattggaatcaatagcttagaattagcagttgatgccaagcattttgccaatctgttcctcctctgtatgtccataccatttacaattgctcacaatcatttagctctgctgacacagcctgtaattgtgtatcattttatctatttactattttattaatttctgttcttttcattttgctcttttcttatgtgtcttttgtctttactctgttttcattttttccaacttgctaagtttaatgcttagtttttcacaatctttttcatattataatacaagaacttaaagccatgaatttccctatagtactgctttagctgcattccacaagttttgatatagagtacagttgcctctcagtatccatgggagcttggttccaggacccatatggacaccaacatgctcaagtctctgatataatatgcatggtatttgcatataatctctgcacatcctcccatatattttaaagcatctctagattatttatattagtataataatacagtgtaaatgttatgtaaatggttactatgctgtgttttttagggaataatgacaaggaaaaagtctgtacataaatgaaatgcttttaaaaatattcttgatctgtgattggttgaatccatggatgtgaaactcacaggtacagaggactgactgtactttgactgctgctttataatattttacaaatttcattttaaccaattgattgtatggagtatatcttttttctcaaaagagtatcttatcatctttttattattgattaataatccaattacaatgttatctgataaaatggattatataataacagttttgagtgtatgaagacttcttttattatcttatacatgtttagttccagtaattatccgtacatcttcaaacatcagcataagaggtcttgacaggccacttagtgtttatctccatctcagactgtgaaagatagataaatagcaaagcagttgccactacagattgaatgcattcgggccatccgctggctactgggtcaaggatttttgatagaaaggctacgggttactgatggccttcgtgcttttgggtttcagacttttgagctggttaagggggtgttcagaaagccaatgccccctcctccaagaagcacttcccttaagggaaaaagagtttgagcaaactcttggagatactggggaaagggaaatttc

SEQ ID NO: 460280 - DNA, 4122 bp, Homo sapiens
ccacgttcagctgtaaccagagccgcccacggagccgggcgctgggcctctgcgggcacagccacttagcagccaaccttgctgccttgggctggcccccttgtccttgtggggaatctgaagccccagtcctgaggcttgtcctggaaggacccccgccccctccctcatctcccctgagcctgagtctccagccgtgcgctggggtgcggcctgggcagggcggcagctccaggaaggaagtatggctgcctgacgtgccagggtcaccggccgtttttctagagcggtcttgaaaattgcatctggtttgttaccagttacgcgtgttccctgtggaaacgtggattctgtggacccgttttccatggtctgtgctcgtgtggcccagcagggcaggacctgagggtgccaggtgggcagatggggatgagggctctctcggggccactgaaagcatctgggccatctccagagggctcagccccgggccacgcgcagccccaccccagacacacgtcatgcacctggaaccctgctcccacctgccggagcatgggtcgggggccttggctctgggggctggtgcgggtggcagatgtgccagggtcccttctcactgtggtttctctctctccattgccaggtccggcctctttggcctacccccgttggctccgctgccccaggtcgatgagtcccctgtcaacgacagccatggccgggctcccgaggagggggatgcagaggtgatgcagctggggtccagctccccccctcctgcccgcggggttcagccccccgagaccacccgccccgagccacccccgcccctcgtgccgccgctgcccgccggaagcctgcccccgtaccctccctacttcgaaggcgcccccttccctcacccgctgtggctccgggacacgtacaagctgtgggtgccccagccgccgcccaggaccatcaagcgcacgcggcggcgtctgtcccgcaaccgcgacccggggcgcctcatcctcagcaccatccgcctgcggccgcgccaggtgctctgtgagaagtgcaagagcacgctgagccccccggaggccagccccggacccccagccgcgcccagggcccgcaggaggctgggcagcggcccggacagggagctccgcaagccggaggagccggagaacggcgagcccacggctgcggccaccgccaggaggagcaagagggagaggcgcgaggaggacagggccccggcagagcaggtcccgcggagcccggtcatcaagatctcctacagcacgccccagggcaagggagaggtggtcaagatcccctcccgcgtgcacggctctctggagcccttccgtccccagcaggccccgcaggacgacggcagccaggaccccgaggtgctggacagagagtcccgggaccggccgtcctgcgcgccctcggcctccatccccaagttgaaactgacacggcctgtgccggccggcgcggacctgccgccccctaagatccgcctgaagccccaccgtctgggggacagcgagcacgagcccgtgtaccgggccgagctggtgggggagctgaacgggtacctgcgggacagctcgccggcgccctgtgcggacggccctgccggtgggctggcggacttgtcttctggaagttcgggtgaggacgatgacttcaagagctgtccccagggtccacagggacgcgagggcttggcttttctcgtcagctgccctgaggggagagcggactgtgccagtgagtcggcgtgcagcagcgacagcctggacgaggccagatcgtccggctcggaagggacgccggcagacacgggtgacctctcgcctggccacggcgcgtcagcgccctcggtgtccagagaggctcgccaaacggtgccgcccctgacggtcaggctgcacacacagagcgtgtcggagtgcatcacggaggacggcaggactgtggccgtgggggacatcgtctggggtaagatccatggttttccttggtggccggcgcgtgttcttgacatcagtctcggccagaaggaggacggagagccgtcttggcgagaagcgaaggtctcgtggtttggttctccgactacgtcgttcttgtctatttcaaaactctcccctttctctgaatttttcaaactgagatttaatcgtaagaagaaggggatgtatcggaaagctataaccgaggctgcaaatgccgcaagacacgtggccccggaaatcagggagctcttaacccagtttgaaacgtaactggttccctgaccaggtcaccgacgatgagggcgcacctgctgtcctggagcttccgatctctgttcggggaccctgtgagccttctggccggctgcgtgcagagcccactgggcacggtggtcggcctggtgtgaggccccccggggaccggcagtgtgtccagggaggggatggccctgagcccagcggctcctcccgctgagtgtatttcttcccaccactcagcgcatggctgccctggctcacgaggcagtcgggactcgtgacttgctggctgctggctgctgctgcctcgcgcgctggggttccatggaggaactgggcctgccgccccggcctcacctgctgcccgcatgctggggtcccatggaggaaccaggcctggcgccccggcctcgcccagcggctggtgtgggcagctgttccctgcctcgcagtgtcctggaggcagctgtctcgcagactcagcttggtctcccgcaggcttcagaaaaacccaattgcacgtgtgggattcttccccagcccttgggtgcggggtctctgtgcacttgagagctgggggacccacccaccgtctcccactccaagttcatcccagagcgtggggcccgctgggcacctggcacctggcctgcagatgctgctacgagtgaccagtgctgtgtggaggaggccaagggcggcccctgggaaaccgggcttcaacagtacaaggaaaagaaacttgctctgttttgtaagagcgtgttccttttcctcttttttgtcactttaaagaccaaaaagaataaagaaagaaaagaaaaaaattaatctgctctttctttgtttaaatgttaaaaacaaaaagagagagaaacatatgtcatagttgaagttgtgacttgtgcggccacagttcacactcatgcgtgtgtccctgtcggggctgacggggcctgagtcccctgggcactgctgggcggggcccatgtcgtacgggttggggtgacgccgccaccggctgcatctcgctgcctccaggggctgcccctgcctgatctgctgctcggggtgactccccctgccgcacaccccactttgcacccaggacctcctactgactagggttggctcccctttacgaaggaaggccttcgtaaagcttggcactgcttcaagaaatgtgtgtgtccaatggaaggagcaggcctcacccctgggacaaaatatgcgtgcagccctgggcacattcactcccagctgcccagcctgcaactagagctcagccactgcaggtgacagcaacgggacccgcctttgagcctgaggccaggactgacgccacagcctgcagctcctccccaagcccagccccagcccttgcccttcaatcctgagaccctgagatgcatgggtggggctttcatccgctggggaggctgagacccggggggccacagctggttcctggactccaaagcccaggacccttccaaatcctgcctggacggcaccgtggccaggaccccagccagcacttcccttttctgcgagggttttctgtttctttgattataaaataacccctgttggtggggggaaaaaattagcaaaataaagaaaagcaaaaaaaaaaaagaaaattagaatctcccgcagtctcacaccctgtgggccttttgcgtatttcttcccgggtgagttttctgggcattaacagatgtttgctctgcagacctggccttgtgtcaccctggaactctgtgcccagctcacccttccgtggcttcctgtggccgggggctccctccccttcctgccccaggtctgaggtgccaac

SEQ ID NO: 460281 - DNA, 547 bp, Homo sapiens
tctgcgtcacctccttgcctgggcttctcacagtgcaagccccgcagcctaggccctgctgggtggtggtgggatggctggggaggggcaagagcaggtgaggagtcctcactgggggtgcatactttgcattacagctggggaggctgagacccggggggccacagctggttcctggactccaaagcccaggacccttccaaatcctgcctggacggcaccgtggccaggaccccagccagcacttcccttttctgcgagggttttctgtttctttgattataaaataacccctgttggtggggggaaaaaattagcaaaataaagaaaagcaaaaaaaaaaaagaaaattagaatctcccgcagtctcacaccctgtgggccttttgcgtatttcttcccgggtgagttttctgggcattaacagatgtttgctctgcagacctggccttgtgtcaccctggaactctgtgcccagctcacccttccgtggcttcctgtggccgggggctccctccccttcctgccccaggtctgaggtgccaac

SEQ ID NO: 460282 - DNA, 2733 bp, Homo sapiens
acaccttctagtagctcctggaattccttggtttatggcagcatcactccagtctcttcctctgttttcacatggcttccttctctgtttctgtgtctcaaatcttcctctcctcattcttataaagtcatcagtcattggatttagggccctccctaaatccaggattatgtgtcagacatctgagtcaagcacagaaaagcagctcctcaaagttataacagacccacccagtgactacttcccaggggtcttgaggtgcctcctgccctgtggctgtacggagggcagcactggaacctcgggttcagggcctgtgtgggtggttcacttatgtaagacatcagctgccctgaaagagaactggtgtccttacgagagaagaaagaggcaggtccataaggtatggtcatgtgaagacaggggcagagactggtgttatgctgccacaaatcaaggtgttcctgaagccaccagaagctggaaaaagcagaagcaggaaaccttgatttcagacttctggcttctagaactgtaagagaatacatttctgtcattttaaaccactgactttgtggtcattcattatggaagccatgggacactaatacactcattaagaaaatatgacctatcagcagacaatttctgtattactaaaacaccccaactcttgtcacagaaacacacaggttttggagtcagagagacctgggtttgaatctcacctctaccacctttcaacagaatgtccttgggcaagctgtatagcctcacagcctcttcttgcctaaagaaaggagaatgtaagaccatccttcccagggggttctggagagcagatgtgagatctataaaatcacatccaaactttgtaacaaacgtagaagaccgttcacattttgcccaccactcacccattttccttttgaatcaaatttccatcaattttcctctaaaaacctgtactttagtattaactagctcccaacaccctccctctccactccccacaactcattcacactgtggtataaaacaatggcaacagcctaaaatattgccttccaaagaggactcaaaatcctaaacctaaataatgaattgaatgcatcatcaaacttggaaacacagggcctttccaatggcacccagccatcctgccgtccaggtgtgtttgcccttaggcagcctctggcaatacttggcatgctgccattcatttcttgtgccgataatggtttttttcctggaataggagcgattgacatgacaagaactgagatggggcagttctgatacaactgacaaagaattagcagtacagagcatgagaccctgcataaagacaaatgggagaagccgaagcgcaaggtgtcagcaggtttcgtctcttctgaggcctctctccttggcttgcagatggcctccttctcgctgtgtcctcacgtggccttttttctccatgtgcgtgcatccgtcgtgtctctcttattcttggaagaaaaacatgtgccttctgctaactgtctggtgtgtccagttctgaatgtcaagaccaagtcctgaaaatgggtactggggacgacttaagagcatttgtcaagcaccttgtatgtgtcaagctgatgataggcattgatgctacacagatggttataacctggtccagcaaaatctcttgctgtctggtagggaccaggcaaatacaaatggatgagttaaagtcctgcataatagatacctcattggaactatgaaccaatgactccagagaaagagccacacctgactgcctgtcatcttctgacagaggatgtcatgttgtatgcggtgtgatcatctaccaagatcctaggaccaattatatggctcattgacctgcacgggtacctggaacttcagctcaaacatttacgataaccaagcatccaaaagctatgaaaacacagaactggcagccaatccattaaatcactcaaacatctattaactagcaattgtataaaatttgctggatttgagcactgtaagggtatagaagggcaaatgaagatcaataacaggagaggaaagagaagagtaaaacagttagcatctgttgatggccaggcatcatattaagtatttcatatatattatttaattctgaaaggatctttttgtaagttaagaagctgaggtgacatgagttgctcaagttcacacagacagcaaagggtgagccattgcaatgcaaagcccatgtccaattcctcactccttgctactctagcaagagttctgggggtaagttttgtaaggagagaaagaaaagagagaaaatccttgacagtaagtgaagcaaaagcctggatatctgaatgggaggagacaccgttgcagagcccatccgtcctgattttcccagaggcacgggagcagagcacgtccccaccgaacctaagcacgcggaaagatgcccacagattgctgcatttgtatttttactgagccagcattgaggaattccacagacacatatgttgtgtacatacgtgggctatcactttttaggtggatgtacgtgttaggattatcgaaataagcatccatttaaaagaatgatttgaatttgtacctttctgtcatgaaaattctgttaatggatgtaataaagtcagtcactattctgtgtaaagcatgatgacatttttggatcttggcatcaaatcaggaaactcattttagaat

SEQ ID NO: 460283 - DNA, 2199 bp, Homo sapiens
tccttcctggctctgtgtatgagcacagcctaagctcactttagtgccaaggaggctggggacctgtctacactcttcgatgttggtggcatcatagatgttcctgtacaactacattggccaggacgggattgccagctccatagtgatgctgatcatctgtgggggcctggtcaatggcccatacgcgctcatcaccactgctgtctctgctgacctggggactcacaagagcctgaagggcaacgccaaagccctgtccacggtcacggccatcattgacggcaccggctccataggtgcggctctggggcctctgctggctgggctcatctcccccacgggctggaacaatgtcttctacatgctcatctctgccgacgtcctagcctgcttgctcctttgccggttagtatacaaagagatcttggcctggaaggtgtccctgagcagaggcagcgggtataaagaaatatgaggccccaattggaacagcagcatggagggtcccagttgggtccccaacgtgctccccatgggcaagacaatggaaacttccacaagcagggaaggcaaaccctctttattgaacattagccagcccagcccagaccccagggctgcctaaggacacagagattctccatgggaaggggactgccaagcatgaggaaatagaagattcaggggcctgagctctggaagctgcaagcaaaagggatgggactagggctgagttgtgtctccattttgataaggaaaggatatgctcacactcttgcttgttcagattccaagacagaaggcttcacaaggccaacgcctggaaaatgggcatctctccctcccatgttaagctttaacctctgtaatctgcctgtatctataggtgggcatctcactccatcaaaggagcccagcctctctttgtccctctatccatgcaacagtcttctctgtgcatttccccaagctgggccctcttctactctccatttaggcctgttgataactccattacccacccatcactgctgttcctccagggccagcactcgggcgaggcaggggagctgccttcggtacataatttgaaggggcactccctcttgggcacatgccggccctgagtgcctcccttgcctcactctgatcccggccccataatgtcctcagtggaaggtgatgggggccggtgctgtggggagagtagaaagaggggttggcatgactaaaaataccagtatgtgtattaagtattttgagaatgaaatgccaaggagtgcctactatatgccagctctaggaatggagtagacagtggacacaagaaggacttacgccctgagcacaggtgccaatggtgacaagactggcaagacgtgagggcatgaatggttcattcaggcagctgctgcagatgtggtcacctggtgccatctgctgctcccttttccacttttctatgtcctccttccaccccaagtcccggatcactcgctgttttctggctagctcttggcatctccatctgagcctaaagttgcccactggcaccaatagattctgtttgacctgctgtgcccatgctcatctttgtcggggcttggcttggcagcgagcgaggctggcatggggtgctgaagtggggtctcagtgaggggtgacagcgtgctggcagtcctcacagccctcgctcgctctcggcgcctcctctgcctgggctcccactttggcggcacttgaggagcccttcagcccaccgctgcactgtggggagcccctttctgggctggccaaggccagagcaggctccctcagcttgcagggaggtgtggagcgagaggcgcgagcgggaaccggggctgcatgcagcgcttgcgggccagctggagttccgggtgggcatgggcttggcgggcctgcactcggagcagccggccggcccttccggccccgggcagtgagggacttggcacccgggccagcggctgcagagggtgtactgggtcccccagcagtgccggcccacctgcgctgtgcttgatttctcgctgggccttagctgccttcccgcggggcagggctcgggacctgcagcccgcggtgcctgagcctcccacccgctccatgggctcctgtggggcccgagcctccccgacgagtaccaccccctgctccagggcgcccagtcccatc

SEQ ID NO: 460284 - DNA, 777 bp, Homo sapiens
cttttttttttttttttgaggcggagttttgctcttattgcccaggctggagtgcagtggtgtgatctcagctcactgcaatctccgcctcccaggttcaagtgattctcctgcctcagcctcccgagtagctgggaccacaggcatgcgccaccacgcccggctaattttgtatttttagtagagacagggtttctccatgttggtcaggctggtcttgaactcccaacctcaggtgactcacccgcctcggcctcccaaagtgctgggattacaggtgtgagccaccgcgcccggccaggttttaaatattaatctagcttgctatttcctgcctgagaggtgaaagggaggcctcattacagagaactgagatgaaagcaatgatgaagggaccctgggaccctgcctttcctctccctactcagcaggagcttatgaagtcatctcactttctcttctgtcccccctctcctcttcatgcaggtataaagaaatatgaggccccaattggaacagcagcatggagggtcccagttgggtccccaacgtgctccccatgggcaagacaatggaaacttccacaagcagggaaggcaaaccctctttattgaacattagccagcccagcccagaccccagggctgcctaaggacacagagattctccatgggaaggggactgccaagcatgaggaaatagaagattcaggggcctgagctctggaagctgcaagcaaaagggatgggactagggctgagttgtgtctccattttg

SEQ ID NO: 460285 - DNA, 3264 bp, Homo sapiens
gcagatgctgtcccttcctgcaggttccgaggcctcatcctgctgctgaccttcctaatttacgcctgctatcacatgtccaggaagcctatcagtatcgtcaagtggctgtcttccccaggagctccttttgagtttattccccaagacagctgtgtcggtggctgtggatggaataagcgtgcagggcccctgggctatgtggatgctgctcatgggtctgatgtggctgctttcccctgcagccagttcctgcaggaggagagccgtctgcaccagaactgctcggagcagatcaaacccatcaatgatactcacagtctcaatgacaccatgtggtgcagctgggccccatttgacaaggacaactataaggagttactagggggcgtggacaacgccttcctcatcgcctatgccatcggcatgttcatcagtggggtttttggggagcggcttccgctccgttactacctctcagctggaatgctgctcagtggccttttcacctcgctctttggcctgggatatttctggaacatccacgagctctggtactttgtggtcatccaggtctgtaatggactcgtccagaccacaggctggccctctgtggtgacctgtgttggcaactggttcgggaaggggaagcgggggttcatcatgggcatctggaattcccacacatctgtgggcaacatcctgggctccctgatcgccggcatctgggtgaacgggcagtggggcctgtcgttcatcgtgcctggcatcattactgccgtcatgggcgtcatcaccttcctcttcctcatcgaacacccagaagatgtggactgcgcccctcctcagcaccacggtgagccagctgagaaccaggacaaccctgaggaccctgggaacagtccctgctctatcagggagagcggccttgagactgtggccaaatgctccaaggggccatgcgaagagcctgctgccatcagcttctttggggcgctccggatcccaggcgtggtcgagttctctctgtgtctgctgtttgccaagctggtcagttacaccttcctctactggctgcccctctacatcgccaatgtggctcactttagtgccaaggaggctggggacctgtctacactcttcgatgttggtggcatcatagatgttcctgtacaactacattggccaggacgggattgccagctccatagtgatgctgatcatctgtgggggcctggtcaatggcccatacgcgctcatcaccactgctgtctctgctgacctggggactcacaagagcctgaagggcaacgccaaagccctgtccacggtcacggccatcattgacggcaccggctccataggtgcggctctggggcctctgctggctgggctcatctcccccacgggctggaacaatgtcttctacatgctcatctctgccgacgtcctagcctgcttgctcctttgccggttagtatacaaagagatcttggcctggaaggtgtccctgagcagaggcagcgggtataaagaaatatgaggccccaattggaacagcagcatggagggtcccagttgggtccccaacgtgctccccatgggcaagacaatggaaacttccacaagcagggaaggcaaaccctctttattgaacattagccagcccagcccagaccccagggctgcctaaggacacagagattctccatgggaaggggactgccaagcatgaggaaatagaagattcaggggcctgagctctggaagctgcaagcaaaagggatgggactagggctgagttgtgtctccattttgataaggaaaggatatgctcacactcttgcttgttcagattccaagacagaaggcttcacaaggccaacgcctggaaaatgggcatctctccctcccatgttaagctttaacctctgtaatctgcctgtatctataggtgggcatctcactccatcaaaggagcccagcctctctttgtccctctatccatgcaacagtcttctctgtgcatttccccaagctgggccctcttctactctccatttaggcctgttgataactccattacccacccatcactgctgttcctccagggccagcactcgggcgaggcaggggagctgccttcggtacataatttgaaggggcactccctcttgggcacatgccggccctgagtgcctcccttgcctcactctgatcccggccccataatgtcctcagtggaaggtgatgggggccggtgctgtggggagagtagaaagaggggttggcatgactaaaaataccagtatgtgtattaagtattttgagaatgaaatgccaaggagtgcctactatatgccagctctaggaatggagtagacagtggacacaagaaggacttacgccctgagcacaggtgccaatggtgacaagactggcaagacgtgagggcatgaatggttcattcaggcagctgctgcagatgtggtcacctggtgccatctgctgctcccttttccacttttctatgtcctccttccaccccaagtcccggatcactcgctgttttctggctagctcttggcatctccatctgagcctaaagttgcccactggcaccaatagattctgtttgacctgctgtgcccatgctcatctttgtcggggcttggcttggcagcgagcgaggctggcatggggtgctgaagtggggtctcagtgaggggtgacagcgtgctggcagtcctcacagccctcgctcgctctcggcgcctcctctgcctgggctcccactttggcggcacttgaggagcccttcagcccaccgctgcactgtggggagcccctttctgggctggccaaggccagagcaggctccctcagcttgcagggaggtgtggagcgagaggcgcgagcgggaaccggggctgcatgcagcgcttgcgggccagctggagttccgggtgggcatgggcttggcgggcctgcactcggagcagccggccggcccttccggccccgggcagtgagggacttggcacccgggccagcggctgcagagggtgtactgggtcccccagcagtgccggcccacctgcgctgtgcttgatttctcgctgggccttagctgccttcccgcggggcagggctcgggacctgcagcccgcggtgcctgagcctcccacccgctccatgggctcctgtggggcccgagcctccccgacgagtaccaccccctgctccagggcgcccagtcccatc

SEQ ID NO: 460286 - DNA, 2533 bp, Homo sapiens
actcttgtgtatccccaatgcagcggaatcggtgcaacggtgagccagctgagaaccaggacaaccctgaggaccctgggaacagtccctgctctatcagggagagcggccttgagactgtggccaaatgctccaaggggccatgcgaagagcctgctgccatcagcttctttggggcgctccggatcccaggcgtggtcgagttctctctgtgtctgctgtttgccaagctggtcagttacaccttcctctactggctgcccctctacatcgccaatgtggctcactttagtgccaaggaggctggggacctgtctacactcttcgatgttggtggcatcataggcggcatcgtggcagggctcgtctctgactacaccaatggcagggccaccacttgctgtgtcatgctcatcttggctgcccccatgatgttcctgtacaactacattggccaggacgggattgccagctccatagtgatgctgatcatctgtgggggcctggtcaatggcccatacgcgctcatcaccactgctgtctctgctgacctggggactcacaagagcctgaagggcaacgccaaagccctgtccacggtcacggccatcattgacggcaccggctccataggtgcggctctggggcctctgctggctgggctcatctcccccacgggctggaacaatgtcttctacatgctcatctctgccgacgtcctagcctgcttgctcctttgccggttagtatacaaagagatcttggcctggaaggtgtccctgagcagaggcagcgggtataaagaaatatgaggccccaattggaacagcagcatggagggtcccagttgggtccccaacgtgctccccatgggcaagacaatggaaacttccacaagcagggaaggcaaaccctctttattgaacattagccagcccagcccagaccccagggctgcctaaggacacagagattctccatgggaaggggactgccaagcatgaggaaatagaagattcaggggcctgagctctggaagctgcaagcaaaagggatgggactagggctgagttgtgtctccattttgataaggaaaggatatgctcacactcttgcttgttcagattccaagacagaaggcttcacaaggccaacgcctggaaaatgggcatctctccctcccatgttaagctttaacctctgtaatctgcctgtatctataggtgggcatctcactccatcaaaggagcccagcctctctttgtccctctatccatgcaacagtcttctctgtgcatttccccaagctgggccctcttctactctccatttaggcctgttgataactccattacccacccatcactgctgttcctccagggccagcactcgggcgaggcaggggagctgccttcggtacataatttgaaggggcactccctcttgggcacatgccggccctgagtgcctcccttgcctcactctgatcccggccccataatgtcctcagtggaaggtgatgggggccggtgctgtggggagagtagaaagaggggttggcatgactaaaaataccagtatgtgtattaagtattttgagaatgaaatgccaaggagtgcctactatatgccagctctaggaatggagtagacagtggacacaagaaggacttacgccctgagcacaggtgccaatggtgacaagactggcaagacgtgagggcatgaatggttcattcaggcagctgctgcagatgtggtcacctggtgccatctgctgctcccttttccacttttctatgtcctccttccaccccaagtcccggatcactcgctgttttctggctagctcttggcatctccatctgagcctaaagttgcccactggcaccaatagattctgtttgacctgctgtgcccatgctcatctttgtcggggcttggcttggcagcgagcgaggctggcatggggtgctgaagtggggtctcagtgaggggtgacagcgtgctggcagtcctcacagccctcgctcgctctcggcgcctcctctgcctgggctcccactttggcggcacttgaggagcccttcagcccaccgctgcactgtggggagcccctttctgggctggccaaggccagagcaggctccctcagcttgcagggaggtgtggagcgagaggcgcgagcgggaaccggggctgcatgcagcgcttgcgggccagctggagttccgggtgggcatgggcttggcgggcctgcactcggagcagccggccggcccttccggccccgggcagtgagggacttggcacccgggccagcggctgcagagggtgtactgggtcccccagcagtgccggcccacctgcgctgtgcttgatttctcgctgggccttagctgccttcccgcggggcagggctcgggacctgcagcccgcggtgcctgagcctcccacccgctccatgggctcctgtggggcccgagcctccccgacgagtaccaccccctgctccagggcgcccagtcccatc

SEQ ID NO: 460287 - DNA, 905 bp, Homo sapiens
gttgctccgagccctcgcctggcagctcactctggatctgcgggttctgaggagcctcgggacccacctgggtgcagttgccttcagggacagaccatcttacagatgcaataacctgcttgacattctcctctggaaaaggaaaagaactacgagaggaagcatggcacttggatgcagaaattgagcaccctccatgtgatccagagaacagcaactcatacgtcttctggaaccttctaccaacagtagaacctcttagctttatggagaaaacagagtcattctgtccagaggtgccaccccaagactgtggagcctctcctcggccctcgctgaggagcctgccaaagaaccaggggagtctcctccagtttgaccggcaagccccaggccgcatctccacctcgcccactttgaggagattaaggacccgtggctgtgggacaaggcaggatgcctggcaggtgaccacctggggaagctggggagctcctgtgggcttcccatgttacctttcgaagagcctgccaggaagcccaaaggattcttcacacttgctgtcacccttgagactccactcaagattgacctctgaacctgaaagggccctgaatgcagctgactcactggagccccaaacccggcccactgacaagtatctccctcctgagcttcagcctgtcaatgaagggtcccttcaccaggcctctcttcggcagcaagaaggccacttcctgcccagccccaccctacgacaccctagtcctcaggcactttgagaaaggatgcaccaaggccaggcttaccgatggtctgtcaggtacccgagagcaatgggggccctcttgcaaatgcacactatttaaagacaacgtcgtgtcactgatttaaaaggggagaaa

SEQ ID NO: 460288 - DNA, 3046 bp, Homo sapiens
  misc_feature (77)..(77): n is a, c, g, or t
  misc_feature (89)..(89): n is a, c, g, or t
  misc_feature (168)..(168): n is a, c, g, or t
  misc_feature (305)..(305): n is a, c, g, or t
gctccatgacctgcacccccaggcaacccggtggtagttctgtgtccacgcaggttctgtgtccacgcaggctatgngtccacgcaggntctgtgtccacgcaggctatgtgtccacgcagggtctgtgtccacgcaggctatgtgtccacgcaggctatgtgtccangcaggttctgtgtccacgcaggttctgtgtccacacaggttatgtgtccacgcaggttctgtgtccacgcaggctatgtgtccacgcaggttccgtgtccacgcaggttctgtgtccacgcaggttctgtgtccacncaggctatgtgtccacgcaggctatgtgtccatgcaggttctatgtccacgcaggctatgtgtccacgcaggctatgtgtccatgcaggttctgtgtccacgcaggttctgtgtccacacaggttatgtgtccacgcaggttctatgtccacgcaggttctgtgtccacgcaggctatgtgtccacgcaggctagtggattgagcggcggatgcttttacgatgccctgccccccaccagccccgcgggacgggacgactgcagtgaggccgtgagagtccccggagccctgaaagtcccagagccaaaggagcatttgagcgggaaatgcagtgccgcctgggcactctctgaccgctgagtgaagacacacctgggcataaaactttgcaaggctcctccgagcatgtgggggcccgaggccagggagtatttcttcttctttctagtttatatatttcccaatgttctacaatgaaatggtattacttgtaaaacggaattcactttagtttaaaactgaaaatcaaatcaaggactgaccaccaccttcacttgggaacaggcagcctgactgcttgtgagggggccccggaccccgcagagcctcagggcagcagggacactgaagaggatgatggacagaaaccgccccccgtcctccgcagcttcccaagcctgactctgtggccacctgcagctcaccggagagaagcatcgaagacaaaacaggacggagcacagggcccgggtctcttgcctgactcaccacgttccgtaaaagatgaacgagtccagtccttgcctttccccgcacctggaggtaaaccgtgaactgaaactctcgtaggcgcaacttcacggggctgctcctgagctggaggcctcggtccaccggcctcagtcagatttccacatgaaactaacttgtattttccttcagtcaacaggcccctaaggaaaatgtggttttccaaaaattgtctcaaaaggaaacctgaacactttaagagatgaataaccactgaatgaactgaaagggttttgccaaagaattatttccatacgtgatgccagaccagtacaactttataggtgggttagttcaaacttttaaggaacagagctccaatgccatatacattgaaaattcatagaaatatttggaaagctccccacttaattttatgaacctagtataactttgatattaaaacttggcaaagatagtatcacaagacgaattataatataatctcaattacgaatgtagatataagaattccaaataaattcttaaatgtaaattcagtcaccattttaaataaagaatatatcaaattcacagaatttattccttgaaggcaaggatgaattaatattataaaatctaataacttaattatatcaataggttaaatgagaaatataatcatttgattgtcaatagataacaaaaaggcatttgataatgtttgatatccattaaccttaattttaatcaaaaccataattaatgttaaaatttgaactgtgcggcaaggcttataaccaaatgctgtagccccttacctaatctgtctgacttctagaaagttcttcctcttcagaggccaccactttcagctctttgcagaaatttttttaggtatttacctacatatttctaaataacacacttaccttgttgttgcttggtttttgagttttatatattatctgttgaccgtagatgggaagatgaaagttaagttctcttacatggcctctatcaccacacagacccatgaacttcttttcttcctattttttttggataaatcacaattttttatttatttatttattttttgagacagagtcttactctgttgcccaggctggagtgcagtggtgcaatcttggctcactgcaacctctgcctcctgggttcaagggattctcctgcctcagcctcatgagtagctgcggctacaggtgcccgccaccatacctggctaatttttgtatttttagtagagacggggtttcactatgttggccaggctggtctcgaactccggacctcatgatctgcccaccttggcctcccaaagtgctggaattataggcgtgagccaccgtgcccggccatagtttttcattaaatcaaagttagtgtttgtgttaggtaaatatgactcagatctgggctatgacataaaatttgattacatttcctttgttgtataactatagtttcctgatgttaatattgcctttctttttcaccccccccccccattttctttttttctttgacacagggtctccctgtgttgcccaggctggagtgtagagactccatctctaaagtaattaattaattaattaattaattaaattattttttcagatttcaattctttgctgaagtttttcagctttttatttaacttattcgatccctccttgaattctgtaatactgatgtggtttggctctgtgtctgcacccaaatctcatcttgaattgtaatccccacatgtccagggagggacctggtagaaggtgactggatcatgggggcgattcccccatgctgttctcatgacagtaagttctcacaagatttgatggcttaaaagtgtttggcaggctgggcgctgttggctcacacctgtaatcccagcactttgggaggccaaggcgggtggatcacaatgtcaggagttcaagaccagcctgaccaacatggtgaa

SEQ ID NO: 460289 - DNA, 624 bp, Homo sapiens
  misc_feature (3)..(4): n is a, c, g, or t
  misc_feature (7)..(7): n is a, c, g, or t
  misc_feature (15)..(15): n is a, c, g, or t
tcnnttnccccaaancctaatgccatgtctggcacaagatttttacagctggttaacaatagctgtaaattccttggtgttactctcatctggagaaggaggttctggaattggttcccagaactgctgctgtcgttgcaggtttgaaatcctcagggaaatactgcagctgaccccagagaaacttgcaagaacatgcttgaaaatgggaaacatattagaagcagaggttcttagtggcaaagaatttaacgtaatgtcctcgaggttcatccatgttgtagcatttgtcagaattttcttcctcttgaaggctgaagagcagtccgttgtatgtacataccgcattttgtttatccattcatccattgatagacacttgagttgcttccacatttttgctattgcgcataatgctgccatgaacatgggcatcagttgcagctgttttttctccaagaaaatgacatcctgagctaagccagactgtctctcgcttacccctcaactgtgccatttatgagaaaattcaaactttgtctaatgctacaagctgggaaactatgtctacaaccaaaataaaggatttaaatcttgattactcatgggcttaaatcatacctg

SEQ ID NO: 460290 - DNA, 777 bp, Homo sapiens
ggacgagcacccggcggcggggcacatgctgcccccgcccctgcgcgcctgcggctcccggctctccctcccctgcgccgcgctctcgcctcgctttccgcgggagccttccaaccggttctcggctagggagaaggacgggagcggtgggaagagcgagggtgtagagagggaagttagggctttcgctttctccccccactccagcggcggcgttcggtcctctgggtggaatgtgctcgcagcagcagtgacggcggccacagcacgggaggcacccgagccatacaccctgcagctggagagaaaaggatggccgaggaggaagtcccagggccgcgaagctacgacggagatccgtcctggaaaagccttctccaccctgggcactttaagcggcggtggcggcaaacggcaggaggttgcagacccgacagcgagactccctcattccagtcttgctctgccctccggagatgacaagtgagaaagaagtgtccggccgggccatccccttcagagaagcaaccacttcacaagaagattctgaagttggccatttttgatcccagaacagtttctcatagattagaaatattggagtctacacaaaaatcgatattcatttacaagatcatcactaaacttatcttgcataacttaccaagaataactgtaaaatgtgctgggaatgcaatgtcctgagataaggaagaactgcctgaaacagcctggatcttattcctgtacttcctagggaatgtaacatctcaagtt

SEQ ID NO: 460291 - DNA, 1073 bp, Homo sapiens
agcacagggttccggggtcacagccttgggagttgagtttttgccagtgggattccctggcaggagggggaggaggtcagcttcctccctgatcagccaccatggatctggggctgctgtggctgtggactcgactgttccggctgggaacctacctgactcacacaggggctccctgggacatgcgtgggggccctgccatttccattcctttccccaaccgggctctgtcttttcaaagagccagccttgggggaggccgagccgaggaagctgtatccttgctgcagtggctctgttcccacgtgagcaccgtggccatcgtggactctcgcaccctcctgctcctgcagctattgaggcctccgggccggccccacctctctctcagaactgtgtcccctcctcctttctccccacactcccaggccccaggcaccctatccttcggctgcatataccactcccagggggaaccaggacccctcgccaccgggccttcgctgttgctgttccccacttgttcctgtccaagtcttgagccctccaaccacaagaaaatgaatccagccagcaacctgaatgagctgggagccgacacatcccagagcctccagaaaggagcgcagcccctggacatctctactgcagcctgtgagactctccgcggaggacgcggctgagccatgctgacgtgcagaacttccagctatggaatttgtgtttaggctgttcggtttgtggtcatttgttacagagcaatagaaaaataatacagtgagtatgtctcaaatatcgcacaggacatggactgaaaaagcatcagtcaaatttaactgggtcttctgtcattttgtctgctaaatctggcaacttaaatcccaggaaggggcccatggacttcggactgcatccatggcacaaaaagatgaagaaccgggctagaggccaggcccagtggctcatgcctataatcccagcactttgggaggccaagacaagtaaatctcctgaggttaggagtttgaaaccagcctggccaacatgctgaaaatacaaaattacaaaaaata

SEQ ID NO: 460292 - DNA, 1353 bp, Homo sapiens
tgagttcatgtcctttgtagggacatggatgaagctggaaaccatcattctcagcaaactatcgcaaggacaaaaaaccaaacaccgcatgttctcacccataggagcatgaaccctgttgtgaactgtgcatatgggaaatctagattgtgtgctccttatgagaatctaactaatacctggagaaaaaaaagcaagttgtttccagtaatactaacatctaaacatcttggtgatgatatatttgttacttttattgttaaaaacaaaatttctcattttattttgcattttgaaaaaggagacaggaggagagaagaatcatggactccctgggcacagcaccgcaggtggctttgccagttctcccagccccgcgctgctcctgcgcctgcgctgagcctccacgtgtcctcaggagacttagcctagcctgggtatcaccagcagtgggccaggccgctttgccttcaactcccaacagtaaccttgcagaggtcagcctggggccaccaggaggagttagtaagagcttatcctgtgggggcactcactggggctggtggccgggaaatcccaggtgttttgttggtttgagttttgttgtgtttttatttttcttccgctgagatcaggactgaagcagggacgcagtgctcagcacgcccagcccaccgcgggccactgcgcggagaacctctgccagggtcgcctgctcacgtcccctaatccgctcctggcgcgcgttcctgtcctcctcctgctgtgactagtgtgcatggaagggcacagtggtggcagaaagacttgtggcgagatatcaagatccacaggaagtcataagagaaaaagcattttgtttgaactccacccactgaccttttgtggtttggcagggccagctgctggcaggctcccccagtgctgaatgctccgcgctccactgtgctgggcctgctgaaaaagcagacagcgctccctctcccccagaatcaggagccaaatgccacaccgattgtgcaacttgtctctggttaccaggaaaacgtaaagaaatgccaatgaagcagaaaggtcgacaaaattctttccaacgcttgaacaaaaaaggtatttttagggccctagatttatggaagtcaattcttccactcctcgccaggctttcaaacctcctattctttgcactacattatttgaataaaccgtaaatacccttagttgctctaatagcaactgctggtccatattgtgcaaggcggccatggtctgaagaccttgttgaatttgaaagacagaagttccgtttctggcacataaacttgaatcagggctatagttaagagtgccagt

SEQ ID NO: 460293 - DNA, 1524 bp, Homo sapiens
tgagttcatgtcctttgtagggacatggatgaagctggaaaccatcattctcagcaaactatcgcaaggacaaaaaaccaaacaccgcatgttctcacccataggagcatgaaccctgttgtgaactgtgcatatgggaaatctagattgtgtgctccttatgagaatctaactaatacctggagaaaaaaaagcaagttgtttccagtaatactaacatctaaacatcttggtgatgatatatttgttacttttattgttaaaaacaaaatttctcattttattttgcattttgaaaaaggagacaggaggagagaagaatcatggactccctgggcacagcaccgcaggtggctttgccagttctcccagccccgcgctgctcctgcgcctgcgctgagcctccacgtgtcctcaggagacttagcctagcctgggtatcaccagcagtgggccaggccgctttgccttcaactcccaacagtaaccttgcagaggtcagcctggggccaccaggaggagttagtaagagcttatcctgtgggggcactcactggggctggtggccgggaaatcccaggtgttttgttggtttgagttttgttgtgtttttatttttcttccgctgagatcaggactgaagcagggacgcagtgctcagcacgcccagcccaccgcgggccactgcgcggagaacctctgccagggtcgcctgctcacgtcccctaatccgctcctggcgcgcgttcctgtcctcctcctgctgtgactagtgtgcatggaagggcacagtggtggcagaaagacttgtggcgagatatcaagatccacaggaagtcataagagaaaaagcattttgtttgaactccacccactgaccttttgtgggtgagctttcggtgaaacagcaacatcctcagaaatcttagagacacggctttgtaacccgggggagagacaccgcttccaaatataattgacgtggctttcctgccttaattcggggtatcctttttccaccacataatcttccctttgtccgcgctgattcctgtttagtttggcagggccagctgctggcaggctcccccagtgctgaatgctccgcgctccactgtgctgggcctgctgaaaaagcagacagcgctccctctcccccagaatcaggagccaaatgccacaccgattgtgcaacttgtctctggttaccaggaaaacgtaaagaaatgccaatgaagcagaaaggtcgacaaaattctttccaacgcttgaacaaaaaaggtatttttagggccctagatttatggaagtcaattcttccactcctcgccaggctttcaaacctcctattctttgcactacattatttgaataaaccgtaaatacccttagttgctctaatagcaactgctggtccatattgtgcaaggcggccatggtctgaagaccttgttgaatttgaaagacagaagttccgtttctggcacataaacttgaatcagggctatagttaagagtgccagt

SEQ ID NO: 460294 - DNA, 1569 bp, Homo sapiens
ctgagccatcattccttccaggggagcctctcgggaggcctacctgctggagcacagccacaatgggggaccagttcatcatgctgagctgcgagtggcctggcggcgagccccctgccacgctgggctggcttgacgaacagcagcagcccctgggcggcagcagctcctcgatggccgttcacctcctgcaggcccaagaagatctggctggcagagagttcacctgccggggcactcacctgctcaggacccctgacccccactgccacctccagctggggagcaaaggcaccaacagaggggttccagagaagatgctgaggcaccggcaggccttgaaacaccaaccaccaccccaggtttggatcctgcacaagaaaccacggattctccagtgaatgtcaccatcacagtgactgcaacaccataaggcccaaagaggaagatgcaaataggcttagggagggcaggtgggatttgggaagagcccttctgtcagactttggtcataaaaccaacgtagctaagacaccaactaccactttcacttaatacccagtcttcacaactggtacaaggcccagctgcagtgtccctaagtgacatggttacaagagaagccctggcccaccttgtggaagacagaggtggcaggacaaggaagaggacccacaatggggagacagggatctctgggtgtggaggtggtagacagggggcgtcaaggggagaaatgtggacctctggaagacgaagtcataagcagagctctgcccgcggaggccagagagcagcttctctggctgcggagttggagcctcggaggaattccacggcagggatagatcacagcatacggaacgggactggttccatccaaagagtgaaccacaatgcttttggaaagcagtatggaaaaatgggaggagcccagattatggctccagataaactagatgagttgtgggggttaaatgagttaacagtaacaagcaccgagcacagtgcctggtacacagtagttattcagcacgtgttagtgctgtctcccacactgtaccatgtcctctcatttcctggtgaagtgacattaggtaggactgtttgggtgcctgtgcagggcagagccaactcacgcttagggagaactcataccgcctaaatataaaggcaattatatatatatatatatatgtgtgtgtgtgtgtgtgtgtgtgtgtttatatatatatatttatatatttcaatatataaaggcattttttataaataaaatacaataaaaagaataacacttaaaacagcgttactaataatataaataaagcagtccacaatgagattgtcctaaaggtaaagccattttctcttcctcgtggacagatcccatattcaaactcaatctttaaaagcagttcatgacctaaggctcatgctaatacacctgtttcctaaatcaaaatggctgtctacggacaatgactccccagttttctaaaactccctttgtgacagcattgctgtaacttgattggctaacacagggtatgttttcatattctgtgc

SEQ ID NO: 460295 - DNA, 1098 bp, Homo sapiens
acaacatgtgaggcatttgggaatgtctcagttaacgtggtacataagttccttgctctaatagagctcacatttggatgtcttctaattctgaacctgaatgtaagagcacaatacaatcaatgaagcagtgagcccaggaagccatggatcttcacaagcctcaggaaaagtcaacatttaaaattttctatttaaagtccaagggcacagcaagctcttggtctatatgggaaggccatggactacaattcccacaagtccgtgcgacctctccgttctgcgcagcttcgcggtatgaggaagagggtcctgtcaggcgcactcttgttgcatcatcagcgtgcacctccacgatgaaacaggtctgggctacaaaagtatggccgcttctgaggcggcggtggtgtcttcgccgtctttgaaaacagacacatcccctgtccttgaaactgcaggaacggtcgcagcaatggctgcgaccccgtcagcaagggctgcagccgcggtggttgcggccgcggccaggaccggatccgaagccagggtctccaaggccgctttggctaccaagctgctgtccttgagcggcgtgttcgccgtgcacaagcccaaagggcccacttcagccgagctgctgaatcggttgaaggagaagctgctggcagaagctggaatgccttctccagaatggaccaagaggaaaaagcagactttgaaaattgggcatggagggactctagacagcgcagcccgaggagttctggttgttggaattggaagcggaacaaaaatgttgaccagtatgttgtcagggtccaagagatatactgccattggagaactggggaaagctactgatacactagattctacggggagggtaacagaagaaaaaccttacggtatgaagctcatctaatgtaggcctcttttctaacatttaggaaaagtttctgtgcaggtagcattttaaaacaaatctctgatattatcagccattttaattctcagtgtgtttctttgggctaagaagattggaaattgtttatcgcattgttgcttacttgataggagtttttgaataaagatttattg

SEQ ID NO: 460296 - DNA, 973 bp, Homo sapiens
ataagcatcagacaggcatttacaacatatgggcaacatatgttgaaatatgttagtgtttaaatgaaaacactaaaacaattcttagtatgagacaaaactgtaaggaaaaagagtgttaataccatgatgcattaacataaaatatcaaacacacaaagtcataaaatgaaaatttacagttttacctgttcatatctagtgccccacagtgtgtgtcaaccaaaggtggcagtggctacatctgcctgttggactggtacaggttacaatatgtcctcttccattgcaaattaaagtccaaatagagaaatacttaggttttagaacacatcagaggtatttctgctgtatttttcaccttaaaaattgacacagagtttactaatagaggagtagagattgttgaccatttttaaaaaacgatagccactctttttcttttatgtttaaaactgaagttttgccaaatgggaaaattactgttacctctaccatcttaatgtagtaactttagaatttaaatttttatattactattttcctttttgttgttcacatagtcttaaggcacctatacttttaaattgactttttcatttgatattatctatatgtatgtagttgtgataatgattattttaattatattactttatactcttaatttatttagagtatttctctattgctgaatacttaagtagttttaaattttattatgataaattcctgggagggggattatttagtgaaataatatgaagaactttatgacttatgtttgccttattgcattcccaaagagttgtaacattttacagtgttaccatttgagtaggggttttatatgttgttgctaatttagtaaacataggagagaaatcaaagtttttctgatttgcttttatgtgatttatctgtatactttgttcatttatataaataaatgtcttaatggtttctatacata

SEQ ID NO: 460297 - DNA, 1969 bp, Homo sapiens
acaacatgtgaggcatttgggaatgtctcagttaacgtggtacataagttccttgctctaatagagctcacatttggatgtcttctaattctgaacctgaatgtaagagcacaatacaatcaatgaagcagtgagcccaggaagccatggatcttcacaagcctcaggaaaagtcaacatttaaaattttctatttaaagtccaagggcacagcaagctcttggtctatatgggaaggccatggactacaattcccacaagtccgtgcgacctctccgttctgcgcagcttcgcggtatgaggaagagggtcctgtcaggcgcactcttgttgcatcatcagcgtgcacctccacgatgaaacaggtctgggctacaaaagtatggccgcttctgaggcggcggtggtgtcttcgccgtctttgaaaacagacacatcccctgtccttgaaactgcaggaacggtcgcagcaatggctgcgaccccgtcagcaagggctgcagccgcggtggttgcggccgcggccaggaccggatccgaagccagggtctccaaggccgctttggctaccaagctgctgtccttgagcggcgtgttcgccgtgcacaagcccaaagggcccacttcagccgagctgctgaatcggttgaaggagaagctgctggcagaagctggaatgccttctccagaatggaccaagaggaaaaagcagactttgaaaattgggcatggagggactctagacagcgcagcccgaggagttctggttgttggaattggaagcggaacaaaaatgttgaccagtatgttgtcagggtccaagagatatactgccattggagaactggggaaagctactgatacactagattctacggggagggtaacagaagaaaaaccttacgataaaataacacaagaagatattgaaggcattctacagaaatttactggaaatataatgcaagtgccccccctctattctgcattaaagaaagatggacaaagactttcgactttgatgaagagaggtgaagtcgtagaagcaaaacctgccaggccagtgactgtatacagtatctcccttcaaaaattccagccaccatttttcacattagatgttgaatgtggaggaggtttttatatcagaagcttggtcagtgacattggaaaagaactatcttcctgtgccaatgtgctagagctgacccgaaccaaacagggaccatttacgctagaagaacatgcccttcctgaagacaaatggacaattgatgacattgcacagtctcttgagcattgctcatctcttttcccagcagagttggcacttaaaaaatcaaaacctgagtctaatgaacaggttttgagctgtgaatatataactctaaatgagccaaagagagaagatgatgtaattaagacgtgttgagattggcctgggaatatcatcattttctagttgacatttgaatcctgtgtgcagatgcagaatgacaagctgcattcaaaagacaaacaatatgtcttttttttttttgcatgaagaaaaatgtctatcatttacagtttcaatagcacataatttattttctatgcattataaatggccttgcagttggctcagttgtttgttgtgttgtgaaatgttttaggattttttgtattgtgaaaatatgaatatgattggattcagaaaaattaactttctgaatttgatctgtcttcagtcttgtgaaaaagttgaacaaatttcctaatcaaagaaaaaagtatgagctccatgtttctttagtttcacaaaaatgaccataatttagtgttatttttactttatttaggcctctctgtccagtatttttggcttttgtagctctctcttttagacaaagcagcttcttcagtcatatcctcttcttctaagatacactcagtcttacagggaattcagactctatgaactatatac

SEQ ID NO: 460298 - DNA, 5175 bp, Homo sapiens
acaacatgtgaggcatttgggaatgtctcagttaacgtggtacataagttccttgctctaatagagctcacatttggatgtcttctaattctgaacctgaatgtaagagcacaatacaatcaatgaagcagtgagcccaggaagccatggatcttcacaagcctcaggaaaagtcaacatttaaaattttctatttaaagtccaagggcacagcaagctcttggtctatatgggaaggccatggactacaattcccacaagtccgtgcgacctctccgttctgcgcagcttcgcggtatgaggaagagggtcctgtcaggcgcactcttgttgcatcatcagcgtgcacctccacgatgaaacaggtctgggctacaaaagtatggccgcttctgaggcggcggtggtgtcttcgccgtctttgaaaacagacacatcccctgtccttgaaactgcaggaacggtcgcagcaatggctgcgaccccgtcagcaagggctgcagccgcggtggttgcggccgcggccaggaccggatccgaagccagggtctccaaggccgctttggctaccaagctgctgtccttgagcggcgtgttcgccgtgcacaagcccaaagggcccacttcagccgagctgctgaatcggttgaaggagaagctgctggcagaagctggaatgccttctccagaatggaccaagaggaaaaagcagactttgaaaattgggcatggagggactctagacagcgcagcccgaggagttctggttgttggaattggaagcggaacaaaaatgttgaccagtatgttgtcagggtccaagagatatactgccattggagaactggggaaagctactgatacactagattctacggggagggtaacagaagaaaaaccttacgataaaataacacaagaagatattgaaggcattctacagaaatttactggaaatataatgcaagtgccccccctctattctgcattaaagaaagatggacaaagactttcgactttgatgaagagaggtgaagtcgtagaagcaaaacctgccaggccagtgactgtatacagtatctcccttcaaaaattccagccaccatttttcacattagatgttgaatgtggaggaggtttttatatcagaagcttggtcagtgacattggaaaagaactatcttcctgtgccaatgtgctagagctgacccgaaccaaacagggaccatttacgctagaagaacatgcccttcctgaagacaaatggacaattgatgacattgcacagtctcttgagcattgctcatctcttttcccagcagagttggcacttaaaaaatcaaaacctgagtctaatgaacaggttttgagctgtgaatatataactctaaatgagccaaagagagaagatgatgtaattaagacgtgttgagattggcctgggaatatcatcattttctagttgacatttgaatcctgtgtgcagatgcagaatgacaagctgcattcaaaagacaaacaatatgtcttttttttttttgcatgaagaaaaatgtctatcatttacagtttcaatagcacataatttattttctatgcattataaatggccttgcagttggctcagttgtttgttgtgttgtgaaatgttttaggattttttgtattgtgaaaatatgaatatgattggattcagaaaaattaactttctgaatttgatctgtcttcagtcttgtgaaaaagttgaacaaatttcctaatcaaagaaaaaagtatgagctccatgtttctttagtttcacaaaaatgaccataatttagtgttatttttactttatttaggcttcctggtggcttcattttattgaaattctttaaattgtttaaagtggccattattgatctctttcttctgttttggagagtttattattaaaaacatttctttgataaaatggccatcatctagtaatacctgtgtttgtttagatcttggaaatgaataagctttgataatatttgtaaatgaaccaaattattactgctaccactaacaggttgtaaatagaagactaatacttaattaaagtcaccttcctaccattagagcagaagacagctcctatagttttgtattttggcagctatgagatattttcatggtaatgtcaacatggtcaagcactttgtaccaagttattaagtaacataatttttaaaatttaaagaatgtgtcttcaactaaaaactttattctttagcatttatttatatttctctgtagggtgttccctgtgacattgtctctttagtttgctctttcaagagatacttacagatgttgagatggctgccctgcatttccagctaatctcttctgctctaaatatttaaaaacagttcttctcaaacattttcattcagatagctttctgaaagttccctatccctctttaccataattttttaaatgtagccacattgtaatagtaaacttcatatataatgagtgcttcatatttttgttatgggaaagcaatatattatgcagccagtctgtagaaacattcagatccctcttcctttactcaaatacagtttcaaaaggaagactcatgagaaatttcataaaatacaagtttttagatgtttatgctttgcctttctttttaaaggtgttttcctgctttgtagtctctaactctgaaatttaaaatatgtaaactaaagtggttttatttgtgcttaacccaatttaaactcaatgtaaaatgttatatatgcatcagtacagcattttcaacatattggcaacatattttaaatgaaaacactaaaacaattcttagtatgagacaaaactgtaaggaaaaagagtgttaataccatgatgcattaacataaaatatcaaacacacaaagtcataaaatgaaaatttacagttttacctgttcatatctagtgccccacagtgtgtgtcaaccaaaggtggcagtggctacatctgcctgttggactggtacaggttacaatatgtcctcttccattgcaaattaaagtccaaatagagaaatacttaggttttagaacacatcagaggtatttctgctgtatttttcaccttaaaaattgacacagagtttactaatagaggagtagagattgttgaccatttttaaaaaacgatagccactctttttcttttatgtttaaaactgaagttttgccaaatgggaaaattactgttacctctaccatcttaatgtagtaactttagaatttaaatttttatattactattttcctttttgttgttcacatagtcttaaggcacctatacttttaaattgactttttcatttgatattatctatatgtatgtagttgtgataatgattattttaattatattactttatactcttaatttatttagagtatttctctattgctgaatacttaagtagttttaaattttattatgataaattcctgggagggggattatttagtgaaataatatgaagaactttatgacttatgtttgccttattgcattcccaaagagttgtaacattttacagtgttaccatttgagtaggggttttatatgttgttgctaatttagtaaacataggagagaaatcaaagtttttctgatttgcttttatgtgatttatctgtatactttgttcatttatataaataaatgtcttaatggtttctatacatatttgcatgagttatttgtgttgtaaatacctgatagaaggatttttcacggtctgttgtccttttagttttaattttcatttttgctaactaaatttgctaattctaataactcttccccttttatcattgtcagattaataagtatgaaaaattttaaatttattgagactttaaaatcttactaactctcataagcagttgaaactgagatactctgaaaagttcaagactcattcataaaacaaattagttttccctgatagtctggtatttaaataccaactcagtttttttttcatttttatcaaaatattcaagaaatttctgtgtcttatatttttctaggtctaaaccttcatgacatgataaagttgttttacttgtaagaaaacgataaaagatttaaaaaatcctgaaaatgtttcaacctggaacataccaaatcacttcattttgacactttaagttttttatatttgaaaaataatgtcttaaaagttgttaaaagtcatagaattattttatttatagtcttaaaatccaggacctttatgtaatagaaatttgctctttgcaaattcaaagttttgaaatgtgaataaaggctaaacacagtttcctctacctgtactgactagatatttttttcttaaatacttgaattaaaacaagccattgactcatcatcagaaatgagttactgtattaaataagagtgctttgtatcagatcttcagtacattttatgtcccctgaccagtttgaaatttgtatcagatttacaatgaacattttgaggttcaattagatggtgaattgttctgtttcaaagaaaagaaatataaatattttatctaggttttgctgatggcagtcaagcatgaacacaacccactgtttgagaagctgtaatttctgaatttctgcagagtgcacatctaggccagcaaatggcagtaagagtgaggtggatttagctcagtgtaaggatgaactccagaaccatcggctctgactgaaagtgaagcggcagccgcgttgtgggaaagctggctggagtctctctcataagcaggcattctttttctccagcccgtcactgtgttggtttgggcccacgtttgtggcacattctaggcactcgccatcatgaaataaacctctggagctgtgatattacaaacgtggaaagatgacgagcactcagcaactttcaatgaagcgaagagacaaggagcaatcccatgtgtaatagaaaaaggcagcctgaattgttgttgctgtttttgaaatttaagctggttttcgattaaattcagtaaatggtccaggactataaatgttgaacattttttaccgtgtgatttaaattttagtcttattgttttttttttttttgatggtttacattttccccatgggaagcagctatgtcatgtc

SEQ ID NO: 460299 - DNA, 3733 bp, Homo sapiens
acaacatgtgaggcatttgggaatgtctcagttaacgtggtacataagttccttgctctaatagagctcacatttggatgtcttctaattctgaacctgaatgtaagagcacaatacaatcaatgaagcagtgagcccaggaagccatggatcttcacaagcctcaggaaaagtcaacatttaaaattttctatttaaagtccaagggcacagcaagctcttggtctatatgggaaggccatggactacaattcccacaagtccgtgcgacctctccgttctgcgcagcttcgcggtatgaggaagagggtcctgtcaggcgcactcttgttgcatcatcagcgtgcacctccacgatgaaacaggtctgggctacaaaagtatggccgcttctgaggcggcggtggtgtcttcgccgtctttgaaaacagacacatcccctgtccttgaaactgcaggaacggtcgcagcaatggctgcgaccccgtcagcaagggctgcagccgcggtggttgcggccgcggccaggaccggatccgaagccagggtctccaaggccgctttggctaccaagctgctgtccttgagcggcgtgttcgccgtgcacaagcccaaagggcccacttcagccgagctgctgaatcggttgaaggagaagctgctggcagaagctggaatgccttctccagaatggaccaagaggaaaaagcagactttgaaaattgggcatggagggactctagacagcgcagcccgaggagttctggttgttggaattggaagcggaacaaaaatgttgaccagtatgttgtcagggtccaagagatatactgccattggagaactggggaaagctactgatacactagattctacggggagggtaacagaagaaaaaccttacgataaaataacacaagaagatattgaaggcattctacagaaatttactggaaatataatgcaagtgccccccctctattctgcattaaagaaagatggacaaagactttcgactttgatgaagagaggtgaagtcgtagaagcaaaacctgccaggccagtgactgtatacagtatctcccttcaaaaattccagccaccatttttcacattagatgttgaatgtggaggaggtttttatatcagaagcttggtcagtgacattggaaaagaactatcttcctgtgccaatgtgctagagctgacccgaaccaaacagggaccatttacgctagaagaacatgcccttcctgaagacaaatggacaattgatgacattgcacagtctcttgagcattgctcatctcttttcccagcagagttggcacttaaaaaatcaaaacctgagtctaatgaacaggttttgagctgtgaatatataactctaaatgagccaaagagagaagatgatgtaattaagacgtgttgagattggcctgggaatatcatcattttctagttgacatttgaatcctgtgtgcagatgcagaatgacaagctgcattcaaaagacaaacaatatgtcttttttttttttgcatgaagaaaaatgtctatcatttacagtttcaatagcacataatttattttctatgcattataaatggccttgcagttggctcagttgtttgttgtgttgtgaaatgttttaggattttttgtattgtgaaaatatgaatatgattggattcagaaaaattaactttctgaatttgatctgtcttcagtcttgtgaaaaagttgaacaaatttcctaatcaaagaaaaaagtatgagctccatgtttctttagtttcacaaaaatgaccataatttagtgttatttttactttatttaggcttcctggtggcttcattttattgaaattctttaaattgtttaaagtggccattattgatctctttcttctgttttggagagtttattattaaaaacatttctttgataaaatggccatcatctagtaatacctgtgtttgtttagatcttggaaatgaataagctttgataatatttgtaaatgaaccaaattattactgctaccactaacaggttgtaaatagaagactaatacttaattaaagtcaccttcctaccattagagcagaagacagctcctatagttttgtattttggcagctatgagatattttcatggtaatgtcaacatggtcaagcactttgtaccaagttattaagtaacataatttttaaaatttaaagaatgtgtcttcaactaaaaactttattctttagcatttatttatatttctctgtagggtgttccctgtgacattgtctctttagtttgctctttcaagagatacttacagatgttgagatggctgccctgcatttccagctaatctcttctgctctaaatatttaaaaacagttcttctcaaacattttcattcagatagctttctgaaagttccctatccctctttaccataattttttaaatgtagccacattgtaatagtaaacttcatatataatgagtgcttcatatttttgttatgggaaagcaatatattatgcagccagtctgtagaaacattcagatccctcttcctttactcaaatacagtttcaaaaggaagactcatgagaaatttcataaaatacaagtttttagatgtttatgctttgcctttctttttaaaggtgttttcctgctttgtagtctctaactctgaaatttaaaatatgtaaactaaagtggttttatttgtgcttaacccaatttaaactcaatgtaaaatgttatatatgcatcagtacagcattttcaacatattggcaacatattttaaatgaaaacactaaaacaattcttagtatgagacaaaactgtaaggaaaaagagtgttaataccatgatgcattaacataaaatatcaaacacacaaagtcataaaatgaaaatttacagttttacctgttcatatctagtgccccacagtgtgtgtcaaccaaaggtggcagtggctacatctgcctgttggactggtacaggttacaatatgtcctcttccattgcaaattaaagtccaaatagagaaatacttaggttttagaacacatcagaggtatttctgctgtatttttcaccttaaaaattgacacagagtttactaatagaggagtagagattgttgaccatttttaaaaaacgatagccactctttttcttttatgtttaaaactgaagttttgccaaatgggaaaattactgttacctctaccatcttaatgtagtaactttagaatttaaatttttatattactattttcctttttgttgttcacatagtcttaaggcacctatacttttaaattgactttttcatttgatattatctatatgtatgtagttgtgataatgattattttaattatattactttatactcttaatttatttagagtatttctctattgctgaatacttaagtagttttaaattttattatgataaattcctgggagggggattatttagtgaaataatatgaagaactttatgacttatgtttgccttattgcattcccaaagagttgtaacattttacagtgttaccatttgagtaggggttttatatgttgttgctaatttagtaaacataggagagaaatcaaagtttttctgatttgcttttatgtgatttatctgtatactttgttcatttatataaataaatgtcttaatggtttctatacata

SEQ ID NO: 460300 - DNA, 348 bp, Homo sapiens
tccgaagccagggtctccaaggccgctttggctaccaagctgctgtccttgagcggcgtgttcgccgtgcacaagcccaaagggcccacttcagccgagctgctgaatcggttgaaggagaagctgctggcaggtactgcagcccgggtggggaccaggctgaggcggtcgctgcgagaggggaagcacattaggctttttgcgacgctcgtgattcaagagacaaaaggaggggaaagggagactgaccattgaattagctctggacaggaatctcgggcatctcgggcttggacttgccctggcacgaactcttgtagcctacttggcagttgtagttctcaacgg

SEQ ID NO: 460301 - DNA, 1097 bp, Homo sapiens
tgctttgcatgagaaagcgcagcggcccggggcagcctcctccccgccgccccgccgcgggctcccgggccccgcgggggccgatcccccccggcctgcagcccagcctgcggggggcgcagcgcctagtcccgcccgcgtcgcccgccagccccgggacagcccgcctggcgcgcggggctctgcgcgctgcgaccctccccggcagtcccgcccgcctctcctcgccctctctctgcctggcctccaactttgcctctcgctatcctctccgccggcgccccctttcccggcggtccccgggatggtccccggcaccccgaggacgccgaggttacgggaagttcggggactggcgggagaaggggtttgggggtggtccgcggcgaggggcgcggggtgcatcttctcttccttttatggtgagtcccgggcggagggcgctttcaaagggaggtgggatttgcgttttatagcctgggccataaagtaggcccttgcttgtaaacctgcccgcatcttcctgaggctggggaggtgctaccagccccgggctccgggctccgaggagggattttctttgaaatttcaaagagacgagctaaggggagggggaggggctcgagaatccggattttagggccgctcatccgaggtctcctctaagaaggcgggaagggggaggggcgggaagcgtcccgggactttgaacaccgcctcccaccccgcgggaagtgcgggcttggtttgtaccgcggtgacccccgccccctccgaagccgcagagccggggcctcgcgccagagggctggagatgccttcttggcggctgagtttatttattataggaagtcattcgctcgtggggtatttatgtgatttggcgagtgatgtgcccggccagcgccctccttggctgcagccccgcaggaggacccggagtagggtgggatggagtgggtcgtgggaggagcgcgtcagcgcctgcccggggacccccagctcccgcgaggacacggaggcgcgcacgccgctcggttttcctggaaagtggagaaggagcgtcctgggcaggtcctctgagctcatcccccctc

SEQ ID NO: 460302 - DNA, 1477 bp, Homo sapiens
ggtactgctacctagggggtactgctacctaagtgggtactgctacctagtggggtactgctacctagtggggtacttgctacctagtggggtactgctacctagtgccaagatggcttactaatagcatcacttacgagtctttctcttttctatagggctgccacacttgtgtatcccttcttccttgaatttaaccaggagtgagcagtggacagcttcttccctatgagaaggaggtgaagcaggacctgaaatcccgtgctcagctcccacatgccccgtgtccaggacaagtcctttgctgaatcagcggcagacaccacccggagccctgcgggagcctttccctgttcttccagcatggatctgaaactcccttcccactttctgcagcctcccagagatagttcaggctccagcctcatgtgatagcatgaagagaaactggttccaacagctgtgtgctctgctgccctcatcccaaacaacagtttaaatgcacaattacgcttttctctaaggcccaaaataggataggaaagatcgttttgctatccctgaatgcctgtcacccttgtttcgtaaggtaagattgggaagggcttggccattgcccttgcggctgagaaaccaactttaggaataaagacactctctccatgtctgacaaatgtctgcccatctgctggcaggaagtcagtcccagaatagttgttctgctccctcccttctaataagtgctgcgctgagtgtgcttgctttgccagatggttaaaacagagcaggggatagaaggacagatgtcttcaccctcatggagttcaccttccagtaggaggaggcgataggccggggtctgcacatgtgcgtgctacagcctgttccacgtagagacaggatttcaccatgttggctaggatggtctcgatctcctgaccttgtgatccgcccctccctcagcctcccaaagtgctgggattacaggcgtgagccactgcaccctgccagaaaactcattcttctactccatcctacagttttccctaagagagaaacaataaaacgccaccacgaccaatggcaaaaagctggcacccactccacgacttttcatatctacacgtttgtacagctttatttttaagcattctgaaattctatgcaggagagaccccagctaggtttagggagtcctagggtttgtggagtaaatgaagtttctccctagaattagggagggtagagacaggcagagaactgacaatcctaacagctgctgtcctcagagccactgtttctgagagctgctcgctgagtgcttctagcgagttaaatggtgttcgcccaaaagacctgttcacgtcctgatcctgggaacctgtggctgtgatcttatttggaaaaagctctacattacgtctttgcagaagtaatcatgttaaggatcttgagaggacgtgaccctgaattatcc

SEQ ID NO: 460303 - DNA, 1607 bp, Homo sapiens
tgtgaccccaggcaagttacttaacctctctgagattctttctgtttcctctgctgtaaaatgggaacaatgacacttacttgatcaggttcggggtaggaatgaagtgagataactcagtaagctctgagaaccgagttggcacataatgctagccctgtgggattcactggtctgtaaactttctggttagttgacttttctttgttaaattcatttgtcttcactggccggaagccaagatggcttactaatagcatcacttacgagtctttctcttttctatagggctgccacacttgtgtatcccttcttccttgaatttaaccaggagtgagcagtggacagcttcttccctatgagaaggaggtgaagcaggacctgaaatcccgtgctcagctcccacatgccccgtgtccaggacaagtcctttgctgaatcagcggcagacaccacccggagccctgcgggagcctttccctgttcttccagcatggatctgaaactcccttcccactttctgcagcctcccagagatagttcaggctccagcctcatgtgatagcatgaagagaaactggttccaacagctgtgtgctctgctgccctcatcccaaacaacagtttaaatgcacaattacgcttttctctaaggcccaaaataggataggaaagatcgttttgctatccctgaatgcctgtcacccttgtttcgtaaggtaagattgggaagggcttggccattgcccttgcggctgagaaaccaactttaggaataaagacactctctccatgtctgacaaatgtctgcccatctgctggcaggaagtcagtcccagaatagttgttctgctccctcccttctaataagtgctgcgctgagtgtgcttgctttgccagatggttaaaacagagcaggggatagaaggacagatgtcttcaccctcatggagttcaccttccagtaggaggaggcgataggccggggtctgcacatgtgcgtgctacagcctgttccacgtagagacaggatttcaccatgttggctaggatggtctcgatctcctgaccttgtgatccgcccctccctcagcctcccaaagtgctgggattacaggcgtgagccactgcaccctgccagaaaactcattcttctactccatcctacagttttccctaagagagaaacaataaaacgccaccacgaccaatggcaaaaagctggcacccactccacgacttttcatatctacacgtttgtacagctttatttttaagcattctgaaattctatgcaggagagaccccagctaggtttagggagtcctagggtttgtggagtaaatgaagtttctccctagaattagggagggtagagacaggcagagaactgacaatcctaacagctgctgtcctcagagccactgtttctgagagctgctcgctgagtgcttctagcgagttaaatggtgttcgcccaaaagacctgttcacgtcctgatcctgggaacctgtggctgtgatcttatttggaaaaagctctacattacgtctttgcagaagtaatcatgttaaggatcttgagaggacgtgaccctgaattatcc

SEQ ID NO: 460304 - DNA, 1741 bp, Homo sapiens
tgctttgcatgagaaagcgcagcggcccggggcagcctcctccccgccgccccgccgcgggctcccgggccccgcgggggccgatcccccccggcctgcagcccagcctgcggggggcgcagcgcctagtcccgcccgcgtcgcccgccagccccgggacagcccgcctggcgcgcggggctctgcgcgctgcgaccctccccggcagtcccgcccgcctctcctcgccctctctctgcctggcctccaactttgcctctcgctatcctctccgccggcgccccctttcccggcggtccccgggatggtccccggcaccccgaggacgccgaggttacgggaagttcggggactggcgggagaaggggtttgggggtggtccgcggcgaggggcgcggggtgcatcttctcttccttttatgggctgccacacttgtgtatcccttcttccttgaatttaaccaggagtgagcagtggacagcttcttccctatgagaaggaggtgaagcaggacctgaaatcccgtgctcagctcccacatgccccgtgtccaggacaagtcctttgctgaatcagcggcagacaccacccggagccctgcgggagcctttccctgttcttccagcatggatctgaaactcccttcccactttctgcagcctcccagagatagttcaggctccagcctcatgtgatagcatgaagagaaactggttccaacagctgtgtgctctgctgccctcatcccaaacaacagtttaaatgcacaattacgcttttctctaaggcccaaaataggataggaaagatcgttttgctatccctgaatgcctgtcacccttgtttcgtaaggtaagattgggaagggcttggccattgcccttgcggctgagaaaccaactttaggaataaagacactctctccatgtctgacaaatgtctgcccatctgctggcaggaagtcagtcccagaatagttgttctgctccctcccttctaataagtgctgcgctgagtgtgcttgctttgccagatggttaaaacagagcaggggatagaaggacagatgtcttcaccctcatggagttcaccttccagtaggaggaggcgataggccggggtctgcacatgtgcgtgctacagcctgttccacgtagagacaggatttcaccatgttggctaggatggtctcgatctcctgaccttgtgatccgcccctccctcagcctcccaaagtgctgggattacaggcgtgagccactgcaccctgccagaaaactcattcttctactccatcctacagttttccctaagagagaaacaataaaacgccaccacgaccaatggcaaaaagctggcacccactccacgacttttcatatctacacgtttgtacagctttatttttaagcattctgaaattctatgcaggagagaccccagctaggtttagggagtcctagggtttgtggagtaaatgaagtttctccctagaattagggagggtagagacaggcagagaactgacaatcctaacagctgctgtcctcagagccactgtttctgagagctgctcgctgagtgcttctagcgagttaaatggtgttcgcccaaaagacctgttcacgtcctgatcctgggaacctgtggctgtgatcttatttggaaaaagctctacattacgtctttgcagaagtaatcatgttaaggatcttgagaggacgtgaccctgaattatcc

SEQ ID NO: 460305 - DNA, 1181 bp, Homo sapiens
gtaagagcagggaagccaggaggtgtgctccgcttttgtgctactggcatatgaagaaactggggctctgaatggcatattaacgcgtgcagctccagacagcgaggaagtgatggcaactctatccgaactcaaatctgccagacctataccagtaggtgcctgtgtgcagttggggactcacctctgccagtgctggcatgagctagctgtcttgaactgaaaacagacactcaaagatgggctgtgggatcccagagaggtggcagaatggtcaaagctatgaagccaacagctgctgccaagaagaaagtcctgagccctgagtgattgtaatttaaaaaacttaatgctgggagtgggtgtttattttggaggagtgggctgcttatttttggtttggggacttgttcattcatcttttctcagcggcgcctactgctgccctggcccgaagttaaagctcaataaatcactgttgcacaactgagtgcccacgcctagattgtaagttcctggaaggcaaggatttgtgtcccacacttgttttgtaccctccaggatcttgcacagcacttggcgaatgggtattgaatgaattcattcactgaagcgtctctctggtgccaggcccagtgctaagtgatgggaatacacagatgaatacgatatggtccctgctcttgggtaactcattattctggagtggaggttcccagagggatgactgggtgcctggagctcttcgcatcctttccgccaagctctcttgggaccaaggactgccaggggccataggaggcaggccaggagaccagggacttttccctggtgtgaagctaactgtccctcagccagcacagtggggagtcactgtgattcctactgtggagagccagccagactggattcatggctcagaggctctgaacctccactgtggaaccacatggggagccacagggaccagtcccacggaaaagccaggacatgctccaaaagatggcccaaggaggctaagcctaccacatatcagaacagacaccaaaataaacaaaatatcagaaaagatgaccaaaattcttaactaaatggacagtttggatactgctccatggtagaaaaggctgtactgtgtagctagtgttctgtagattctggaaaggaaatctcttgtttac

SEQ ID NO: 460306 - DNA, 796 bp, Homo sapiens
  misc_feature (7)..(8): n is a, c, g, or t
  misc_feature (11)..(12): n is a, c, g, or t
tggcttnnacnnggtgatggtagaagaaagagcacacaaatcagattcaagttacatgttggaggtaaaattgacaggaccctgtgacagatgggatgtagtggatgaggaaggagaaggtgtcaggatggtgtcctgtggagctgactggctgggagagcctttcactgaggccaccatcaatgccactgtcaaagaagacatcctgctctcagttgagtactcctgtcatggagtgcccaccatcgaatggacatattcatccaattggggaacgcagaagatcgtggagtggaaaccagggactcaggccaacatctctcaaagccacaaggacagagtctgcacctttgacaacggctccatccagctcttcagcgtgggagtgagggattccggctactatgtcatcaccgtgacggagcgcctggggagcagccagtttggcaccatcgtgctgcacgtctctgagatcctctatgaagacctgcactttgtcgctgtcatccttgcttttctcgctgctgtggccgcagtattaatcagcctcatgtgggtttgtaataagtgtgcatataaatttcagaggaagagaagacacaaactcaaaggtaaccccctgggccttgtgataatccatgagtggttttgaggccagaggtggcatgtgttatcttgttctcacgaagaaagcactatgtggcttgatttccaactcattgacttgtctttgctttacagaaagcacaactgaggagattgagctggaagatgttgagtgttagccaaggctggg

SEQ ID NO: 460307 - DNA, 1825 bp, Homo sapiens
tggctgctctgctgttactgtttgggaggcctcggaaactcccttggaccctgcacttgatggatcagctggcaccgcccagatcgctacgagtggctcccacccagcaactgactcagtgcaagaggacagctttgactccctatgatttcatctccgacccaactaatcagtattcccacccccggcaccccactagccaaactatccttaaaaactctgatccccgaattttcagggagactgatttgatttttcaatggattttcagagaattgatgagtgaagtccatctcagagcggcacctgctgatgcatctcctgattcaccaggaaatcttattgctctacgctatgaaatggtggatgagtttgtgtatgctaatgtgggaggaaaaacactgattggccatactccaagatacatcaaaacactccagcagatgtatgggaatgcatccgccctcggactgggtgagatagcagccccagctccaggtggaaaggacagcttactcatcaagggagttacagtgtctgcagcctgtactgagtcagagtatctgagagagatgcctactcccactttgccttctgccatgagtaaaaaagctccctgaggatttccagaagcagaagctgctatgtttcctggagcgaacctgaacttccccagaagcagaagccctaagcttcctgtagtgaagtctgtgaaactatgagccaattaaacctcttttctttataaattacccagtctcaggcatttctttatagcagtgcaagaacagactaatacacagcttgaatatttctgccctctttgctcaagaaataagagaaattaccagaaaacctttgcaaattcagacatcatggtacataaatctaactgctcctacttctggtttaaatgtgtttcagggactgatcattgatatttctgcattgtgtatcaatactcagcttcccaaaggtaactttagtgattaaatagtaaagctagctttgcatatacacttttcattgaatattttagactgagcacatataggaggatagcaatattgcctgaaaatatggagtaatccttggtaatgtgcaccacaattcaaattcaagaatattggggcaggagggggcatttaactgggattcaccttggaatagaaagctcatagcaaaaaggctctttagtaagataattcatacctttaaactgcaaattgtatgtgaaggtggaatttatggtcctagcaagcatcaaggaaagcttatgaaactgaactgcagttgttcatggccagctaaccctgcgggaaatggaaatgcactttggtattcttaaaactaagtgtcaaagcccctcaaatttcaactggctttcaaagaatttttaaagctttagaggttttcagttaagcacgttcttttactattgtagaggtatggaatgaactcctagaaacatgtgtatgtttaatttatattttgctttgaaaatgtaaaaatatatttataaatatacataaaaggatatatttatttattatacccatatctatcatccttgcatcttccaaaatggcctagagtatattttgggtaaggataaggaaaaaagacaaaaaaaggaaatgaaacaagaatggagaaggtagactggaggaggaaggaatgttatgcattcaactttatatgcttagcaaaaagtttgtataaactatttttgtctttaataagtttcttttatgtttctctatgagacgttactattaaaaatgatatgatgatgagctctgactattctcatttcagtacaaat

SEQ ID NO: 460308 - DNA, 804 bp, Homo sapiens
gtggagaagagaagagcagcacacgcagtttcaaatagtgaatgactttcatctggaaatgaggccacaagatggagacggagcgggttgctcacccaagttcatgcagcgcccatctgacgttcccccgggaggagctgcagggccttctttcgaggaggtggcagaggggcttcctgcgtgcaaaggagggtcccaccagcccttttggaacctcagcctggtcctccagaatttcacctcaaactactggagtctaggaaaaccattaaaggaagaaattgaagcttagagaagttctgtaagatgctgaggtcacacagtaataaagagataaatgtgtgttctcattactgcgctttcttgtctctcaaagcaaggaaccagctcaccttgtctctcccagctcctcacctcccgaggcagcagggacaggagccctgggcctgttctcccattccagacacatctcttctcttccagacaggggctgtggctctgccatggggttcctgttctggcagagccaggacacaggatggggagacaggggccggccaccctgaggtggagagtgctgccggatccccacactttatttccataggaacctctaagggagatcggaggagattcccagtctggggagtgggggaatcaaatgagtggcccgtatgcactggtcaccaggggcagtcaaacctgactctcagggaccacctgccattctgctccatagctgagttaggagggaaagggaactcgagaccctgaggaaggcatggaagggcttggccgtggatc

SEQ ID NO: 460309 - DNA, 1405 bp, Homo sapiens
acttatatgatatacctacagtaatcaaatgtacaggaactggaagaagaatggtgattgccaggggctggtaaaaggaagaaacaaggagttattgttaatagttgtagagtttccattttatcaaatgaaaaaattctggagattggttatacaacaatgttggaaaggtactttgttgggtgttgctatggctacagtgaatgctatgatagcagaatatggctgcagtttggaagacattgttgttgtacttggaccttcagtaggaccttgctgttttactcttccaagggaatcagcagaggcatttcataatcttcatcctgcatgtgtacaactatttgattcaccaaatccctgtatcgacatccgtaaagccacaaggattcttctagaacagggaggaattcttccacagaatattcaggaccagaaccaagatctcaacctctgtacatcttgccatcctgacaagtttttctcccatgtccgagatggccttaattttggtacacagattggcttcatatcaattaaagaatgagatacttgactggatttttgtataactgcttcctgcctccttccaaactgactgcaagagagaaatttagctgtttgatttacttaaaaccaaatggattacaatggataattcatcttttgggtatatttttactattattcaaagccaaatgattttcatttaattgtaataataactgacaaaaatcagtatgttgtagctaatatgttttatgcatgagaattattcttaaagtttgttctccctgtttattacacagatcaggaatagatttgttcagttcagtatttattggataccctctattggtcaggcattgtgttaagcatatgtgaatcaaaatgaacacaactttttcctttgagtctgatacagtgaaggagataaacacttctacaacttaaatttaattttaatagcagtagaagagaacataaggaatagaggttaattttacccagaagcaggatagagaaaatattacagagaaaatcacatatcacatgggctcgaaagatgtagaggtttttgacaaatgaagaacaaccataacaggtagagggaacaccatgaaccagggcatgaaactgaaagtgcataacatattctagagagagaagggtgtgggcatgagttagggctggaaaaacaggttggaaacagataagtaagggtctcaaatgcaatgtcaaagagcttgcagtttattttccaggcaatgagtaggcagccaaaaaaaaaaaagtaaggatgttttttttttttttcccatggcatcatatttaagaggatggatttaaattgtgtgagaccaaagcatagagactagctcgtgccaattcctgcagcccgggg

SEQ ID NO: 460310 - DNA, 2234 bp, Homo sapiens
acttatatgatatacctacagtaatcaaatgtacaggaactggaagaagaatggtgattgccaggggctggtaaaaggaagaaacaaggagttattgttaatagttgtagagtttccattttatcaaatgaaaaaattctggagattggttatacaacaatgttggaaaggtactttgttgggtgttgctatggctacagtgaatgctatgatagcagaatatggctgcagtttggaagacattgttgttgtacttggaccttcagtaggaccttgctgttttactcttccaagggaatcagcagaggcatttcataatcttcatcctgcatgtgtacaactatttgattcaccaaatccctgtatcgacatccgtaaagccacaaggattcttctagaacagggaggaattcttccacagaatattcaggaccagaaccaagatctcaacctctgtacatcttgccatcctgacaagtttttctcccatgtccgagatggccttaattttggtacacagattggcttcatatcaattaaagaatgagatacttgactggatttttgtataactgcttcctgcctccttccaaactgactgcaagagagaaatttagctgtttgatttacttaaaaccaaatggattacaatggataattcatcttttgggtatatttttactattattcaaagccaaatgattttcatttaattgtaataataactgacaaaaatcagtatgttgtagctaatatgttttatgcatgagaattattcttaaagtttgttctccctgtttattacacagatcaggaatagatttgttcagttcagtatttattggataccctctattggtcaggcattgtgttaagcatatgtgaatcaaaatgaacacaactttttcctttgagtctgatacagtgaaggagataaacacttctacaacttaaatttaattttaatagcagtagaagagaacataaggaatagaggttaattttacccagaagcaggatagagaaaatattacagagaaaatcacatatcacatgggctcgaaagatgtagaggtttttgacaaatgaagaacaaccataacaggtagagggaacaccatgaaccagggcatgaaactgaaagtgcataacatattctagagagagaagggtgtgggcatgagttagggctggaaaaacaggttggaaacagataagtaagggtctcaaatgcaatgtcaaagagcttgcagtttattttccaggcaatgagtaggcagccaaaaaaaaaaaagtaaggatgttttttttttttttcccatggcatcatatttaagaggatggatttaaattgtgtgagaccaaagcatagagactagataagaggcgatcaaaatatttcaaaaagaaataatgaagatccaatgaaggaagtggaaattaaaatagggaagagagtagatggattagagagacatttaagagatggaatcaatagatcctgttactagataatggaagtaagaggtgaggaagagtggaaaagtcattaatgactctaagatttctgcttggctgcttaccaagattggcaacaaagggagggagaaggtttggaaaaagagagaaggataatgagtttgactttacatagaatgaagggcatccagatagaaatctttggttaataattagaaatatagacctagaaattaggaggaaacctgagacagagacaaatatttcaaagcttacaatacagagatgatacctgattctattggagcaggtttgatcatctaggcagaaattaggatgagaaaaaaggagatccaataatacaaccttatagtcacagaagtaagaaaaaaagggtagttgttttgaagaagccaggataggtgtggaaagtactcaaaaagaaatcttcagggataaaataaagtgataatttaaaagaaatcaatggattaaacatattgaaactgttctataggcagtggtcattgagtcagctttcagtgcattaggaagaagatgcataggtgtcaactcttttctgacagcatttactagagaagagaaaaagctggggactacatcttcaaggaagggactttttttggatgagcagttttgagtgtgtttgtcagttaaagagaggaattaggttagttttcatttgggaaaaattgtatatatatttaatgacactcttctgatgactattcttc

SEQ ID NO: 460311 - DNA, 2074 bp, Homo sapiens
acttatatgatatacctacagtaatcaaatgtacaggaactggaagaagaatggtgattgccaggggctggtaaaaggaagaaacaaggagttattgttaatagttgtagagtttccattttatcaaatgaaaaaattctggagattggttatacaacaatgttggaaaggtactttgttgggtgttgctatggctacagtgaatgctatgatagcagaatatggctgcagtttggaagacattgttgttgtacttggaccttcagtaggaccttgctgttttactcttccaagggaatcagcagaggcatttcataatcttcatcctgcatgtgtacaactatttgattcaccaaatccctgtatcgacatccgtaaagccacaaggattcttctagaacagggaggaattcttccacagaatattcaggaccagaaccaagatctcaacctctgtacatcttgccatcctgacaagtttttctcccatgtccgagatggccttaattttggtacacagattggcttcatatcaattaaagaatgagatacttgactggatttttgtataactgcttcctgcctccttccaaactgactgcaagagagaaatttagctgtttgatttacttaaaaccaaatggattacaatggataattcatcttttgggtatatttttactattattcaaagccaaatgattttcatttaattgtaataataactgacaaaaatcagtatgttgtagctaatatgttttatgcatgagaattattcttaaagtttgttctccctgtttattacacagatcaggaatagatttgttcagttcagtatttattggataccctctattggtcaggcattgtgttaagcatatgtgaatcaaaatgaacacaactttttcctttgagtctgatacagtgaaggagataaacacttctacaacttaaatttaattttaatagcagtagaagagaacataaggaatagaggttaattttacccagaagcaggatagagaaaatattacagagaaaatcacatatcacatgggctcgaaagatgtagaggtttttgacaaatgaagaacaaccataacaggtagagggaacaccatgaaccagggcatgaaactgaaagtgcataacatattctagagagagaagggtgtgggcatgagttagggctggaaaaacaggttggaaacagataagtaagggtctcaaatgcaatgtcaaagagcttgcagtttattttccaggcaatgagtaggcagccaaaaaaaaaaaaagagtagatggattagagagacatttaagagatggaatcaatagatcctgttactagataatggaagtaagaggtgaggaagagtggaaaagtcattaatgactctaagatttctgcttggctgcttaccaagattggcaacaaagggagggagaaggtttggaaaaagagagaaggataatgagtttgactttacatagaatgaagggcatccagatagaaatctttggttaataattagaaatatagacctagaaattaggaggaaacctgagacagagacaaatatttcaaagcttacaatacagagatgatacctgattctattggagcaggtttgatcatctaggcagaaattaggatgagaaaaaaggagatccaataatacaaccttatagtcacagaagtaagaaaaaaagggtagttgttttgaagaagccaggataggtgtggaaagtactcaaaaagaaatcttcagggataaaataaagtgataatttaaaagaaatcaatggattaaacatattgaaactgttctataggcagtggtcattgagtcagctttcagtgcattaggaagaagatgcataggtgtcaactcttttctgacagcatttactagagaagagaaaaagctggggactacatcttcaaggaagggactttttttggatgagcagttttgagtgtgtttgtcagttaaagagaggaattaggttagttttcatttgggaaaaattgtatatatatttaatgacactcttctgatgactattcttc

SEQ ID NO: 460312 - DNA, 361 bp, Homo sapiens
gatggcaagcctattagacttctgtttcagatataaagaaaaaacgtacatacctagagctattacttttggggcaaattgtaactttaaccaaaagaaaatattgtatgattaatagttgtagatatggctattatgttcactttcataggatgtttttgtttgcctaatacataggacattttacatgtactatttattatttgtaatataggtgaaaagcttcagggcctgatttaaatgtatatactaggttaagaatattaaaggaatgtgccttgtcataaaatcagaatgcagaaatggatggtgtagtcatttagttggtcccacagctctcagacaggaatacatttcagga

SEQ ID NO: 460313 - DNA, 1063 bp, Homo sapiens
  misc_feature (2)..(2): n is a, c, g, or t
  misc_feature (6)..(6): n is a, c, g, or t
  misc_feature (9)..(9): n is a, c, g, or t
  misc_feature (12)..(12): n is a, c, g, or t
cncaanttnttngggtaggggcaaaatgccgccagtctctttgctaaaacataacaagagtcatctttattccagttcccaacaaaaaattgagtgtgttagaaacttggaggtctacagactgtcatttttatcctttgaaaaaaggccaaactctcatccagcgagtccaggcaaccctgctcagcccacttccctccactacatgaatccttaccaactgaatgcctatggtatggcactaaaagcagtgggagaaattgttcaagattatgacagtgataaaatgtttccagctctaggatttggtgcaaaactgcctccagatggaaggatatctcacgaatttgctttgatccttctgtccactgtcaagctttcagatgactgcagcccagttcctcaaaaaatatgagtgtcaacgtgtattattctcatctctttcaattgatcttcatggagatttacttttttactgttgttttgttttgttttgcctataaatttctacagaatgggaatcctcaaaacccctactgtgatggcattgagggggtcatggaggcttattacaggagtctgaaatctgtacaactatatgggcccaccaactttgctcctgtaattaatcatgtagcaagatatgcttcttctgtaaaggatggctcccagtattttgtgcttctgattgttacagatggtgttatctcagatatggcccagactaaggagtccatagttaatgcctcaaaacttccaatgtcaataattatagtaggtgttggaccagcagaatttgatgcaatggtcgaattggatggagatgatgtaagagtctcctctagaggaaaatatgctgaaagagacattgtgcagtttgtgccattcagggattatattgacagaagtggaaaccacatactgagcatggctagattggctaaagatgtcctagctgagatccctgagcagtttctctcctatatgagagcccgaggaatcaagccatcacctgcgcctcccccatacaccccacctcctgcaataaaatagtagcatcggc

SEQ ID NO: 460314 - DNA, 863 bp, Homo sapiens
aaaatatactaattctggaacagtaactttactctctttcttggtagaaacagaagtttcattccttgactacattaagggagggacgcaaatcaatttcacagtggctattgattttacagcatcaaacggcaaccctgctcagcccacttccctccactacatgaatccttaccaactgaatgcctatggtatggcactaaaagcagtgggagaaattgttcaagattatgacagtgataaaatgtttccagctctaggatttggtgcaaaactgcctccagatggaaggatatctcacgaatttgctttgaatgggaatcctcaaaacccctactgtgatggcattgagggggtcatggaggcttattacaggagtctgaaatctgtacaactatatgggcccaccaactttgctcctgtaattaatcatgtagcaagatatgcttcttctgtaaaggatggctcccagtattttgtgcttctgattgttacagatggtgttatctcagatatggcccagactaaggagtccatagttaatgcctcaaaacttccaatgtcaataattatagtaggtgttggaccagcagaatttgatgcaatggtcgaattggatggagatgatgtaagagtctcctctagaggaaaatatgctgaaagagacattgtgcagtttgtgccattcagggattatattgacagaagtggaaaccacatactgagcatggctagattggctaaagatgtcctagctgagatccctgagcagtttctctcctatatgagagcccgaggaatcaagccatcacctgcgcctcccccatacaccccacctcctgcaataaaatagtagcatcggc

SEQ ID NO: 460315 - DNA, 454 bp, Homo sapiens
tttctttgtctgtaaaatgcacacttaatcaagttttgtatgagaaatgaatgaagacatgaagggatcaacatgctttctgtcttttcatagcacattttgctacttcatacatcttgatttccttgttgtccacattgttttagtatttggctaaaatgtactgaataaatgatcatattttctcttaaagcaatggtcgaattggatggagatgatgtaagagtctcctctagaggaaaatatgctgaaagagacattgtgcagtttgtgccattcagggattatattgacagaagtggaaaccacatactgagcatggctagattggctaaagatgtcctagctgagatccctgagcagtttctctcctatatgagagcccgaggaatcaagccatcacctgcgcctcccccatacaccccacctcctgcaataaaatagtagcatcggc

SEQ ID NO: 460316 - DNA, 782 bp, Homo sapiens
gcaagacagttaaaatattagatgagctcgttacagaatcctgactgaaaacacacatttcctcttgaaggctttgctcactgattttggttttttggttttaaccattttccaactccctttcatctttccttttatctaaaatgggaagtaacacaatgtccttgtagataattttcatgctggtcttcaaaggaagtaaactggtcatagaaagacattggttaatttttttggtccctttccttcagataatttaaaatgtaagaacaatcagtcctagcagatgttaataaaaaataatatctttagtgagtttcaaaatgcaaagaaatatgattttctctctaataattagaaaggtctatttggggtcacaaacaactagaaggtaattctgtctttttctttttcaggtaactttactctctttcttggtagaaacagaagtttcattccttgactacattaagggagggtaagtaattctctcaaattgtttcgttgcttaggcatttcctaaaatttgtgtaacaagcgctaccacgaggtacctggcactgaaatgatcacctttattatattttgatggcaagcctattagacttctgtttcagatataaagaaaaaacgtacatacctagagctattacttttggggcaaattgtaactttaaccaaaagaaaatattgtatgattaatagttgtagatatggctattatgttcactttcataggatgtttttgtttgcctaatacataggacattttacatgtacta

SEQ ID NO: 460317 - DNA, 723 bp, Homo sapiens
aaaatatactaattctggaacagtaactttactctctttcttggtagaaacagaagtttcattccttgactacattaagggagggacgcaaatcaatttcacagtggctattgattttacagcatcaaacggcaaccctgctcagcccacttccctccactacatgaatccttaccaactgaatgcctatggtatggcactaaaagcagtgggagaaattgttcaagattatgacagtgataaaatgtttccagctctaggatttggtgcaaaactgcctccagatggaaggatatctcacgaatttgctttgaatgggaatcctcaaaacccctactgtgatggcattgagggggtcatggaggcttattacaggagtctgaaatctgtacaactatatgggcccaccaactttgctcctgtaattaatcatgtagcaagatatgcttcttctgtaaaggatggctcccagtattttgtgcttctgattgttacagatggtgttatctcagatatggcccagactaaggagtccatagttaatgcctcaaaacttccaatgtcaataattatagtaggtgttggaccagcagaatttgatgcaatggtcgaattggatggagatgatgtaagagtctcctctagaggaaaatatgctgaaagagacattgtgcagtttgtgccattcagttccaattcaagggggatcctcatagagcaggc

SEQ ID NO: 460318 - DNA, 2199 bp, Homo sapiens
ttccttgtaagatggcggcgcccaggtggagcgcgtcgggcccctggatccggggaaacggccaaggttgcgggagtctcttcactctcgtctcaaagccattttgtgccgctgccgctgcctctacggccataaatgcccagagattagcggagaagctccgagcccagaaacgggaacaagacacaaagaaggagccggtgtccacaaacgctgttcagcggagagtgcaagaaatagtgcggttcacacggcagctgcagcgagtccaccccaacgtgcttgctaaggcactgacccgaggaattctccaccaggacaagaaccttgtggtcatcaataagccctacggtctccctgtgcatggtaaggaccacgcgggaaaggtggagggacctgcagctgctttctgctacaaccgaggaaaactgagacatgttgcatgtagttgtcagggacagctgaagtgaatcaggaaagattgatttaaaaaatgcatttgtgaaagagggaaaaggcccattttagctagaagaagttttttgcctttccattccccaatgaagttgttttccagatatttacattttataacgagaaagcaaagttggaaagagaagtaatgtgtccaaggtcaaaaaaatggctagtaagaagagtagagtagaaccccaggaatgtctaaccccgaagtctatcctcctaatcactcttatttaatgcttctcaaaggcctcatggtttttcaaagtatgtctgagaggaagccacatgctctagaatggtgtttctcaaactttaatatgcttctgaatcacttgggcagcttgtaaaatgcagattctgactgagtagtctaggttgagagcctgagattcacttctaataagctcttaattctggtatacatcaaaattatcaaaaattaattatacaagcatgggggggacatggtggctcacgcctgtaatcacagcactttgagaggcagaggtgggaggatcactttaggccaagagtcggagaacagcctgggcaacatagtgacaccttttctctataaaaagtaagaagttagtccggtatagtggcacatacctgtagtcccagctacttgggaggccagggtgggaggatcacttgagcccaggagtttgaggttacagtgagctatgatcacaccactgcactccagcctgggtgacagagtgagatcctgtctctaaagaaaaaaaaattaattaattatacaagtaatatatgattttattcccatgctaaaaatagtcaaacaacaaagatcatgtaacaacccatgtaatcagtttggttttttttcctctggttcttactcaacgcatttacatatatgtctagtgtatacagtatacgcgtgtgcggcgtacgcagtatacgcgtgtccggcatacgcagaatatgcgtgtctggtgtacgcagtatatgcgtgtctgttgtatgcagtatatgcatgtgtacatatgtatgtacacatatatatctatatatatatcacattgtacaatttacattatacttttttcctctgctcaactctatgtcttggggatcatcctgtgttagcacatagaggtttacctcagtgtttttcatagaaaaaagatgcgtgagcaaaaaagaaaccctctattccccatctgtgcagttgccttccccagcgtcaatcgctgtgactggtgtcttctgtaaacttccagagttatcgagcatatataagcatattactgtatgctagtgtatttcacacagagttttgtaccctacagttttcacttggatcatatatcttagagcattttgtgtcatacgtttagagctgtctcctttttaattgctctgtgaaataccgctgtatggatggatatttaggtaatttctcattttttagagcctattgcaaagaatatgtgaatgtatttttaagataaatttctaaaaattgaatcgctgggctgaatggtttgtatatttaaattttaatagtactcacattgctctccacaaaggttttttatcagtttacattcccaccagcagtggtgagtacccacctccccttatcagccaaagcatttttaaagggtttgccactgtgataagttaaaaaaaaaaaagatattttctatttccttgtataacagtgatattggctatcaattt

SEQ ID NO: 460319 - DNA, 1424 bp, Homo sapiens
tcattaaaaacagaaactcccattaatagaaggcactgcactatgacctgcgagattgtaaaaaatatgtgaaacagctttggtgcttagaatattaagtctgatagaacagtggctcttaattctggtatacatcaaaattatcaaaaattaattatacaagcatgggggggacatggtggctcacgcctgtaatcacagcactttgagaggcagaggtgggaggatcactttaggccaagagtcggagaacagcctgggcaacatagtgacaccttttctctataaaaagtaagaagttagtccggtatagtggcacatacctgtagtcccagctacttgggaggccagggtgggaggatcacttgagcccaggagtttgaggttacagtgagctatgatcacaccactgcactccagcctgggtgacagagtgagatcctgtctctaaagaaaaaaaaattaattaattatacaagtaatatatgattttattcccatgctaaaaatagtcaaacaacaaagatcatgtaacaacccatgtaatcagtttggttttttttcctctggttcttactcaacgcatttacatatatgtctagtgtatacagtatacgcgtgtgcggcgtacgcagtatacgcgtgtccggcatacgcagaatatgcgtgtctggtgtacgcagtatatgcgtgtctgttgtatgcagtatatgcatgtgtacatatgtatgtacacatatatatctatatatatatcacattgtacaatttacattatacttttttcctctgctcaactctatgtcttggggatcatcctgtgttagcacatagaggtttacctcagtgtttttcatagaaaaaagatgcgtgagcaaaaaagaaaccctctattccccatctgtgcagttgccttccccagcgtcaatcgctgtgactggtgtcttctgtaaacttccagagttatcgagcatatataagcatattactgtatgctagtgtatttcacacagagttttgtaccctacagttttcacttggatcatatatcttagagcattttgtgtcatacgtttagagctgtctcctttttaattgctctgtgaaataccgctgtatggatggatatttaggtaatttctcattttttagagcctattgcaaagaatatgtgaatgtatttttaagataaatttctaaaaattgaatcgctgggctgaatggtttgtatatttaaattttaatagtactcacattgctctccacaaaggttttttatcagtttacattcccaccagcagtggtgagtacccacctccccttatcagccaaagcatttttaaagggtttgccactgtgataagttaaaaaaaaaaaagatattttctatttccttgtataacagtgatattggctatcaattt

SEQ ID NO: 460320 - DNA, 1813 bp, Homo sapiens
gtgctttccacagctcttctcaggggtcagtctggtaatgagtttgggacttcaaaacatgccatgcagccaggcaaactgctcctctatagtagtcatgaggacctccacactcctgagcccaacagacatctttcaattctcatggtacctgacaactgcattgcatttgatagggttctttccattctcctggtttattttcatttctccaaatatagttttttttccctatcacgtcctccaccaatttgacctcttcagttggaattcctcaagcctcagttttgagcccccttttcctcttactctatgctttctgtcaaaacatttgactccacactcttgttttaaattccatctctctgagaaggatccatgtgttcacatactctgttgttcaagaaagaaaacatgtcattcttcttgccattttcgtctctgtcttcactttcaatctactaccaaatcctactgacttttgcatcctagatagctctctaaatcatcaatttcattttatcattctcttatgcagtagtgttaagagcagagaactataaccaagatcttgaaatcaggaacttcgatacatacataaattatcccattgagcccctggatgttcatatgtattatctctgtttaatattcacagtttgtctccatgaggtcatacagctgcttgaggttgctcggagagtaagaagcagaatgagaactagaacagaagctcactttggcctgaaggctcatgtgctgagcatcttcccttgtctgtctccacccctagcctggtgcccagcatgtagaagaccttcatcctagatgcaatgggattaaacttggagaaaatgggattaaacttggacaaacactacctatttggacttgtgatgatggctttcaaacttcttaaagcaatgaagtattttttccagaagaaaccttacacaagaagcccagcacactgagtcaagcatatgtaggtggaagatatctggttgagaccaagtagagataaacctgtagattcaactgtgccaccacagtgaattctaagaatccactgactgtgatctgtaagctcctactccacaggaggtcagggcacacagcttgaaaccggaaggcagaagagtgacagggaagggtcatggactctgaaattagagctatctgtgttttaatactagttccaataggcacatggtcttggataaatggtttaaattatctgagtctcaatttctttctctgcaaaaagggatgattagtacatatgtaatagggtttttatagaaaattgtataacttgttaaacacacatgtactaagtgcttggtgcccagtatgcactgaataaatgctagctccttgcctttcatctctatgacccttcccaaatctctcagccccatattgcttcatgtagtgtgtgtatatttgggaaaatttgtgtgcatatttacagatgggatcctactcttctattgacagactgtcttttcagatgtgccttactttcattgcattggtttttcaactgaaagtgaacataaaggttttaagcatgcctaggtcttatctttttggtcaaatatctaacaccctcaataacagttgtaaatcattcttttgtaatttgatcattcatttttataaagtaaaacacaactgcccactgtaaaaatagacttcatttgctcttttcttccagtgcagcaaatgacagacactttaagaacacacatttaacttcagcaaacaaatcatgtatattttagacataactgtcaagtatagaaatgat

SEQ ID NO: 460321 - DNA, 5959 bp, Homo sapiens
gaacatcttgtgcagaagaagaggcaatttggcacctgttactgccaagatgttctcgatctcctgacctcgtgatcctcccgcctcggcctctcaaagtgctgggattacagacttgatgcaaggggatgtgtgctttacgggaaactgtcagcgctgcagtcggcatcagagacgtgctgctaaagagaacactaccagcatttaggagaagggacttggaatgatggacaggaccgtaccccttctctcattatcacaagccaaagcaaatgatgtatatctgtgaggtctaacaacgtccctaagccttatccttttaggatcccagtcatccagcgcactgtattgttgcagctaggagtttaagacatagagtcagacagacatgtgtttgaatttcagctccaccgctgactagctaagcaagcttgagcaagttaccatttcttctaagttccttcagttttttttttttgagatggagtttcactctgtcacccaggctggagtgcaatggtgtgatctcggcgcactgcaacctccaccccctgggttcaagcgattcttctgcctcagcctcccaagtagctgggattataggcatctgccaccacaccctgctatttttttgtatttttagtagagataggatttcaccgtgttagccaggatggtctcgatctcctgacctcgtgacccgccctcctcggcctcccaaaatgctgggattacaggcatgagccacctcaccttgtcctcattccttcattttcaaaatggggctatgttatttgccacagagagtttctgtgatgattgttaaaatgcacataaaatacctaccacataattcattctcaaaaaattctagaaatattacaatgggtgatgcctctccctccaacccagcacattccctggacagccctcctggtgcctttcaacccaggcagaccgtgcttttcctccttgagtgccaatcagatggagtggaagccagtggattgtttacctatagcacatgtgcagtgggaagtcagaaggccaagaggagaaactttggctccattcaaaagccagctgtgcaaggctccctggtggatgagggaccgaggagccagaataaatatttaactttcattttgaaacactgtccttgtgtggctgtcaccattgtgttggacaagatgtggagctaaatatttacactttctaattgttccccaaactgctggatgcccccaatctactgtaagctgtctgtctgtctgtctgtctgtctgtttattcattcactcatttgttcacttactttcctaattttaaaatgtatatgttagtttgggaaggaggttgagggggaggagaggaggtgcagaggttgactcaagattctcttccatttcagagaaaggaaataaaaccacgagatggaaagtagaggctgagaaaatgctgactggcttctggatctgttacacacatttggttttttttttttttttttactttttattttggaataattttagatttaccaaaatgttacaaagatagtaaagaaagttcccgtatatctttcacccagcttcccctcatgtcagcatcttacgtaacgatggtacctttgtcaaaacgtagaaattaacattggtacaatacgattaactaagctccacagttactgagtgtcaccagtgttctcactactgtcccttttctgttccaggatccaatcctggataccacgtttcatttagtcatcatgtctctttggtctcatgggatctgttagcttctcagttttttataaccttaatagttttaaaaggtagtgactggttattttgtagaatgtctgtcaatttgggtttttctgatgtttttctcaggattagactaggtgttatgagttttaggagagaataccacagaggtgaagtcctcttaataatcctatcgggatgcatgctatcagcatgacttaagcactggatgatttcatatcaagatccttaactaattacattggtaaagatgctatttctaagtaaggtcccactgcaaggttccagtgaacatgaattttgaggacacaattcaactctttatggatgtggggttatgccatacattttgcaatacagttagattcatttgtcaaagtgtgcactccattctgggtccccctaaacatcttggttgatttttttgcaatttgcatacagtgaagttcagttctaggggttttgaaaagtgcacagagtcgggtaactataccacccaattccatgcagcaccattccatcaccgccaaatttcgctgagcacactatattaaaattgaaggttttctccgaaaaccatacttttgttaatagaaatattaaattttaaatgtacttaaatatattttattaaatttattttattatggaaacatgtaaatggacataaaaggaaagagaacagtatactcatcacctagtttcaacagttatttttaaaatagtttcatctatttgtctacctatttatgtattttactagagatttttaaaacaaatttcagacatcacacaatttttccaccaaatacttctgtatgtatcttggcaaataaaaaaaattagatcacttgtcttataagatttctctaactttgtatttgtcagattatttattttcttgtgcacttaaagtctttttccttttatttactgtaaatttgtagagctaagatccaaattagtttcaagtctatagtgcatcatatcaggggacatataatacctggttgtcccattctttgtgatatgaagtttattcaacagtcattccctccattttcatccccaggcaatcacacgtctgctttctttcactattgattagtttgcttgttctagactttcttataagtagacttacacggtaaatactctttgtttctgacttctttcacatggcataatgtttttgagattccttcatgttacttgtattaatagtttttattactgagtagtattccattttatgaatatacaccaacttgtttatatgttcatctgttaatagatatttagggtggtgttagtttttggctattaaaaataaaactgctatgagcatttgtatactagcctttatgggaacaaatgctttcatttctcttgggtaaatacttaggaatagaattttgaattgtgtggtagatggatatttgtgagtaatcactaaactttttcaaagtggttgcacccttgtcttcctaccagcaatatatgagagttccacttgttctatacctttgcaacacttggtcttgttggtcttttaaagtttattaatcagttgctctagagggtgtgaaatggtatctcattgtgattttagtttgttcttcctgataattaataaacctttcagcatcctttcatggacttataggccgttcatacatcttcttttgtaagtgcctgttcaaatcttttgctcatttttaatacactttattttctggaggaattttaggttcatggcaaaattgagaggaagaaacagagatatcccataaacccattgcccacacacacacatagcctcttccattatcaatattctccaccaaagtgataaatttcttacaactgataaacctacattggcacatcattatcccccaaagaccatagtttatagtagggttcaatcttggtggtgtacattttatgggtttggacaaatatgtgacttatatctaccatatagttttatacagagtagtttcctaagatcttctaaaaattctctgtggcctgccttttcattcttttctcctctactacccctggcgaccactggtcttttgctacctccatagttctgccttttccagaatatcatatagttggaattaattgtacagtatgtagccttttcagattagcttctttcgtttagtaatatgcacttaaggctcctccatgtcttctcacagtttgacagttcatttctttttagcactgaataacatttcattgtctggatgtactacggtttatttatccattcactgacagaaagacatcttggttgcttccaagtcttggcagttttgaataaagctgctataaacatctgtatgcaggtttttgtgtggacgcaaattttcagtttctttgggtaaatactgaagagttttgacgttgctaatcagttgccaatcatactgcaagagtatgtttcgttttacaataaactgccaaactatcttacaaagtgactgtatcattttgcattcccaccagcggtgaatgagaatttccattgctctacatcataaccagaatttgtttttttcagtgttctggattttggtcattctaatatgtgtgtaatggtatctcattttttgttttaattgcatttccctgacgatatatgatactggacatcttttcatatgcttatttgccatctgtatgtatttttttcacagatgtctgttaaggtcttttccccttaatactttaatcatatttttctcttcttattgtttagttttaaaacttttgtatttaaaaaaacaattttattgtgtttatttgaagtatacagcgtggtgttatgagtctttgtatgttttggataacaatcttttatcagatatgtcttttgcaaatattttctcccagtctgtggcttgccttttcattctcttgacagtgtcttttgcagagcagaaatttttaattttaatgaggtccagcttatgagttctttctttcaaggctcatgccgtcaacgtcctatctaaacagtcattgccgagctggtcatctaagttttctcctatgttgtcttccataagttttatagttctgccttgtgcatttaagtctgtgatacattttgagttaatttttgtgaagagtgtaagttctgtgtccagattcatatttttaaatgttcaatgtagtgattccacatcatttgttgaaaagactcatttctttactgtattgcctttttccctttgtcaaagatcagttgactctattgatgtgcctattttgggactctattctgttccatggatctacttgtctattcctttgacaatattacactgtgttgattactgtagctttatatgaaggaagtcttgaagttggcttagtgtcaatcctctgactctcttcttcccctttaacattgttaactattttgtatcttttgcctcaccatataaattttagaatcagttttctgccatccacaaaatagcttgctcagattttgactgggatgcatcaaatcaatagatcaaattgggaagaacttgacagtattgaatcctcctatccacaaacatggaatatctttctattttccatttatttaattctttgatttgtttcattagagttttccagttgtcttcatatagatcttgtatacatattattagatttctacctacttaatttttagatgctaatgtaaatggtattgtttctaattttaaattccacttgttcattactaatatataggaaagtggctgacttttttatattacccttgtgttctacaaccttgctataatacttattagtcccaggagttttcgtcaattattttagatttctacatagacaattatgtcagatgcaaacaaagacatttttatttcttccttcacaatcagtaaatcttttatttcctttccttctcttattgcattaactaggacttttggtataatgttgaaaaagacgatgagaggggacatccttgccttctttttgatctgagtaggaatgcttctagtttctcaccattaagtataatgtttgttgtaggggtttgatagacattctttatcaagttgggcacattcccttctatgccttgtttgccaagagttttattctttttaatcatgaac

SEQ ID NO: 460322 - DNA, 1879 bp, Homo sapiens
tcaaggttcttgcaagtgttattgaaaggataaagaatgttttatctgtagcattttgtgctgatagaaaaggcagggtccagtggaagaaggaggaaatggtacataatttcttcataaaaagagtaaggccagggagaagtgactgagtagacacctgtagctaaacagaggtggtgatgagtttatggtgcctccagcttctcatggccccacttgggaaattcctccagtaacattacactcactcactccttgaccatctacctttactcctctcctcatttccctgttaccaaaactatgtgccctacccagggacttctgggcagctcttttctcagatcatttctcaccctctctcctctactaacttagcctttcatactgaatcacattttccttaaaaaacagctgctgacagaagatgctacattttgtttcagggcctggtaaccatcaaggatgtgtcactgtgcttctctcaggaggagtggcggagcctggacccctctcagacagacttttatggagaatatgtcatgcaggaaaactgtgggatagtagtctctctgagatttccaattcccaaactggacatgctttctcaactagaaggaggagaagaacaatgggtccctgacccccaggacttagaggagagggacattctgagggtcacatatacaggagatggaagtgaacatgagggggatacccctgaactagaagcagaacctcccagaatgttatccagcgtgtctgaagatactgttctctggaacccggagcatgatgagagctgggattccatgcccagcagctccagaggaatgctcctggggcccccttttcttcaggaagatagtttctcaaacctgctgtgtagcacagagatggattccctgttaagaccccacacatgcccccagtgtgggaaacagtttgtatgggggtcccaccttgccaggcatcaacaaacacacactggggagagaccctacagctgcctcaagtgtgagaagacctttgggcgaagacatcacctcatcaggcaccagaaaacccacctacatgacaagaccagcaggtgctctgagtgtggtaagaatttccgatgcaactcccatctggccagccaccagagagtgcatgcagaaggcaaatcctgcaaaggccaagaggttggagagagccctggcacaaggaaacggccgcgtgccccaccagtgccaaagtgtcacgtgtgcactgaatgtgggaagagctttggccgaaggcaccaccttgtgagacactggctgacccacactggggagaagcccttccagtgccctcgctgtgagaagagctttggccgaaaacatcacctggacaggcacctgctcacccaccagggacaaagtccccggaacagctgggacagaggaacatctgtcttttgaaatctgtttccactacagctatggtcaagtctatcagccggtgctaccaggagtcactgccagggctgccgttctcctgaaccccagtggccagaatcataagccctgaccccatccctagaaagatgaggtcccagcaatggccagagcatttctcaccagttctgtgagatagcacataaaaatagagttctttgggcaaaacttttgggaagcaatgcatcctacatgggctgatattcagcctgagctgttctcaagaggagagtggtactggcagtttatggctgaaatccattctgattggttggagtctgtgctataccagttgttaaacattttgagtatcactcttgcatactgttactattatattttctctatatatagacagaaaggccattttagaatattaaaggctctgaaaatttatg

SEQ ID NO: 460323 - DNA, 2259 bp, Homo sapiens
  misc_feature (2)..(2): n is a, c, g, or t
  misc_feature (4)..(5): n is a, c, g, or t
ancnnccaggactgggaagggaggcaggaggcttctctgggtataaagcagctgaaatgtggagtttcctcccaggagctgagagcgtgtccatgggcccagtgcctggcgtgtcctccctgggagcttgctggacgcatgaccaggattctgggagggcagaggacagaccacaggcacccaggataactcagtacacatgggttctcagcttcctgttcacagagaaacctcagacaagaagcacgtcgcccatttctcatcaaggccaaccccagaccacgagagcgctttctctgcgtcagccccagcaccccagcgcccctgcctccgggcgcccgcggcctccgcactccagtggcccagacctggctgaggcagctcccgtggtagatcaagcctcacaggcggctggaagagccagttctgggctgggcctgtgggaacaggcgtctgttagtcagggtttcaggaatgcggccttcgaagcctgaagcggggaatggcggctctgggccctcaaggggcaggcggtgagcctgggaggccaggccgggctgacccaaggggagaggaccctctccgcccactgccgctggccctgggcaggtctagagcctgggggtctccagaggcacaatcccttatctccgggagaaggcagagggcagaggcaggaaacaaatctcctgtcaaaattcctaattaaaatactaagtaagtgatggctccaggctgaaacaccggacactgagagaataagggaaaatcagccccgacagccagggctaacaagacggttaattacagcccgagaagaacgttaacagtattaattctaaccacaaaggaggaaaagagaagaccgcctaagaaggagaaggagggtccctttcccagatgaggctgccctaaccactgggacctcggcccctcccaggcctgagggagcccagctctgcctggccccacccatctcacaccagccctgcctgacccgcccacctcaccccaaccctggctggcccccacccttgcctagccctcccggccctcccacccttgcccagcccctgcttggccctcccactcgtcccaacccttcgtgtcaccgccaacccttgccccagtccggcccgccgcctcccacccttgccccagccctgcctggcccctcccacccttgccccagtccggcccggcccctcccacccttgccccagtcctgcccggcccctcccacccttgccccagtccggcctggcccctcccacccttgccccagtccggcctggcccctcccacccttgccccagtccggcctggcccctcccacccttgcccagcccctgcttggcccctcccactcgtcccaacccttcgtgtcaccgccaacccttgccccagtcctgcccggcccctcccacccttgccccagtcctgcccggcccctcccacccttgccccagtccggcctggcccctcccacccttgccccagtccggcctggcccctcccacccttgccccagcccctgcctggtcctgcccacctcaccccagcacttcctatgggactcacgcctttgtctcgggcttttggttttcaaaataaattataagttttaataaaataaagtactagaaaagctattcattacggaagatgtaaaaatccgaaaagaaacttccatttgggaggagaaatggagaacggagcccaggagaattcctggggatgtccgctttggttctacagttcgcagataggggaactgaatcctggaaacaggcagggcgaggggtgggcccgccaagcactgcgccccactctatgccaggtctatgtcagcccctctcttgccctctcagagctcagggtacattttgagcccacctggcctggagcacgcagggctgggagctggctgggacctggacagggctcagatgcaaaggcagcttcccccagcaccttccaggctctggctgttccaaaccatgctccaggctcagatgggcttgtcccaaaacagctgagccattaccttcacttgacaagggccccccaaaacacagcattccaggggaatggggacccgaccctgcagtctctgggtggtcagcgctgccctagaggggcgtgacaccctctgctggtcccatacagaaggacacagctgccacccagcatgcagctcccccaggcactgggtgcccacgctgtacccggcagcttacactgtgccttgtcacccac

SEQ ID NO: 460324 - DNA, 1325 bp, Homo sapiens
aagtgatagaaattgttcagtgtaggatgtgccacctccagttcccaggagaaaagtgctccagaggaagaggaatatgcacagcaacaacagaagaggcctgcatggttggaaggatgttcaaaagggatggtaatccctggttaaccttcatgggctgcctaaagaactgtgctgatgtgaaaggcataaggtggagtgtctatttggtgaacttcaggtgctgcaggagccatgacctgtgcaatgaagacctttagaagttaatggttcttctgtgactccaatttctgggtgaggttgttgcctcagcctcttcacaatgactttctaaaaaaaatcacacacacacacacacacactacagaagaggattgcaaacacatggctccatcttctgcacacgaaaggaaagtccctctccttttctacagtctctgtcacgccccttaaaataagtaaataaataaccttgagagaaagaacaagatcaatatatcctgcagatggccgaataagaacagctccggtctgcagctcccagcgagaccaacgcagaaggtgggtgatttctgcttttccaactgaggtacccagttcatctcactgggaatgtttagacagtgggcgcagcccacggaaggcaagcagaagcagggtggggcatcacctcacccaggaagcacaaggggctggggaactagctaagggaagccatgagggactgtgtcttgagggactgtgctatctggcccagatactacactttttccatggtttttgcaacccacagaccaggagattccctcggatgcctacaccaccagggctctgggtttcaagcacaaaactgggcagctgtttgggcagacgccaatggcacctggaaccccagtgagacagaaccattcacccccctggaaagggggctgaagccagggagccaagtggtcttgctcagcaggtcccacccccacagagcccagcaagctaagtatccactggctcggaattctcactgccagcgcagaaatctgaagtcgacctggtacactcaaggacaaagcttccagaggaaggagcaggcagcaatctttgctgttctgcagcctctgctggtgatacccaggcaaacagggtctggagtggacctccagcaaactccagcagacctggagaagaggggcctgactgttagaaggaaaactaacaaacagaaagcaataacatcaacaaaaaggatgcccacgcaaaaaccccatccaaaggtcatcagcatcaaagatcaaaggtagatgaattcacaaagatgaggaaaagccagc

SEQ ID NO: 460325 - DNA, 2080 bp, Homo sapiens
tgggagattcaggaggcaccaatgggacaagggatcttgggttataaaccaagcgtctcaacaccactgctccttcagaagggactgaaagagacaatgaattggcggggctcagctgcaccggaatctcatgttttggaatcctcaggccgtcacagggcagggtctcggcaggtgccccctggagtttccagacatcttgtggcagcatgtccagaagccccaatcagcacaggagcacctcaaggagtcagggctggggccacagttagaagccagaaagtgcaccacccccagctgcaaagcagctgccaccccagagtggagacctcctcatccacccttctgcactgtgagctgggctgcaaggactgtatggtccgggttaaaagtccaagcacacaagaggcaacacttttgaaacgagggcttccctgaagatgccggctctctctggacaggaccagcatcgtgggcatgcagccctgcagctcacacaggcacctgagcttagacgaacccatgcttggtttaacgccccactgtcatcatgaaattcttcgtaactttcgaacaaaaggccccatatttccgctgtgcactgagtctcaaacactctgtagccagtgcggtttcaggatcacattgcggatcaattgatcctacactcatttctgcctggtttttattgttttgttttgttttgtttttctcatcagctaaactgtaaacccgagggagccagggagctgcatgttgcttactagccccggtgttttgcctccagcagagcggggcctgcaaaggtgcctgataaacacactctcagatcacttccacgtggctctgttcattcattcactcaactaatatttacagaaggggggggaatctggacggagctatattatcaccagactattaaaatcttcgattagaaggttgacgcaggtgcagcgacgccgtggacccgaggcggccaccacgatcctgcccaatttgcagcctccgccctgcgggtgacacgtgaactggccagtcctgaggatgaaaagggaggaccattcccactcacatacaggctccatttccccgcagctgcccttgggggagccccgtgtgaggccaggaatattaacgcccgcctttccccatctccccgacaggcgtgagtgacgccgaggcgcgccagccggggaagtcgccccccttcagcatgaactgggtcgtgggcagcgcggacctggagattatcaacgccaccactgggcggaggagctgtgggggcccatcccggctctgcaagcacgtgctgtctgcacggtgggcgcggctgtatggcaggctgagcacacggacacccagccctggagacacgccctccatgtactgtgaggccaagctgggggcgcacacctaccagtctgtgaaacagcagctgttcaaggcctttcagaaggctggcctgggcacctgggtgaggaaaccaccggagcagcagcagtttctactgactctctaggctgcgggctcctggctgctggagctgagcgggacgctggagggatgggaccgtgtctggggggcgacgtggcgggtcggccggttccctgcattcgttttactttggtgtcccagaaacacgcgagtgtgcaatgtttggacgagcaacaacacaaattcagaacgtgcctctttccagatcgctggccccagaaccctgtcccccacacccaggggcacatgcactgttgagttagcgccgactcttcctgtggagtctgagggaggggctccattcaggcaaaggggttttagctgcagccttggaaggaggcaccgacacgacaccaggcaggagtgagcctcaggccccgtccctgcaccccacccctgcgtgcgcctcttggtgatgctggggtctcactagcttgagggggcacatgaagataagccacaaatgaagagaaaagccatgcccaccccagccccagagaaaccaataagaatcctctattattttcactattcatttaggtttttatactccacctcctttcaaaaaagatttaagatgtac

SEQ ID NO: 460326 - DNA, 982 bp, Homo sapiens
agctgatctgcgaggaggcatgaatgagagggagacacccggccagctgggcttggggaacgcgtcaggcgtgagtgacgccgaggcgcgccagccggggaagtcgccccccttcagcatgaactgggtcgtgggcagcgcggacctggagattatcaacgccaccactgggcggaggagctgtgggggcccatcccggctctgcaagcacgtgctgtctgcacggtgggcgcggctgtatggcaggctgagcacacggacacccagccctggagacacgccctccatgtactgtgaggccaagctgggggcgcacacctaccagtctgtgaaacagcagctgttcaaggcctttcagaaggctggcctgggcacctgggtgaggaaaccaccggagcagcagcagtttctactgactctctaggctgcgggctcctggctgctggagctgagcgggacgctggagggatgggaccgtgtctggggggcgacgtggcgggtcggccggttccctgcattcgttttactttggtgtcccagaaacacgcgagtgtgcaatgtttggacgagcaacaacacaaattcagaacgtgcctctttccagatcgctggccccagaaccctgtcccccacacccaggggcacatgcactgttgagttagcgccgactcttcctgtggagtctgagggaggggctccattcaggcaaaggggttttagctgcagccttggaaggaggcaccgacacgacaccaggcaggagtgagcctcaggccccgtccctgcaccccacccctgcgtgcgcctcttggtgatgctggggtctcactagcttgagggggcacatgaagataagccacaaatgaagagaaaagccatgcccaccccagccccagagaaaccaataagaatcctctattattttcactattcatttaggtttttatactccacctcctttcaaaaaagatttaagatgtac

SEQ ID NO: 460327 - DNA, 1224 bp, Homo sapiens
agcggagaaaagagagcagcatttgttagcacacatgggcctgtggagcccagtcccaggcaacagtgtccccagagccccagtgatggctgggttgggtctggggcactcccagggagctccccaaggtggaacgtcctggggctgcagggcgcgctcctgtcccacttcgtggagcccgtgtacctgcagagcatcgtggtgggcagcctgcaccacacgggccacctcgcacgcgtcatgagccaccgcatggagggtgtcggccagctgcccgcctcctaccggcacaaccggcctctcctcagcggcgtgagtgacgccgaggcgcgccagccggggaagtcgccccccttcagcatgaactgggtcgtgggcagcgcggacctggagattatcaacgccaccactgggcggaggagctgtgggggcccatcccggctctgcaagcacgtgctgtctgcacggtgggcgcggctgtatggcaggctgagcacacggacacccagccctggagacacgccctccatgtactgtgaggccaagctgggggcgcacacctaccagtctgtgaaacagcagctgttcaaggcctttcagaaggctggcctgggcacctgggtgaggaaaccaccggagcagcagcagtttctactgactctctaggctgcgggctcctggctgctggagctgagcgggacgctggagggatgggaccgtgtctggggggcgacgtggcgggtcggccggttccctgcattcgttttactttggtgtcccagaaacacgcgagtgtgcaatgtttggacgagcaacaacacaaattcagaacgtgcctctttccagatcgctggccccagaaccctgtcccccacacccaggggcacatgcactgttgagttagcgccgactcttcctgtggagtctgagggaggggctccattcaggcaaaggggttttagctgcagccttggaaggaggcaccgacacgacaccaggcaggagtgagcctcaggccccgtccctgcaccccacccctgcgtgcgcctcttggtgatgctggggtctcactagcttgagggggcacatgaagataagccacaaatgaagagaaaagccatgcccaccccagccccagagaaaccaataagaatcctctattattttcactattcatttaggtttttatactccacctcctttcaaaaaagatttaagatgtac

SEQ ID NO: 460328 - DNA, 1362 bp, Homo sapiens
tggctttgaccaaaatgctgatagcaatatggacaataaagtccaggctgaggtggtctcagatggaaaggaggaacttgttgggaactcgagcaaaggtgactattgttatgttttagcaaagagactggtgacattttgcccctgccctggagatctgtggaactttgaacttgagggagataattcaggggagaaatccaagccagctgcagaaatttgcataagtaacgaggagctgaatattaatcaccaagacaatgggaacaatatcttcagcgcatgtcagagacttttgcagcaggccctctcatcacaggcctggaagatgtatggaaatgcctggatgcccaggcagaagtttgctgcaggggcagggccctcatggagaaactccgctaaggcaatgtggaagagaaatgtgggattggagtccctacacagagtccctactgaggcactacctagtggagctgtgagaagagggccaccattctctagaccccagaatggtagatctaccaaaggtctgcactgtgtgactggaaaagccacagacactcagcatcagcccctaaaagcaactggggaggtctggggggctataccctgcaaagtcacaagggccgagttgcccaatgtcatggaagcccacctcgtgcatcagcatgacctggatgtgagacatggattcaaaggagatcgttttggagtgttaaaatttgactgccttactggattttggacttgcatggggccttggatgactagcaaaacaagagcaaaccaaaatgaaacaaaataaaaattatcaagtcatatcaagcacacatgtggcagatacattttgtgatagatgaccatttttatataaaaacatacagctccatctagctctaagtgcttttgtctctgctctcaattgtcagacattttgcaagataaacagcagcatgcaatgggctggagaaagaaacagcagaaagcacagtcgaaagagcccagggaaccatccatcacaaagccatcctgccttaaagtgaaaagtgcaattccctaagactctggtaacacccatgactgaacatcctgctaattttagcaaaataataaatatgaataagtcttgtttatgaaactgtctgcagccagatgagactccatcaggtcatttactttcttctttacactgactattctagttagccattcgtctaacctttttttttttaatgtttttagcttccttgcaaggggttagaacatgctccttcagctcagagaagtttgttataacccaccttctgaagcctacttctgtcaacttgtcaaactcattctccatccagttttgttcccttg

SEQ ID NO: 460329 - DNA, 927 bp, Homo sapiens
gggtggtgcaagatgtgctttgttaaacaggtgcttgaaggcagcatgctcgttaagaacccaatagaaatgaagaaaacaaaaaggaaattcaatggatccccaagccctcctcactcaccccctgggctgctggccaggagagagcaagtgctgcagcccccacagctcccagttgactgcaggaatgcagggggcagcatcatgatagcctcaaatacctacaggccctggttcatagccttgggttcacctgcccaggcaggggagagaaaattccatcatattagtgagcagggagatcaggtctatacgctggagaaatttgactcgatgggacaacagacctgcttagcccatcctgctcagttctccccagatgacaaatattcccgacaccgaatcaccatcaagaaacgtttaaaggtgctcatgacccagcaaccgcgccctgtcctctgaaggtcccttaaactgatgtctcttctgccacctgttaccccctagagactccaaagaggatgcagatctcatttttatttggaggatgcagatcacatttttctgtctgttcacatcacaggtatggactaacaacactctatgtggcctaaaaaccaaccaaatcaagtttctatcaaggcagaagaggcaggacagccaaggaattgagcataaaggacactctactgtgagagctagccttgatttgacatgtgtcaggaaacatacgacctcaaacaatcttcatacacaatgaagagatataagaagatttggtaatccaggaagtctcgaaagttcttcagaaatgtttaacctatttcaaaaattttcattactctgcgcacactattcctcattacagaaagtgctcaataaacttctgtatgctcctattactattttttgagctctaagtgtatt

SEQ ID NO: 460330 - DNA, 1134 bp, Homo sapiens
agagggggccctgtgcatgaggtctccttttcagcctcaaaatcaccaacttctcatcattaaaactgagagagagagagagagagagagaacaccaaagcctcaccgtggaaacacatgaacacgaatgagcaggctgtagcggaagcatgccatctactgccatctgcttctggtgaggcctcagggagctgccaatcatggcggaaggtgaaggggagccagtgcatcacacggcaagagcaggagcaagagaggtgccaggctccttcaaacaaccagctctccagtgaactaacagagcaagatctcactcatctccaaggagcttcaccctgtcgcccagctggagtgcaaggcacgacctcagctcactgcaacttccacctctcaagttcaagcaattctcctgcctcagcctcccgagtagctgggattacagacacacatgaccacacctgtctaatttttgtatttttagacagcattgcccaaactccggtcacgcgctacgcagaacaacgatatggtcaacaacagaccacatgtacaatggtggtttgggtaaatccagtctatgacgttcacacaaccacaaaatcgcctaaggacacacttctcagaaagtgtctcctcatagttaagcaatgcatgatgaattttgtgcaaaacatttgttttcgttttgatcagtaactcagagattgaaacaaaattatgaactgaacccataattgattcctttaatgttttcactgttcagccaatcaaatttttaaggaaaagggtcccctctccacacctaaccccttcctggcatccagggtctcaggcgcctcctgtgggacaccttgaggcaccacagtgtcgagcagggaggttgttcataggacaagccaggcaggataggccagagggcatcagtcctgtagggtgggcagtgggcatgtgtggttggctgattgcaggggacaggcctctatggatttgaacaggaaagatggggcacttagctcccaaccctagaaaggtatcgagtttgtggtggctcccaaggaagctgcctgcctgtggggtcaacattccagcccccatggtctctcggctgtggcgtcagggacatctgtatgatgt

SEQ ID NO: 460331 - DNA, 1577 bp, Homo sapiens
gcttgattggtctgcttcctggatgctcattgtgggcaatgaaagacttcaggacggtgattccttgcagggagtggggccggagagggtttcactccagatcctgcaggcatctccccatcctcagctgtttgccagtcccaggaaagcacttctcaactcaccaactccagtagaaagaagggtgttaaggggcaccagtggaggttttctgagcatggatccaaccaccccggcctggggaacagaaagtacaacagtgaatggaaatgaccaagcccttcttctgctttgtggcaaggagaccctgatcccggtcttcctgatccttttcattgccctggtcgggctggtaggaaacgggtttgtgctctggctcctgggcttccgcatgcgcaggaacgccttctctgtctacgtcctcagcctggccggggccgacttcctcttcctctgcttccagattataaattgcctggtgtacctcagtaacttcttctgttccatctccatcaatttccctagcttcttcaccactgtgatgacctgtgcctaccttgcaggcctgagcatgctgagcaccgtcagcaccgagcgctgcctgtccgtcctgtggcccatctggtatcgctgccgccgccccagacacctgtcagcggtcgtgtgtgtcctgctctgggccctgtccctactgctgagcatcttggaagggaagttctgtggcttcttatttagtgatggtgactctggttggtgtcagacatttgatttcatcactgcagcgtggctgatttttttattcatggttctctgtgggtccagtctggccctgctggtcaggatcctctgtggctccaggggtctgccactgaccaggctgtacctgaccatcctgctcacagtgctggtgttcctcctctgcggcctgccctttggcattcagtggttcctaatattatggatctggaaggattctgatgtcttattttgtcatattcatccagtttcagttgtcctgtcatctcttaacagcagtgccaaccccatcatttacttcttcgtgggctcttttaggaagcagtggcggctgcagcagccgatcctcaagctggctctccagagggctctgcaggacattgctgaggtggatcacagtgaaggatgcttccgtcagggcaccccggagatgtcgagaagcactcccacttataagtgagaacgtgtggtattcggttttctgttcctgcattagtttgctaaggataatagtctccagctccatccatgttcccacaaaagacatgatctcattcttttttatggttaaatagtattccatggttcatatgttccgcatttttttaacttttatcttaggtttgggggtacatgtgaagatttgttatatagtttgatgattttctgtagttgtatgctttgacttctttctttttatctttttctgtatctagtaaagatttttgctttactggttaccatgagacttacgtaaaacatcttaactaataagaggttattttaacctgataactacttaactttgatcacttgcacaa

SEQ ID NO: 460332 - DNA, 2442 bp, Homo sapiens
agcgggtttccggtggtgtccaatccgacctgaggagtcacagttgtgagcaagttcggtgccgcgggctggggtaggcggcagtggggtccctggctttggggcactgggaagatcgcgagtgggaaggtcctcccgcggtcctccgggtcatctttcctcctgaggagcagcatatttcgcatctgccggagattagaattacttgttattggtaaatagccactatggagactaaggaccagaagaaacaaagaaagaaaaatagtggacccaaagctgcaaagaaaaagaagcggcatctgcaggatctccagctaggagacgaagaagatgcctggaagagaaatcccaaagcttttgcatttcagtctgctgtgtggatggctcgatcctttcacaggactcaggatttgaagacaaaaaagcatcatattccagtggttgatcgaactccactagagcccccaccaatagtggtagtggtgatggggcctccaaagttggaaagagcactttgatacaatgcctcattcggaacttcacccggcagaagttgaccgagatcagaggccctgtgatgatcgtgtcaggtaaaaagctccgactcaccattattgaatgtgggtgtgacattaacatgatgattgatctggctgaagtagcagatctggtactgatgcttatagatgccagctttgggtttgaaatggaaacgtttgagtttctaaacatctgtcaagtacatggctttcctaaaattatgggagttctcacccacctcgacttcttcaaacacaataagcaactgaagaagacaaagaagcgattaaaacacaggttctggacagaagtttacctggctggagtgcagtggcgtgatcttggctcactgcagccttgaactcccaggctcaagtggatcctccctcttcagccccgcaagtagctgggactacaggagtgcaccaccacccccatctaatatttttttgttgttattctagggacgagttctcactatgttgcccaggctggcctcgaactcctgggctcaagcaatcctcctgcgttggcctcccaaagtcctgggattacaggtgtaagccactacggctggcctattattgctgtattctaacttattcatctcctatggctagcctccaagctggaagctgaattgacagttgaaaaataatgacatgtatacaaggtatgtttgaaggattgcagatgcaggggcaccatatgctaaaggagtgttggaagctcactgcagaagatgacaaaagcagactgatatgtattatttgctgaaatataagctggaggcacaggtgaagattgccaaacctaatgaacagtttggcaaataagacaggctgtcaggccatggcagttcagcagtgggcgtgctgcctgtgaaccaagtcatttgttccagaggactacacttaaataccacaaataaaatcttccttgtcactgatatcacagtgaaatagatgttgtctttcagatttctggttgaattaccagccattaacatctggtgatttgggttgtaaaattatttttagttttgcctgttcatatttcatccagaaagcccaaacaagatatattttcccacataagaatgtaagcagtataatgccccgtccgggagggaggcggggggcagcccccacctggccagccgccccttccaggagggaggtggggggcgcctctgcccggctgccccgtctgggatttggatcccccagctcagcctgggtcatccccaccttctgcctcttgggccatagctcagctctgcacactgagccatcatcctatgatgccttcacaaactttgtccatgagaactctaaggacttctccagacctgttggctgctgctgtgatctctgcccaagaggagcctctgaccaacatccaaagggcttctggacccactggactcctctggaggcacctaataactcaggtaccttaacagtcactaatgagtgtctctccaaggtcaaaacaatggaagactgtagaagatgctattcattaagatatctcaagaatgtggaagactattattcgcttctcatgggacaggactttatagggcacctgaaaaaactcccatgaaaaatcacttttacaaaatgtcaagttatgatatccaagatgaaaccaatgagtcacaacattcacataatacactgtacaaccctgatctcttgactgtcatcaaatgtttcttacctctaaaccaaagtttcattttataatttaatttttctcattttttctgttctcttagcttaagaaaagatcattacaaactttttgtatgtttttcatatatgcttgcaaagggttgtaaaactttattgtgattattcttgctttaagctgaaacttccctaatctttcttt

SEQ ID NO: 460333 - DNA, 2301 bp, Homo sapiens
agcgggtttccggtggtgtccaatccgacctgaggagtcacagttgtgagcaaattagaattacttgttattggtaaatagccactatggagactaaggaccagaagaaacaaagaaagaaaaatagtggacccaaagctgcaaagaaaaagaagcggcatctgcaggatctccagctaggagacgaagaagatgcctggaagagaaatcccaaagcttttgcatttcagtctgctgtgtggatggctcgatcctttcacaggactcaggatttgaagacaaaaaagcatcatattccagtggttgatcgaactccactagagcccccaccaatagtggtagtggtgatggggcctccaaagttggaaagagcactttgatacaatgcctcattcggaacttcacccggcagaagttgaccgagatcagaggccctgtgatgatcgtgtcaggtaaaaagctccgactcaccattattgaatgtgggtgtgacattaacatgatgattgatctggctgaagtagcagatctggtactgatgcttatagatgccagctttgggtttgaaatggaaacgtttgagtttctaaacatctgtcaagtacatggctttcctaaaattatgggagttctcacccacctcgacttcttcaaacacaataagcaactgaagaagacaaagaagcgattaaaacacaggttctggacagaagtttacctggctggagtgcagtggcgtgatcttggctcactgcagccttgaactcccaggctcaagtggatcctccctcttcagccccgcaagtagctgggactacaggagtgcaccaccacccccatctaatatttttttgttgttattctagggacgagttctcactatgttgcccaggctggcctcgaactcctgggctcaagcaatcctcctgcgttggcctcccaaagtcctgggattacaggtgtaagccactacggctggcctattattgctgtattctaacttattcatctcctatggctagcctccaagctggaagctgaattgacagttgaaaaataatgacatgtatacaaggtatgtttgaaggattgcagatgcaggggcaccatatgctaaaggagtgttggaagctcactgcagaagatgacaaaagcagactgatatgtattatttgctgaaatataagctggaggcacaggtgaagattgccaaacctaatgaacagtttggcaaataagacaggctgtcaggccatggcagttcagcagtgggcgtgctgcctgtgaaccaagtcatttgttccagaggactacacttaaataccacaaataaaatcttccttgtcactgatatcacagtgaaatagatgttgtctttcagatttctggttgaattaccagccattaacatctggtgatttgggttgtaaaattatttttagttttgcctgttcatatttcatccagaaagcccaaacaagatatattttcccacataagaatgtaagcagtataatgccccgtccgggagggaggcggggggcagcccccacctggccagccgccccttccaggagggaggtggggggcgcctctgcccggctgccccgtctgggatttggatcccccagctcagcctgggtcatccccaccttctgcctcttgggccatagctcagctctgcacactgagccatcatcctatgatgccttcacaaactttgtccatgagaactctaaggacttctccagacctgttggctgctgctgtgatctctgcccaagaggagcctctgaccaacatccaaagggcttctggacccactggactcctctggaggcacctaataactcaggtaccttaacagtcactaatgagtgtctctccaaggtcaaaacaatggaagactgtagaagatgctattcattaagatatctcaagaatgtggaagactattattcgcttctcatgggacaggactttatagggcacctgaaaaaactcccatgaaaaatcacttttacaaaatgtcaagttatgatatccaagatgaaaccaatgagtcacaacattcacataatacactgtacaaccctgatctcttgactgtcatcaaatgtttcttacctctaaaccaaagtttcattttataatttaatttttctcattttttctgttctcttagcttaagaaaagatcattacaaactttttgtatgtttttcatatatgcttgcaaagggttgtaaaactttattgtgattattcttgctttaagctgaaacttccctaatctttcttt

SEQ ID NO: 460334 - DNA, 789 bp, Homo sapiens
agcgggtttccggtggtgtccaatccgacctgaggagtcacagttgtgagcaagttcggtgccgcgggctgggattagaattacttgttattggtaaatagccactatggagactaaggaccagaagaaacaaagaaagaaaaatagtggacccaaagctgcaaagaaaaagaagcggcatctgcaggatctccagctaggagacgaagaagatgcctggaagagaaatcccaaagcttttgcatttcagtctgctgtgtggatggctcgatcctttcacaggactcaggatttgaagacaaaaaagcatcatattccagtggttgatcgaactccactagagcccccaccaatagtggtagtggtgatggggcctccaaagttggaaagagcactttgatacaatgcctcattcggaacttcacccggcagaagttgaccgagatcagaggccctgtgatgatcgtgtcaggtaaaaagctccgactcaccattattgaatgtgggtgtgacattaacatgatgattgatctggctgaagtagcagatctggtactgatgcttatagatgccagctttgggtttgaaatggaaacgtttgagtttctaaacatctgtcaagtacatggctttcctaaaattatgggagttctcacccacctcgacttcttcaaacacaataagcaactgaagaagacaaagaagcgattaaaacacaggttctggacagaagtttacctggttgccaagctgttctgcctttctggaatggtgcatggagaatatcaa

SEQ ID NO: 460335 - DNA, 1165 bp, Homo sapiens
ccacgcgtccgcggacgcgtgggcggacgggtcttctgttgttagacaacattgtgcaagcttggtttttataagtttgcatggattaaactgaacttaatgaaattgtccctccccccaaattctcagcacaatttttaggcccacaaggagtcaagcacctcaaggagatcttcagtttgaacttggtgtagacacagggatactgatgaatcaatattcaaattagctgttacctacttaagaaagagaggagaccttggggatttcgaggaagggttcataagggagattttagctgagaaataccatttgcacagtcaatcacttctgaccaagttatcagaaaaaggagaaaagaatgtctccccactaaatgttctagggtggtgagaaatctagggtggttatctaaatcaacaatatttagatattccaatatctaaatattgttggaaatactctcctgaagtgttcattgaactctaagagagacagcttgtgtatcagtggcagggtttaaggttcattttttattcccatattaatcctttaatatttagacaaatttccttctgagtttaaggataaaatgggatgggttctgcctgggcctggccctcatggggacatcaaagggcaatgttgcaaaaaaaaaaaaaaaaaaaaaaaaaatcagaccatcagattgcatggggggaaccacccccataattaaattacctccacccagtcccacccttgacacctggagattatggggattgcaattcaaggtgagatttgggtggagacatagagccaaagtatattattcaaataagaaatcaaaagagaaattggaaagttcattgagctgaaaatgaaaacacgatatatcagaatcagggagttgcagctaatgtatgcttggaggcaaatttaagcactaagatcctatattataacaaaaaagaaaggtctcaaatcagtgacctgagttttcaccttcagaaactggaaagagaagagcaaattaaacacaatgtaagcagataaagaaaataataaaaagaacagaaatcaatgaaagaaaaaaagggaaaattataagaaaaatccaagaaagtaaatgctaatcattttaaacaatcaattaaattgttagacttctagtcagctgatc

SEQ ID NO: 460336 - DNA, 2060 bp, Homo sapiens
caagctcaggcatggtgggctgcggcccctcactgccccggccagcggggccagcttgctgctccgagtgcgggccggcgcccacgcccacccggaactggcattggcccgcaattgctgcgcgcagccccgattcccgcccacacctctccctccacacctccccgcaagctgagggagccagctctggccttggccagcccagaaaggggctcccacagtgcagtggcgggctgaagggctcctcaagcatggccagagtgggcgtcaaggccgaggaggtgccgagagtgagcgagggctctctgaaggctgtgagacccctgatttcccacttcacacctctgtatttctgtgtgtatgtccttaattcctctagctccattgggttagagtctccccgagcgagctggtctcggcaagtggcgtccattcgtggaggctcgaatccaggtcaaagggttgctggagcgacggttggaatggaaaactagctggaagacacccaagtactcttaaagcaatccccgtgttctggaggctgggaagtccaaggtcaagatgctgacaaatgatgagagctttcttgctgcatcctcacatggaagaaggtggaagggcaagagagaagaaactaatgctaggaaatgcctcttttaaaagggacttagtcccattaacaaagaagcaggtcttatggcctaatcatctcataaaagcaccacctcttaatactatcacattggcaataccttgattttggaggggacacattcaaaccatagcagagaccactaagtatagggaagactaaacccgagaaccaagtggccagaagcctgcactagctcagctgattctgctattagacttagataaagtatgagccttttgctactgaatcaacagaaaggctgcccgaaagcacttctgttgttagacaacattgtgcaagcttggtttttataagtttgcatggattaaactgaacttaatgaaattgtccctccccccaaattctcagcacaatttttaggcccacaaggagtcaagcacctcaaggagatcttcagtttgaacttggtgtagacacagggatactgatgaatcaatattcaaattagctgttacctacttaagaaagagaggagaccttggggatttcgaggaagggttcataagggagattttagctgagaaataccatttgcacagtcaatcacttctgaccaagttatcagaaaaaggagaaaagaatgtctccccactaaatgttctagggtggtgagaaatctagggtggttatctaaatcaacaatatttagatattccaatatctaaatattgttggaaatactctcctgaagtgttcattgaactctaagagagacagcttgtgtatcagtggcagggtttaaggttcattttttattcccatattaatcctttaatatttagacaaatttccttctgagtttaaggataaaatgggatgggttctgcctgggcctggccctcatggggacatcaaagggcaatgttgcaaaaaaaaaaaaaaaaaaaaaaaaaatcagaccatcagattgcatggggggaaccacccccataattaaattacctccacccagtcccacccttgacacctggagattatggggattgcaattcaaggtgagatttgggtggagacatagagccaaagtatattattcaaataagaaatcaaaagagaaattggaaagttcattgagctgaaaatgaaaacacgatatatcagaatcagggagttgcagctaatgtatgcttggaggcaaatttaagcactaagatcctatattataacaaaaaagaaaggtctcaaatcagtgacctgagttttcaccttcagaaactggaaagagaagagcaaattaaacacaatgtaagcagataaagaaaataataaaaagaacagaaatcaatgaaagaaaaaaagggaaaattataagaaaaatccaagaaagtaaatgctaatcattttaaacaatcaattaaattgttagacttctagtcagctgatc

SEQ ID NO: 460337 - DNA, 1364 bp, Homo sapiens
gtatctattaagaatttgctcaaatgttatttcattgcttgtctaatgttatagctgcctcctttgcctactgtgctttgccaaatgttgtgtgtctcgctcctgtggttcttccttggctaacctcacatgcgtgcgtggatcagaatcctgctgaggacttcacctgggctcgctgtacagcccaagagtttcttctaggtgcaactttcctcatctttgttaactctgcttgcaaatatcagctgccatggccccccccagaatccctactccatggcaccagctcaggaagttcaccaggcttcaactggcgcagtagccaaggccctgcacgcctgcctttggtggccagacaccagcttagacacaagactacactggaccctggggaatgtggagcttggaatgcaaacaagcacctggcaaccaggacaggctaccagggactagagaaccaggaggcttcattgggtaacaaagttcttcccaagcattctcttgcattccacccggggaacaagacagcaccgggtttcacactggcaaggcaggaggctgtgtgctgccagaacgaccagcagggggcgcaaaggccacgccaggcacctgctggcctcagagaaaacagaaagggaaccaggaagcccactcctgctgtcctttctctgcaaggaaatgtgccagggcactgcagcccagacagtcggcagtagaggacccatgaagtatctttgtgcaaagaaagcagcaaagagaattaagagaattgcatcatataaagagtgaattaaaccatctaaaggagcaaaaattcatcatcacatggacaagaaattaagacgtaacatccatctcactatttgcaaagtggcttattcctacagacaatgcagatatcagctggaaacctaggagcagaagcccagcataaagatctctgaaagcctggatgcgtggattcctctcttacttcccaaaacggtggggtggaaatgtgaatatcagcatgatgcacagatctctgcagatgtccagcgaactgaatttctagacgctataatctatgttctttcccaacccccacttcagtttacatatcgcaggccatagatcctgtttgttgaaaagcgatcagctagaaaacaagagtggttataacctgtgctgcccagtgatcaggaaaagagagcggatgaaacttccatgactttctgttagtctgattaatatccatgccaaatgtaagattagttaaaaggccttattgcttcccaccaaaatgttccttcactagctatatactacactgaaatgtaaagttatgggtatgtttaacagtttaatttgtcagtgggcatcca

SEQ ID NO: 460338 - DNA, 2607 bp, Homo sapiens
tgacctcctctgcccagttccatgccctacttcagttgcaggggcaggggattagaggccctggggactgcacacgctgcaggattgaatgcctcaggggcaggaacttgcggaggacagagtccactgcacgagctagtaaaaaactccatcattgagggtcacaaaactgaaggtcttgattccgagctcttcagagggacccttgagtggggctctggtcctgtggcctttgatctcatactcagtccattgcagcagatgctgtggaggcatttgaaagttatgctgggtcttcgtttgcccacagatcaagaacaatttagggagtttgcagagcagatgaacagagatttatggaatgagcaaaatgccctgtgggagcattggggagctgttcgttctcatgatagtgagtgacttctcacgagatctgatggttttataaggggctcttccctcttcgctcatcccttctctttcttgccaccatgtgagaaaggtccttgcttcccctttgccttccaccatgattgtaagtttcctgaggcctccccagccatgtggaactggtttcactctgtcacccaggctggagtgcagtggctggatcacggctcattgcagccttgacctcaggggctcaagcaatcctcctggcctcaacctcctgagtagctgggactacaagctacctcgcccagctgatttttgtattttttgtagcgatgggggggtctcaccatgttgcgtaggctggtctcgaactcctggtctcaagtgatctgcctgacttggcctcccaaagtactgggattacaggtgtgaaccaccgtacctggcccattttacacttttaaatccttttctactaaggtgatcattcaatcagtttccatatagtttttcctctgtacataaagattggtaacattgtaaataagtattacaatccgaattcacagaaaatatttataatctcaagagaacagaatctattttgaacagagctcttgtttttgtaattagttcaccaccacatttttccatatgtttctgtatccaccttttcttggaacttatgggcaggaaatgacagaagaaggcaggaaaaggaaacgtcaaagtttttttggagggactgcattttctgggactgataagatggatgacttccactgtaactctggttatcaaaggaataggagaaataacaaattctcagtatagttgtcaatctcacttaataccatcagaatgaaggatttaaatgaaaagttcaagttaaaaggcatctttatacataatcctctgatattcctagtgctctcacttatttacctgtgtgggtgtttttaaaaaactggaagtataataaaaagaatccagaatccatatgaaaagtagatatgtgtgttaacatagaaattgaataaattggtatttcaaatatcaatccctgtattttttccatcatgaaaatgaaatacatttttaatgtaaagttttgggttttgtttctttttagaactttcacttatttgtaactttcatttcttattttttgtaactttcatttttaaaaaattaactgctttgcatttccccttgtggaaaaaaagaaaaactactcaaaatagctttccctttatgaagtgaatgtactccatttatttttatggctgaaaaatattctattgcatgaatatactatgttttattattccatttgtcaattaatggacatttgattgtttccattttggggctattctgaatactgctgctacgaacatttgtgtacagatttttgtgtggacacatgctttaatgcttttgggcctatatgtaggagtggtattgctgggttacatgaaaactctgtgtttaaccttttgaggaactgttgaaagtggctgtaccactctacatgcccccccagcagtgtatgaagattccaatttccctacaccctttccgtcacttgttattatctgtctttttgattagagtcatcttagtggtttgaagcaatatctcattgtggctggatttgcatttctgtaatgacaaataatgttgatcattttttaatgtgcttattggccacttgtgtgtcttctttggaggaatttctattcaaatcctttgtccatttttaatttttttaattgttgacttgcgtgtgtacatatttccactagtgcatttcccacactgttctgtcgcctatgctttatgtgtctgagtttcctattagactgtggccagatgtgggcagggtctgggtcagacttgaacccaggcccttctcatgggcacagtgcagagcatgcagtaggcacctggtaaatgcatcaagactggagacccaaactctctggggagcccttgtgctctcctccaagcttctttcttctcaaagtccctgcatttctagattccttatatatggaagcccgtggtgggtctgggtcctctctggggaagcaggggttgagctgagaggtctcaattctggaacatactgcctcactgcctagccagaccttccctctcgtcctggacagtactgttttcactctgcaagtctgcagatgcccctcc

SEQ ID NO: 460339 - DNA, 2193 bp, Homo sapiens
gtgagtgggtccctgctgtgttcatctgaataagatgaaatgaagcactggtggaggtagcatcccgggtctcagcagtcatagagcccccccacctccacctctgcccccatctgagaccccctgcaccctcccttgagtggagaatcactgtggttaatgtgaaacacacagacaaaaaaaaaaaaatgcaggcacccacggcctggcctgaagggaggtagggtgggactggagacgcggggtggacgagagcaacacctccaaacgcaggcacccgcagcctggcctgaagggaggtagggtgggactggagacgcggggtggaatttgtgggagaagtttgacgggtcaccagcagcccagtgtttccagaaacagccctgctcctgcagtggcgaggaacccagacagcggcaaggcctacaccgtgtcctccagccacccgcctagccccacacagtggcaaaataccaaaagaccctaaaataccagcgaggcggggggtggtctgtccctgctaagagctgcctgggggtgctactgcctctcctgcaacacagggcttctaaatttccacctccaaccgcgagctctgcaaaaactgcaggcgaggacaggctttggaggtatgtgggatggcggctccctgacatggactaggggactctgcagcctccctgagggccgcgggaagcccacagagcctcaccgggttctgttgggtgttatgagaggcggctgcagcgatccaacgggcagacatggcctgaaagtggtgctgggatgttctgacctggacctgagggcgaaatcctcaggcttcaacacgagcccttccatctctgcagaggtggcacagcccctccaggcacatccagggctgtgggaatcctgggacctgggtcttccaggcacacctggggctgtgggaatcctgggacccggcccccccaagcatagctggggctgtgggaatcctgggacccagctcttccgggaactcttggggctgtgggaatcctgggacccgggtcttccaggcacacctggggctgtgggaatcctgggactcggcccccccaagcatagctggggctgtgggaatcctgggacccgggtcttccaggcacacctggggctgtgggaatcctgggacctggccccttcgggcactcctggcactgtggaatcctaggacctggcccttcctggctgggtcaggccctgccagttgggagcagcctgcgtgtggcgtgatctggtgtggcgtgcctcctgcgtgtagggtcacccttgactgcctcgactaccttctcctttcactacccagggcctgggaccctcctttccttacgtggggtcccctctgcagcccacatcccctctgacagatccctccacggaaaggctccggcacctcaacctcactctggctgcattggaaactcttctgtcgctatcggccttctctgaagagctttaatctctccttccatggagtctcctgtggacttaatacacgaatccatacacttgtactaatgggtagcatggaattaatgtgtggctttctccagatgtggatgttgatatttcagtaaagtctgagttgtttctggaaggtcaatgcctgagacaaaacgaatcccaaccccccagctgtggcttcatgatgctggccactgggtggccgagcgctttccgagtcccgtgaatcagaccctgcgtcttccctgtgacagtgaaatctgcttacaacacaggccccctcgctgcagaaacagcgtgatttggagcccactgggacaaagcattatatgcttctctagccaacatctcagatgaaggtgatttgaggcctgggtgggagacttcagccaggagctggccgtgctcccacgcattcaggggagcgctcacttctgactgctgcgaatgtctgagccacccatcacctctcgactctaagttctctaagcttcatcctagtgatgtcaagttaccagaacttaatagaaactggtcgtttgagcttagcttttgcactgaattaagatttcatttatttttgtgatttttataaaagattaatgtgagtcctttatttgaaaaaatgttctcgtatcttttgaaactttatctggaagaagttgtctactccagtacctgttttcttttctaaaagaactc

SEQ ID NO: 460340 - DNA, 1727 bp, Homo sapiens
gctgcagctagtgtcttcacagtggccactcaagatgggccgctgccaccatcagtttgaagtcagtggctcttcttgtgatataactttctatgacaccattcttgcatataaagctggggatgccaccttgttaccaccagctagagctgcaggtctgttggagtttgctagaggtccactccagaccctgtttgcctgggtatcagcagcagtgtctgcagaacagcagattttcgtgaactgcgaatgctgctgtctgatcgttactctggaagtgttgtctcagaggagtacccggccctgtgaggtgtcagtctgcccctactgggatctccagctgcgtgctgggagaaccactgctctcttcaaagctgtcagacagggacatttaagtctgcagaggttactgctgtctttttgtttgtctgtgccctgccgcccagtggtggagcctacagaggcaggcaggcctccttgagctgtgatgacagaaacttcatctgcattggcttcggcaaagcagaaatttattagcttacaaggccccatcttgtccatgcacctgtctgcttccttggcttcagagcattgcctccaagtcctctacagcacaactttcccttcagcatccaaccttatgatgtactgggatattgtgttgcccctctcccctctctacctgtgctgggctttaaggctgacacacctataaaccccaggagtggagggaagggagagtggattgtcattgagacatatgttctgcttacgtggagagtaacttgagcaacgttacccacctctatgtggaaacacaggtttatttagtatgttgaaattccagacataactatctgttcagtagcagtggttcctataagacaacaacttcactgttcattttgtgctagtagaatggaacttcacggaccttggagaagcatactccaaacactacaaatgatggttatactttggagagatgctaagacagcagatgctaaaatccagataccttttgtgaatatgaggcatatctactgggaacacatcataataatctgttgaggtaaacattaaagatggtggcaataagcagttggagaaaaagaaaaatatcaacatgcaaggcaccattgttttcttgcttcttaattgtaactttttattttttgtgtatatggctatcacagagatttaaaaattaatcattgaaaatcattaatagaatcgacctgtgagcatcaacacagaaatggataaagaaaatgtgttatatacacagtgggataccattaagcctaaaaatgaaggaaatcttgttattcacagcaacatgggtgagcctgggggggcattatgttcagtgaaataagtcaggcacagaaagataaatatcacctgttctcacttatatattccttggattgggttttgactttctcctgaatcttgatgacctttattcctatccatattttgaattctctctctgtcatttccaccctttctgcctggttaagaacccttccttgggaactagtacagttatttggaggaaagaaaacactgtagtttagttgttagagctcttgcaccagttttttctcatctgtgtgggctgatgctcctttaactgtggtgtaattgagtgcagactccttttttgaatgttttttgagggccgaggttttgtgcagggtctttgttgttgaaatcttgtc

SEQ ID NO: 460341 - DNA, 1537 bp, Homo sapiens
gctgcagctagtgtcttcacagtggccactcaagatgggccgctgccaccatcagtttgaagtcagtggctcttcttgtgatataactttctatgacaccattcttgcatataaagctggggatgccaccttgttaccaccagctagagctgcaggtctgttggagtttgctagaggtccactccagaccctgtttgcctgggtatcagcagcagtgtctgcagaacagcagattttcgtgaactgcgaatgctgctgtctgatcgttactctggaagtgttgtctcagaggagtacccggccctgtgaggtgtcagtctgcccctactgggatctccagctgcgtgctgggagaaccactgctctcttcaaagctgtcagacagggacatttaagtctgcagaggttactgctgtctttttgtttgtctgtgccctgccgcccagtggtggagcctacagaggcaggcaggcctccttgagctgtgatgacagaaacttcatctgcattggcttcggcaaagcagaaatttattagcttacaagggagagtggattgtcattgagacatatgttctgcttacgtggagagtaacttgagcaacgttacccacctctatgtggaaacacaggtttatttagtatgttgaaattccagacataactatctgttcagtagcagtggttcctataagacaacaacttcactgttcattttgtgctagtagaatggaacttcacggaccttggagaagcatactccaaacactacaaatgatggttatactttggagagatgctaagacagcagatgctaaaatccagataccttttgtgaatatgaggcatatctactgggaacacatcataataatctgttgaggtaaacattaaagatggtggcaataagcagttggagaaaaagaaaaatatcaacatgcaaggcaccattgttttcttgcttcttaattgtaactttttattttttgtgtatatggctatcacagagatttaaaaattaatcattgaaaatcattaatagaatcgacctgtgagcatcaacacagaaatggataaagaaaatgtgttatatacacagtgggataccattaagcctaaaaatgaaggaaatcttgttattcacagcaacatgggtgagcctgggggggcattatgttcagtgaaataagtcaggcacagaaagataaatatcacctgttctcacttatatattccttggattgggttttgactttctcctgaatcttgatgacctttattcctatccatattttgaattctctctctgtcatttccaccctttctgcctggttaagaacccttccttgggaactagtacagttatttggaggaaagaaaacactgtagtttagttgttagagctcttgcaccagttttttctcatctgtgtgggctgatgctcctttaactgtggtgtaattgagtgcagactccttttttgaatgttttttgagggccgaggttttgtgcagggtctttgttgttgaaatcttgtc

SEQ ID NO: 460342 - DNA, 1028 bp, Homo sapiens
gctgcagctagtgtcttcacagtggccactcaagatgggccgctgccaccatcagtttgaagtcagtggctcttcttgtgatataactttctatgacaccattcttgcatataaagctggggatgccaccttgttaccaccagctagagctgcaggtctgttggagtttgctagaggtccactccagaccctgtttgcctgggtatcagcagcagtgtctgcagaacagcagattttcgtgaactgcgaatgctgctgtctgatcgttactctggaagtgttgtctcagaggagtacccggccctgtgaggtgtcagtctgcccctactgggatctccagctgcgtgctgggagaaccactgctctcttcaaagctgtcagacagggacatttaagtctgcagaggttactgctgtctttttgtttgtctgtgccctgccgcccagtggtggagcctacagaggcaggcaggcctccttgagctgtgatgacagaaacttcatctgcattggcttcggcaaagcagaaatttattagcttacaaggccccatcttgtccatgcacctgtctgcttccttggcttcagagcattgcctccaagtcctctacagcacaactttcccttcagcatccaaccttatgatgtactgggatattgtgttgcccctctcccctctctacctgtgctgggctttaaggctgacacacctataaaccccaggagtggagggaagggagagtggattgtcattgagacatatgttctgcttacgtggagagtaacttgagcaacgttacccacctctatgtggaaacacaggtttatttagtatgttgaaattccagacataactatctgttcagtagcagtggttcctataagacaacaacttcactgttcattttgtgctagtagaatggaacttcacggaccttggagaagcatactccaaacactacaaatgatggttatactttggagagccgtctgcatgctatcgctcatacctgatgacgcgccgcctga

SEQ ID NO: 460343 - DNA, 1640 bp, Homo sapiens
gctgcagctagtgtcttcacagtggccactcaagatgggccgctgccaccatcagtttgaagtcagtggctcttcttgtgatataactttctatgacaccattcttgcatataaagctggggatgccaccttgttaccaccagctagagctgcaggtctgttggagtttgctagaggtccactccagaccctgtttgcctgggtatcagcagcagtgtctgcagaacagcagattttcgtgaactgcgaatgctgctgtctgatcgttactctggaagtgttgtctcagaggagtacccggccctgtgaggtgtcagtctgcccctactgggatctccagctgcgtgctgggagaaccactgctctcttcaaagctgtcagacagggacatttaagtctgcagaggttactgctgtctttttgtttgtctgtgccctgccgcccagtggtggagcctacagaggcaggcaggcctccttgagctgtgatgacagaaacttcatctgcattggcttcggcaaagcagaaatttattagcttacaaggccccatcttgtccatgcacctgtctgcttccttggcttcagagcattgcctccaagtcctctacagcacaactttcccttcagcatccaaccttatgatgtactgggatattgtgttgcccctctcccctctctacctgtgctgggctttaaggctgacacacctataaaccccaggagtggagggaagggagagtggattgtcattgagacatatgttctgcttacgtggagagtaacttgagcaacgttacccacctctatgtggaaacacaggtttatttaaatggaacttcacggaccttggagaagcatactccaaacactacaaatgatggttatactttggagagatgctaagacagcagatgctaaaatccagataccttttgtgaatatgaggcatatctactgggaacacatcataataatctgttgaggtaaacattaaagatggtggcaataagcagttggagaaaaagaaaaatatcaacatgcaaggcaccattgttttcttgcttcttaattgtaactttttattttttgtgtatatggctatcacagagatttaaaaattaatcattgaaaatcattaatagaatcgacctgtgagcatcaacacagaaatggataaagaaaatgtgttatatacacagtgggataccattaagcctaaaaatgaaggaaatcttgttattcacagcaacatgggtgagcctgggggggcattatgttcagtgaaataagtcaggcacagaaagataaatatcacctgttctcacttatatattccttggattgggttttgactttctcctgaatcttgatgacctttattcctatccatattttgaattctctctctgtcatttccaccctttctgcctggttaagaacccttccttgggaactagtacagttatttggaggaaagaaaacactgtagtttagttgttagagctcttgcaccagttttttctcatctgtgtgggctgatgctcctttaactgtggtgtaattgagtgcagactccttttttgaatgttttttgagggccgaggttttgtgcagggtctttgttgttgaaatcttgtc

SEQ ID NO: 460344 - DNA, 615 bp, Homo sapiens
aggggtggagctgcccaagtctatgggaacccacattttgtatcagcatgacctggttgtgagacgtgaagtcaaaggagaacattttggagctttaagatttgccttccccgctggatttcagacttgtatggggcctgtagcccctttgttttggccaatctttcccattcagaatggctgtatttacccattgcctgtaaccccattgtatctacaagcctgggacacaagaagggaaaaacttgttcttcagaggctcggtttaaacccactgtctggctcgctgtctggctcgagagtgacttatggaaggaagggcatgaagaaggaccatgccgctgcacaagtgtccagggaacctcaggccatttcacaaggacaagctcaggccaaatgcatctggagaacccggagaaacctagcgtaaccctcccatctcaatcagactgaaaggtccatcaataccacgaaggacaatccaccgcagtgcacttagtcctctcttgctgagatgcccctctgcactcggctgcagcgtttctttccatctaatacgatattccatttcaagcctatgctgttgttggtaaattcttcttgctacccatgagc

SEQ ID NO: 460345 - DNA, 887 bp, Homo sapiens
agcagccagttcatgagggctccagtttctccacctccttagcaacattgattttctctctggatgtgagtttaggacactgcatttctaccattcaatttcttactacatttttgcacagggatcatggcacaagttgcagtttccaccctgcccatggaagatgaggagtccatggaagatgaggagtctgttgaagatgattccgtggagagcaggatggtggtgacatttctcgtatcagctctcgagtccacgccagtaaaaaactctcacagctccggatgtgagtttaggacactggatttctaccactcattttcttactacttttcttgtgcaaggatcatggcacaagttgcagtttccaccctgcccattgaagatgaggagtctgttgaagatgaggagtccttggagagcaggatggtggtgacattcctgtcagctctcgactccatggtcagaccttctgttctcacattctgtagttcagtaggactgggcgcaacccagacattctccaactccagttgttaagggcgcttatgaacgcttcattatgcaggcatgattgatgaagtcattgaccattggtaattaagtcagtcttcggccactatttcttcctggagcccaggggctgaaaatagttaattttatgtatattccaactcagaatacatcctatttttgaatatttgatgactttaggatactatattaactcttaattgaattaatacaagtttaggtgtaaagatgatgtttatgttgacaaaaattattaatgttttacatatatgaaagtaacaatatcatatatttttcatacttgtacaatactttgaaatctattattagctaatattttatattcattttgc

SEQ ID NO: 460346 - DNA, 3561 bp, Homo sapiens
gctaacaaattggaaaacctggaggaaatgattaaatatctggacacatgccaatccggcaagattgaattaggaaaaaataaaaaacttaaggagacctataacataataagattgaatcagatactaagtccattaggagagaatctttcatctgttttaactgctatgctctcagacagtcttctggatgaccttggaccaatccagctctaccctattcttgcagagaatttcaccaactttaagacattctcggtagaaaaagcaaatggggaagaagtaaagatagattctttcattattatcaatggtaaccataatactcaagctaaccagtggttagcaaacacaaagcagggggaagaatcccatccttatgttaagattgtagctagagtcttatttaaagacaatttcaatttaatgttcaaggagatatctatgaaaattcaattggatttcaaatttcaggaattcataaggtcagggaaaatcttaacaagtgtggtaaagtgaagagatttcaaaaatgccagtttttcagacaggagaggagataaagggtttgagatagcagaacaatagagctaagaaatataaacttggtctaagtcttttgacaaaatctagcatcagcctgaaaatttatcattcttttcagtatatgtttcatgtaagcttgttagaaaagaagaataagattacgtatacagatggctaactcagcaggtgagagcttgattaatctcaggtcaagacctcatgtctcctacgggctcattattttcacacgttttcatgtccacagtgtacatatttaacccaggtcagtcatttcataaatgcttattcagattcattcataacgggtaaattcttgaagttctaactccacaataaaagaaaaacttacagcacattcataataatattggatttgtagtttcaatcacaaattaaaaccaacaataatgtttttatgcccattatccattgtctctatgttaatgaattccattgatccatcaacttatatttagggtttctgattgtctattttgctgacaagtcaataccttcaactcattgaaaccatggaaaattcataagatgtgcaatagagatctctgttcccaatgattagtcctgaaacatatgttttgctatactttcaaatagtgaggcacgatggccgggctttgttgttgttttcttatgaattctgtaaatttcactcaccttttgactaattttccattcttagtactatagcagaagtcgatgctaggccatccaaagggtatcagatcaactgtcagaagtgaggagctaatatttaagcaatgcatctgcttgtaatacctgactctctcacttctgcttgtgcgatcttggtaatgttatctttctgggcaaaactttgctcatttataaaatgggaataataattatgtctattctatcagattgttatgaagattaaataatttatagttcacatagtatcttcccatgatttattttatttaatccttaaactctatgagataagacaaggaggcatttttgtccttagttgacaatgaaaaaaaataaggattgatatggtgaaatatcctgctcaaagtcacaaaactgttactcaagtccttcattcaacaaaattatgccagagaccattaaaataaaaatgattagaaagtgatatttgctgttctctctgtaattcaaaatttattgagagaaaagcatataaataagcacaagcaaatcattcagaggtcctataggagatgcctaaacaaggtaagagagagtagtcactttttttgttgttgttgtttgataataggctatgccttgcaaagcaaaatagaataattgtatcattaactggagagagagagagagacagagagagagagagagactccagtttaaaggagatctggtgagaaatggggtaatgcgctccttagggacttcttcttgagatatgtacttacatagaaagaaataaacttgatgtcaagattttactgaatttttgtgaacaagcagagtttgtggacatcttttcaaggtaaaagcctgtcatgtagacaaaatgaagatgagttagagagctttaccaaaacactataaagtatgcatgtcatgttcttcaatttcaaagattcatgctgttcattctaactcagaaaaacaggcaattgctaaagaaaaattattttaagctgaaattttcagcaagctcacagtaatttcaggtatcttcataatggtagagagggcaagatgcatcaatatgtaaactggctcaaagactggagaaattaatatttaagcaggcgactgaagtctaccctgttcactcaagaagtgaagaggcaataacaggtaatagaacccagcaaaaacaaggtgccttgtggaggtcatggaaatggaaaagaaaaccagtgaaataaaaaatttcatgaaaaaggttctagtctgaactgagagaagccaatagtacactgtagaattggattcagaattgctttcaaagttttattctcctacttggatatgaaattttttttttcctttcaaataacaatatggacttctagttttcagtttagcatgtaggaaatttgaaagtctttgttctaacaaaattttaaggaaagcactttaccataagttgaccctgattagtaccacttttccttatgtgattctccatgaagttacagaaaggacaataataattattaccatttactttcactgttattttacaatgaaacacaatctgtgaaaataaaaatgaaagtcctatctaaagtaaatatcttctccctgctacaatatagattgtggtttaattttcaaacatatattttaaattcatatttgaagtgaaaactgttttttgtttgtttgtttgtttgggggatgcaaaatttagtagcacaaataacctttacatgtttccaatgaactagcatagatgagtcactgaggttgtcttgcttctttaccatcaagtctattttcactcacctcttgcttaccctgccaggtaccctacaggttccagtcatagacaaagaagcatcagcttcacatagaccattgaaacagctttcagaggattctgcttctctgatcaaattctgaatgatacaggtaagaaatgacttgctcctccttgccttctgccatgattgttcctccgcagcctccccagccatgtagaactagaactgtaagtccattaaacctctttctgtggttaattccccagtcttgggtatgtctttatcagcagcgtgaaaacggacatatatatttaagaatctagggaatctgtcatttttttttcctttacatccacagcattgatcagttagaaatgttggaggaaaacattcttattcaaaatagtaacaaaatacaaaatgtctaggtatatcctgattcagaaatttgaggaagttatacaaagaaaaatataaacatttgctcaaaaattaaaaaatgcatgacaataaatttgaaaaccat

SEQ ID NO: 460347 - DNA, 1675 bp, Homo sapiens
cctcctgggggcagtgaataggcaatgagagggactggaaggtcacatttgcagccagagcccaggctgccctggcatgtccggcaggaccatggcccgtcctcctattggacggctgcgtatcccctttccctcggtgaccacatttcaggacccttgatttctttgcaaatcccaccctgcctggccagtcccctcactctcatgccgaccgcagaaccaaggctgcgccccttcaaaggcagagttggggtaattttacttgacaagactgctgcctgccctcctcctctttcctcatctgccttcctctctcctgaccctgtttattattatcaggaaaaaacaataggtccacatttaaacttcaaagaaaagcacgggctcaggtttcaaacaactgcagaggcctgggcttgggacagctccatcccgctctctcacctgaactacggggaacctggggatggatttcaactctctgcagcccagcactcagggtcaaggtgaggcccagtctgtgaccacggaggaattctggaatgtggtgatgaccaacaggaattttatgagtgtccctctgtggaggagcctgagagaaaggctcatggagggcagagggtggagggcgtgggaccaagttccttagataaggctgtggccccatggtaagggtctggacggggaagtgattcatccaggtggcgctaggagggatcttcgccgcagagggcattcgagagatgacaactctagacatccatgcaacttctgttcttgtgctcctgctgttttcaaattccacagtcacagactgcaccctggaaaactcaggacaccctagagtgaactgctctgaagaacaaagttgctacttgcttgctacctctggttgctacccctggttgtgtttggttgccacataatgaaatgattttccttccctcttttatttcctttctttcttttttttctgctacaaatggaaaaatagtttgatcaccttgaatcttttcacccttggtattctcccccttcacacccgagcaccgccccttgataaatgagaacacgtgtactgaaatcgcagacttcaccctccagactcatcgtcctcatgctctcaggggggacatgtttcctttcaaacctccagaataaattcatcacagcaggaagaagattgtttttcttaaaaaaaatcaaatcctgtatcacaattatttcatttcagagggaaaatgctccccttccatctgaaactttcttctctccagctctgcagtctttgaccgtggcgatccggcaccctcggcccggctgcttttgcaaagtccacactgattcattatttcagagagccaaagggtgacacatgcatattttgaatattaccctgtatgtagatctgcctctggcttgacttaggggcttctaactgcctgatgtattggcactcgcatgctttcaatggtgtttgcatttaaaaaatcatcttcaattctttcatttggagggtgaactttctgaaaaggatgctgggaaccatgttatttcagtgttatttctctactataccagcccctttgcaagcaaacccctttttccttaatgacaacacacagtgacaaatgcccagtgctgtaaacgtgaagctccttggtttgactgagac

SEQ ID NO: 460348 - DNA, 1526 bp, Homo sapiens
ggacctcatcctgagccctgggaggggaggggcaccatgggcccccctgcagcagccaggattaccacccaggggactcggccttctgtggccctggccagacttagaatttggcccaagacaaacttacttggagccgcttctcagtacctggggcctgtgcattccaggcaagaactggggtgtgtgccgcctttggggctccagtccaagcatcggggcttctacagcactgtgggcttctcgggtgccaagaggcagaccacaggccatcttgaggaggactctggtaagagcttccttgtgtatgtggatgatgtccagaatgttggcctggtcctcagccaggccttggagctggaccaggccatccacttcagtatagatgccttccactctgtcagtgagctctttgccagtcagtccaggaaggacctggacccagccatggacctgttagtgctgtctcagggacaccagaccaacatcctggacatcatccacatacacaaggaagctcttaccaaagtcatggagagcaggcaacatgtggccgaagggaagacagaggtgcagaggctgatgatgtcagaatcacaggaacaggatttctttggccactttggctgaaattcaccacttccatccaattccagtgagagacatggactcacagatgcagcatttcttgcaacaagagatactactttttcaaaaagtcacccaggaattgatagtgttgaatgactcgatactcgatcgtggacggtttccagttcaaggatactttctacagcagaataataacactagcaaagagctagtacaaggatggttttgtgctcaactgaaatccagctgaatacagaattgtataggaaacagttaatatggtgatagaatagaaacagtagcaatcgtgaactaaatcatactatgaatgcctaaactactgctgtaacttttggaaaaatgataataccactttattgcttttcgaagtatgaatattttagtgtatatgctctagacctcaaactctataaagagtctcaaagaagttggctggataaagcctgctgtggatgtctttatattcaaagattgatgatgcaatttgaatatgtgtccccaccaaatctcatgttgaattatatttcctaatgtggaagttggatcctggtataaggtgattgaattatgaaggcaaatttctcatgaatggttcagcaccatccccttgtaccatccttacaataatgagtgacttctcatgagatgtggtcactgaaaactctatatcacctccctactctccgtgttttccccttgccatgtgagacaattgattctttctttgccttccatgattattgaaagatttctgaggcctagaagcagaagcactctgcttagaaccatgagccaattaaacctctttttcaaaataaatcatacagaaaatggcaaatgaggactggagcgttgctataaagatacctggaaatgtggaagcagctttggaa

SEQ ID NO: 460349 - DNA, 2157 bp, Homo sapiens
  misc_feature (1)..(1): n is a, c, g, or t
  misc_feature (5)..(6): n is a, c, g, or t
ngccnnagtatctcacaatgggactgtattcgaggaccgagtctctaaagaggtgattaggttaaaatgggttcaaggcgtttcggttgtttagcattccccgcctgctctaaccccaacccctgtctgcggtgctttgtcacggtggccctggcagtgcactgcaccgtggatggtaacatgttctcaggttctggggagtgggatgtggatatctttggggggctgttagtctgcctaccacaggtgggttctgtgaagaagcgtccctgcagctcctgcctgcacctggcagggagcaccgctacagagtttgctgctgtaccggctcagaaacgggagttcccggcacagggccatcggcgagcctcccagctggagtgtgggcagaggcagacactggggctgcaggggagtggcccccagggtgcaggtgcaggtgcaaaggtcctaaggcaggacctgagcagatgcaggtgcaaaggccctgaggcgggacctgagcaggagccgccagcatacttccctcacgtttctggccagaagtggatcacaggccttccccggattactcaggcccagagggtgcaatgtggtccccactacatggtagacaggatttgaactaaacaacagttcgctggagtggaaaataaaggatgctacattttcttattgtgataaaaaatatatatcataaaatttaccattttaacaatttatttagcttggggccctctgtctggggtcttcccctccatcctccgggaccccagtcctatccctctgcccaccctgtccttctcacccactctacaaccgagtttcaggactgaaggaccagggaccttcccacccccaggggctccctcaagaagagaaaattctctcatcatgagaaaaacatcagaccaatcccaatgcaggcgcatcctgcagctccgtgaccagcaagcctcgaaactgtcaaggtcacctgcctcgaaactgtcaaggtcatcaaatcaaaaccaaggcacatcctggcctgtccgtgcctctgcgccccaggccagcacctctgtagaatcgtttcctagaaatggaacagctgcttcaaagagagcccgtgagaagggtgtgggttgtaaggcaactctgccacggacaagatcatcttccaaagcgggcagagggagatgatgtggggtgggcgaggaaggtgatgtgtggcgatttcattacaggtgatcagagaaggtttctttgagggtgacatttgagcaaagacgtgaataaagagacagttggagccatgtggagatgtgaggaggagggttccaggccaggggacccgtacgtgccaaggccctgagagcacacaatttaacccaggacagcagggagacagcaccccaggccgagtgaaggggaggaccgcacaggcaaacgctggcctggcgaggcaccagaggctgtagaggaaagcgcctcccacctgtgagatgccaacaagatacccagggtctgaagagtcttaaaagaaaagcaaggagcgggggtatgatatccgaccaaagagcaaacgcccgagccacttggcactgcactctaactgggaggctgagcacacaaattagatgtttgtaagaataaacagtcattagaactcgagaactagaggagaaataaacatcatttcaagatatttgactaatttggctctgagctctgcctgcctgtgaatgtgctggtttctggcttgcggggatgcctgtgtatctgtgcatgcttcttgttagccctcttggttacgtgtccttactgagtgccaaagtctcctctgtaaaatggggataacagcaacacccaactcaagggtgttgggagagtggaacaaggaaatacacacaaattgattaaaacagagcctggcacctatacatcatattttgtattcactgtctctctccctctaacgtcagcttcctggaggcagagacctcttctgtcttgcttatctttgtgctgccaaaactgtgaggtatccccaaatgttagtcagctccctcatttcaccaatgggaagggacctccctcaatgtttttggtaaacttacatataaactttgggtgggggcgtatgcatagtccaaagttcacttgcacatttatatt

SEQ ID NO: 460350 - DNA, 1002 bp, Homo sapiens
ggccttccaaagtgctggaataataggcatgagccactgcgcccagctatagtattctttcaaccacagacagtagagttcctacgaggaattccaggaagctgatgtttttcatcccttccacctttatcagaatggattttaagtcccttacagtctggagcgctggctaacagctgttgacctgcttcttactccagctctggttccaacagtaacactggctcctcaaacttccaacccaaggaacggtttctgccaagaaaatgtgccttaggagatgagactaccagtggagcagaattccggcagttctccaggggctgcctgtcacgagggcactcaagctgcctgcagagaggcccatacggggagcatctaaggtcccgccaacagctggcaccaacttgccaaccatccgggaagaagaccctccagccccagtcaagcttgcaaatggctgtggctctggctgatgtctcaactgcaacctcttgaaagactccaagccagaatgttcctgaatttctgaccccccaagactgtgagatatattaaatgtgtattgttattttaaatttctactgtgcccaggtggagaagggtgcttggagagctaaggcggtcactgggagggtatatgtcttctgctgggtacccaggtgttctatggacaactgtgggagtagaggactggatgactcatgcagctggctcctgagtcccccagatgatgacagattggagctgctacagaatcctgactgggactcccacttccctgatgcagaccatttaccagactacgcttttggccgatggctattccagcaaacacctttggaagagactgcctgtgcatgccaacaagctggctgtatctacatgttctctcataaaactaggagctcatctactctgaagtcaaagtctagcaagccagttgccactgaatccaacctctacagcattactcaacaggaaaggggtgagttatagcac

SEQ ID NO: 460351 - DNA, 341 bp, Homo sapiens
tggcctcaagtgatccaccccctttggccttccaaagtgctggaataataggcatgagccactgcgcccagctatagtattctttcaaccacagacagtagagttcctacgaggaattccaggaagctgatgtttttcatcccttccacctttatcagaatggattttaagtcccttacagtctggagcgctggctaacagctgttgacctgcttcttactccagctctggttccaacagtaacactggctcctcaaacttccaacccaaggaacggtttctgccaagaaaatgtgccttaggagatgagactaccagtggagcagaattccggcagttct

SEQ ID NO: 460352 - DNA, 334 bp, Homo sapiens
tctaatgattagaatgtggctgaagtgcaagtgtgtgtcactgtggtttctgctttgttctcccttggattgtctgccgcaggggctgcctgtcacgagggcactcaagctgcctgcagagaggcccatacggggagcatctaaggtcccgccaacagctggcaccaacttgccaaccatccgggaagaagaccctccagccccagtcaagcttgcaaatggctgtggctctggctgatgtctcaactgcaacctcttgaaagactccaagccagaatgttcctgaatttctgaccccccaagactgtgagatatattaaatgtgtattgttat

SEQ ID NO: 460353 - DNA, 863 bp, Homo sapiens
ggtcaggagttttcagtgctctgattcggtaaatttatttacagagacagctgtccgagggtggaataaggactcgggagtgagagggaggcactgtcaacactttcaggccagaccagcggctcacgctttggagaccggggctgcagcaggttagtttgtagcctgaactgcatgatggagattgagctggatctattttaattgccatgaagacatcatgggcaggaagcatgcatgctggaatagattagcaaacattgactcctcacgaaagccacagccttccaactgcaactcagtggtcagaggaggatgagcaaaagtggaggacagagaatgacccgacgtggagctgagcggccctcttctgcgtggcgatttggagaacacagtcagcatgcacacacatcattcttcaggtgcagttatgacagaaggatggtcctgtctcatccctacacctgtgaggcctcagttctgcctctctcccctgttgtggccttggaaggaaaagcctccagctctgagtctgctgccaggtggaggttcttccatttgataagctttgtgttggacaaaacacagtggggacaggaacctaaagcagttgtgaaagagccggaggacccctgtccccaaaccctgcccatcgggaagaggccacagagctatgtgtcggccccacgcttgggcagaccactgcaggcacgtgtctaagggaatttctctaaacagaaatgaaataataacagaagaaggcttagggcttcaaaatggaaagaacaacattgaaatgagtaaaaatcgtgctaagtatccttttcctcatgtggcgctctctatatatagaggatacttac

SEQ ID NO: 460354 - DNA, 591 bp, Homo sapiens
agcaattttgcatgcatagaacacgtctatctatgaatatgcctaatgaggtacacaaagactcttattatccaaacagagacattccactggtgctagacagccacagatggaagttttctctgcctcctggaaatgaagacaaacttttttctttcttcagccatgaggattgctgtcctcctcttcgccattttcttctttatgagccaaaacttgtaaaggggagcgggctactcacctccagccttttgtcatccaggggcaaattcaaggagatctgtgaacgtccaaatggctcctgtcgggacttttgccttgaaacagaaatccatgttgggagatgtttaaatagccaaccctgctgcctgcctctggggcatcaaccaagaattgagagcactacacccaaaaaggactgaagcctgttgttttctggaggttttatgttctcttttttctctctccctctctctgtctccctgtctccctttccctctctccatttttctcacagggatttttattgaatcctcaaaaaagaataaaccaaaaccaaccagcacaaaactcttttaaaagtttatatta

SEQ ID NO: 460355 - DNA, 1839 bp, Homo sapiens
tttctgacacaaagttcagatatggcttctaaacatcctggtatttactacaaatatgcagaagttaccttagcccttcctgaagaagacaggaaaatatggaacagtttggaacttcctagagatttgttaaatggctttgaacaagttgctgataatgacacgggcaatgaaatccaggctgaagtagtttcagatggagatgaggaacttgttgggaactggagcaaaggtgacccttttctatgttttcataaaaaaactggcagcatttttgcccctgccatagaggctgtgggtgcacagaggctctccactgaagcactgcctagtggagctgtgagaagagggccactgtcctctagactccagaatggtagatccaccaacagtttgcaccatgcaactggaaaagatgcagacactcaaacccagcccttgaaagcatctgggagctgtaccctgcaggtcacaggggcagagctgcccaagatcatgggaatccacttcttgcatcagcatgacctggatgactctaccctccacacctcagcacagtgctccctggctaccccagctgtggctgatgcagctccaggtggggctcatgccacagttccagaaggctaaatgtttgccctgctgggttttggacttgcttggagctttttactcttattttgattctctctcccttttggaatgggaatgtctgtcctatacctgtaacaccattttatcttgaaagtggataacttgcctcaatttcggaggtttacaagtaagactctggaatttggacttttgagctgatgctgatgctgaaatgagtttttggggctatgaggatggaaaaaaacgtatatgtatttaaagttgtgagaaagacataagttttggagatccaagggcagaacactatgacgtgaaagtttgttccctctgaaattcatgttgcatgaactttgtccccagtgtggcagtatcgagaggtaaggccttcaagaggtaattggatcacggccctcaggagggaatttatcaattaatggattaatggattaatgaattgtcatgggagagatattagtggtttcaaaagcagagaaagagagacctgagctagcacactcctccccttcaccatgcgatgcccttcactaccttgcgactctacagcgagtcaccaccagcaatgagacgctcatcagatatggatcctcaaccttgaaatgctcatctccatactgctttgaaataatcattaaaactatacatttaacaagatcggagtcatatggtgcgcatctgccagcacagcaataatacaagaggacatcaccaagggaatgagcctagaccaagaaaggtactacaaactgggtctgaagcactgtgaacagggtggaagaagagcaaaacataaaacctgtttcagagaatgagtgacaagttttgttgggtcaaatacagcgactgctcatgtataacctttattgattccatgtttgtatccctccaaaatttatatgttcaagttctaacccccagtatgatgacattaggaggtggggcttttgaaagcaaattgaatactgcttgtgtttgactgttttaaaaagggaaggaaaaaaggagagggagggaagaaagttaatgaaagggaagaaaaaatgaagagaaaatgggaagggaaaggaatggaagggaagggaggggaagggaaagggaggaaactggagggaaggggagggaaggggagggaagaggagggaaggggagggaagaggagggaaggggaagggaagggagaaggggagggaagggaaggggaggggg

SEQ ID NO: 460356 - DNA, 1994 bp, Homo sapiens
tttctgacacaaagttcagatatggcttctaaacatcctggtatttactacaaatatgcagaagttaccttagcccttcctgaagaagacaggaaaatatggaacagtttggaacttcctagagatttgttaaatggctttgaacaagttgctgataatgacacgggcaatgaaatccaggctgaagtagtttcagatggagatgaggaacttgttgggaactggagcaaaggtgacccttttctatgttttcataaaaaaactggcagcatttttgcccctgccatagaggctgtgggtgcacagaggctctccactgaagcactgcctagtggagctgtgagaagagggccactgtcctctagactccagaatggtagatccaccaacagtttgcaccatgcaactggaaaagatgcagacactcaaacccagcccttgaaagcatctgggagctgtaccctgcaggtcacaggggcagagctgcccaagatcatgggaatccacttcttgcatcagcatgacctggatgactctaccctccacacctcagcacagtgctccctggctaccccagctgtggctgatgcagctccaggtggggctcatgccacagttccagaaggctaaatgtttgccctgctgggttttggacttgcttggagctttttactcttattttgattctctctcccttttggaatgggaatgtctgtcctatacctgtaacaccattttatcttgaaagtggataacttgcctcaatttcggaggtttacaagtaagactctggaatttggacttttgagctgatgctgatgctgaaatgagtttttggggctatgaggatggaaaaaaacgtatatgtatttaaagttgtgagaaagacataagttttggagatccaagggcagaacactatgacgtgaaagtttgttccctctgaaattcatgttgcatgaactttgtccccagtgtggcagtatcgagaggtaaggccttcaagaggtaattggatcacggccctcaggagggaatttatcaattaatggattaatggattaatgaattgtcatgggagagatattagtggtttcaaaagcagagaaagagagacctgagctagcacactcctccccttcaccatgcgatgcccttcactaccttgcgactctacagcgagtcaccaccagcaatgagacgctcatcagatatggatcctcaaccttgaaatgctcatctccatactgctttgaaataatcattaaaactatacatttaacaagatcggagtcatatggtgcgcatctgccagcacagattgccacctttggacagatgaaaatactgaggcagagaaaagttaagtaagttccccaaagagaaatacacagctaagaagtgttagtttaacctgaccatgtggcagaaagccagatatgcaaagaaaaacatgggggaatggatcaagaatgcaataatacaagaggacatcaccaagggaatgagcctagaccaagaaaggtactacaaactgggtctgaagcactgtgaacagggtggaagaagagcaaaacataaaacctgtttcagagaatgagtgacaagttttgttgggtcaaatacagcgactgctcatgtataacctttattgattccatgtttgtatccctccaaaatttatatgttcaagttctaacccccagtatgatgacattaggaggtggggcttttgaaagcaaattgaatactgcttgtgtttgactgttttaaaaagggaaggaaaaaaggagagggagggaagaaagttaatgaaagggaagaaaaaatgaagagaaaatgggaagggaaaggaatggaagggaagggaggggaagggaaagggaggaaactggagggaaggggagggaaggggagggaagaggagggaaggggagggaagaggagggaaggggaagggaagggagaaggggagggaagggaaggggaggggg

SEQ ID NO: 460357 - DNA, 1559 bp, Homo sapiens
tttctgacacaaagttcagatatggcttctaaacatcctggtatttactacaaatatgcagaagttaccttagcccttcctgaagaagacaggaaaatatggaacagtttggaacttcctagagatttgttaaatggctttgaacaagttgctgataatgacacgggcaatgaaatccaggctgaagtagtttcagatggagatgaggaacttgttgggaactggagcaaaggtgacccttttctatgttttcataaaaaaactggcagcatttttgcccctgccatagaggctgtgggtgcacagaggctctccactgaagcactgcctagtggagctgtgagaagagggccactgtcctctagactccagaatggtagatccaccaacagtttgcaccatgcaactggaaaagatgcagacactcaaacccagcccttgaaagcatctgggagctgtaccctgcaggtcacaggggcagagctgcccaagatcatgggaatccacttcttgcatcagcatgacctggatgactctaccctccacacctcagcacagtgctccctggctaccccagctgtggctgatgcagctccaggtggggctcatgccacagttccagaaggctaaatgtttgccctgctgggttttggacttgcttggagctttttactcttattttgattctctctcccttttggaatgggaatgtctgtcctatacctgtaacaccattttatcttgaaagtggataacttgcctcaatttcggaggtttacaagtaagactctggaatttggacttttgagctgatgctgatgctgaaatgagtttttggggctatgaggatggaaaaaaacgtatatgtatttaaagttgtgagaaagacataagttttggagatccaagggcagaacactatgacgtgaaagtttgttccctctgaaattcatgttgcatgaactttgtccccagtgtggcagtatcgagaggtaaggccttcaagaggtaattggatcacggccctcaggagggaatttatcaattaatggattaatggattaatgaattgtcatgggagagatattagtggtttcaaaagcagagaaagagagacctgagctagcacactcctccccttcaccatgcgatgcccttcactaccttgcgactctacagcgagtcaccaccagcaatgagacgctcatcagatatggatcctcaaccttgaaatgctcatctccatactgctttgaaataatcattaaaactatacatttaacaagatcggagtcatatggtgcgcatctgccagcacagattgccacctttggacagatgaaaatactgaggcagagaaaagttaagtaagttccccaaagagaaatacacagctaagaagtgttagtttaacctgaccatgtggcagaaagccagatatgcaaagaaaaacatgggggaatggatcaagaatggtaaattgacatattattataaaagaatttaaatgaaaatttaagatgttttgtgtcaaataaatgaatgagagtcatcgtagg

SEQ ID NO: 460358 - DNA, 1257 bp, Homo sapiens
cttcaatcggtctcccttgcgggagctgccgaacttgtttagagactcctagactccatgtggcttcttctgcctgcatcatggcctggaaaccgtccacatgatagcctaaatcaatcataggactcaccagattcagtgagtacatgtgcaggttcattatcagcatgtattgcatgatgctgagatttggagtacaaatgatctcatcacccagggtcttgctctgtcacccagcctggagtgcaatggcgtgatccgctcacagcgacctctgcctcctgggttcaggcaattctcctgcctcagcctcttgagtacctaggattacaggcgcacaccaccacgaccgaaaagtgacctggaaggaacaggcgtaaacatggaggatccagttgggctttgcatttgcatccgggtggtcgcattttaaagaactgaaccgatgccaaatacagacagcaatttttatgggagagacaaacagagagaagaaaaggaaaaccaaaagacaataaaaagacgggatacatcagaggataaaaggagctcatttcctgtagaggaacaaactcctttcctgtcttcctgtctcactcccccaaccaggacagctcctctatctacagcaggccctaagtcacacctccattgacctaataaaaactggttcctatcacttctctctccatttgactgcctcccaacccctcacgggaaggggaccacacatgtgaccgggcgcaggggccgggatgaatgcttctgggtgccagcaagagcagaactctgtgcagccctgcagcagcatctggagggtacccttgacccctggacccccagaggtgaagcctggggttcctatgggtacaggatgggggcatggtgggggtcaggatggttttggaaaaggcaacattcgagcaggaaaacaggaatgcatgttcttgctttgggccactggtccaggcttgagggtggacattaacataatggatgctgacagaaaacacaagattcctgggtcagagacaaaggactttgttactcacaacacagtgtgtctgttcattacctcacccacacttaattcccatggatatgaagcaatgtgggcccaagaggagactgtgcacacagtgggattgaggagaggaggttcctcacagatgaggaacactatgcttggagaacccactccttttgcacaaaaggaaagccatttcattgtctgcagagagatgtgacctgaagtct

SEQ ID NO: 460359 - DNA, 714 bp, Homo sapiens
  misc_feature (683)..(684): n is a, c, g, or t
cttcaatcggtctcccttgcgggagctgccgaacttgtttagagactcctagactccatgtggcttcttctgcctgcatcatggcctggaaaccgtccacatgatagcctaaatcaatcataggactcaccagattcagtgagtacatgtgcaggttcattatcagcatgtattgcatgatgctgagatttggagtacaaatgatctcatcacccagggtcttgctctgtcacccagcctggagtgcaatggcgtgatccgctcacagcgacctctgcctcctgggttcaggcaattctcctgcctcagcctcttgagtacctaggattacaggcgcacaccaccacgaccgaaaagtgacctggaaggaacaggcgtaaacatggaggatccagttgggctttgcatttgcatccgggtggtcgcattttaaagaactgaaccgatgccaaatacagacagcaatttttatgggagagacaaacagagagaagaaaaggaaaaccaaaagacaataaaaagacgggatacatcagaggataaaaggagctcatttcctgtagaggaacaaactcctttcctgtcttcctgtctcactcccccaaccaggacagctcctctatctacagcaggccctaagtcacacctccattgacctaataaaaagtgatgcggcagcgtgnnttccttcctgcccatcccaacacaaagccg

SEQ ID NO: 460360 - DNA, 1984 bp, Homo sapiens
  misc_feature (3)..(3): n is a, c, g, or t
  misc_feature (7)..(7): n is a, c, g, or t
  misc_feature (11)..(11): n is a, c, g, or t
  misc_feature (14)..(14): n is a, c, g, or t
ttncatnccgncangactttgtcctggaaaggcaggacacctgaatagccactacctgagtacctctcctgtgaggaaaccagggtgacccgggaaaccatggttctttgctttccgatcctggtgcattttataaaaaggggtgcggaagtgtgccaacatgctgctgttcctgccagcaaatctaagagactgttgacactgttgcactgggctgtccaaagaaatgtttgtgatcatgcacctgccactggagttgggaaatgctgtgacccacgtgccatgctcaaagaaccaggaggatgtgtgctaaagaaatgtgcagaggtcaatagtcagctaaaaaaggagaatgaggagataattccaggcagatggaagagtgacagcaaggcccctgagaaaggagggtgcaggacatatctatggagtagaaaaaagaccagtgtggcccagagcactgatgaggattcttttagcaaaaagcattccattcacaatacatatccatttactactcagccttctgtggtcaatggagcctctacagcttatgaaattgcaaagactgagaaaacccccaaacttaatgataattgttgaatcagaggagtcttaatttcaggagatcccaagtctccccaaaccacctgcccatgaaaaataaaatctagggatttccagttgttttattagggggttaaaacaccatgggcaagtattgggaaaaaccagtaactaccagaactatctaatgatcaacgtgagttgtaaaagacatgtatttaggcacccaatgctttgagaaaccttatcattttgaaacattcccctttaactcttgtaatgcttcctattttaataactacttttaaataacattagtgtagttatgcctgatttttttagttagtttgcattgtacaccttttctattcaattactctcagtaatttttgttctaacaattaagatttatcccttttaagataatatagttttaatggtctaatattttttcttttaattaaaatgccattggcctaaactcattcagtcgttaagtattcatgaaatccattatacccttaagcaaataaaaaatctgttaacctacacttcagtctgcctcaggcatattcggagtctcatgggggtatctgtgaagaagacgagcacaagaaagcctaagttcagtacacacagtaggactgaatcagaattcttatggtcacaaaagcctcttctgagggtaagaaatcagcaaaaactccaaatcagcaaaggaaacagacttaaaatacatgctcatttccaaaaggtctgactccattcttctttttgccaatttttagatcccatataatcttggatagaaaaatgatctatactgcatcagaatcatggaacctattggcaaagggcattctgtcccttcaattgtagcttcaacctcattgtctaataaataataactaccactttttgagggatcaatgtatatcaggcaattttctgagaggacttaaggctgcaccatttcattcagacattataatagcgattcaacattgctagctccattagcaaggtactattattttactgaagccccttaactccagtacatccagtatacgacagagccagaaccttaatcaaagtccatttgttgacaccagattctaactataacctttacaatatgttaactttaactgtgcttattccgattgcttattttataccatcccatggttccttgattttattctagatcccatctagaattgaagccaggcaaaaagttgctcctatttgttgaagttatagtttgttcatttaataccttcatactaatccttccacttatgcatattaaaaccctaaaaagtgcagctccaaaaagtgcctagtaacaagaacaactattttctaatattctgcaatatgaatgatgtccccttgagttgtgcagcaactc

SEQ ID NO: 460361 - DNA, 992 bp, Homo sapiens
agggggacgggggaacctttcccatttcaacaccaccgctgtggctgcatgtggctgccataagaaaaagaacccattctttggcacagctgaagcaggactcttctcgttgttctccagggctccagccctccccctccttacacagtggggatgtcagcaccacagcctccctttgcttctgtgcctgggaggaaggaagatgcctgctcttgttcttacccctgcctctccctccatctctgggttcctgtacctcccatcatagtactgttttgttttgtttgtgtcataatagacaccaccctgatctcatttaatcacctaaaggaaatccttaagcaatgcaggtgtcacagatttactttaaggcttcaagggtaaagaaagggactgaaacaagaagagtaaatacaataaaaatcttgataatagggtataactgtgtctcctttgttagagggcagggtgagcggggggagcgggaggaaagttttaggctattagcaaatcgggtatcagtttcagactgtgaggtcccgctccagccaatggatgcaggacacagcagtaaggacgacccaaatgctctctctctctctctctcactctcactctttcttcctgtctttattttgcaacagaatctgagcctggacatcaagaataaagagatctgtttaacagccatgagggagtgcacggatgcatggagagccaggaatggtccacagcaatcaatgctgcaggaatgaatttgtttaaatggattttttttccatttcatgaataactttgttcaagcctttgatggacaatgtttctcaaaacctgaggaaacaagatagctttgcaatgctttaaacaaacgttatttcctttggtgctttaccagttaattaatgtagttgttctaaatgggagggttgatctactgtaaactgacccatcaccacaaaacttatgttttctgagaactgtaattttctaaa

SEQ ID NO: 460362 - DNA, 1928 bp, Homo sapiens
ttttttccaactaacatttcctctgggaaatgatgagaactgtgtccagggtactggccccttatctcacttgggcttatgctaaagatgtaaaatgtggtatagatgcccaagccttaatgcttcaaggtgcagaacttttagccgatgctgtagccattacaatggggtcaaagggaagagcagtgattattcaacagagctgtggagatcccaaagtaacaaaagatggtgtgactgttgaaaaatctattgacttaaaggatgaatataacagtattggagttaaacttgttcaagatgttgccaataacacgagtgaagaggctggggatgacactaccactgtactgttctggcatgctctattgccaaggatggcttcaagaagattatccattgtacctgctcttgaagttgccaatgctcaccataaaactttggtcataattgttgaagatattgatggagaagctctaagtacattcgttttgaataggctaaaagttggtcttcacattatagcagtcaaagctccaggatttgatgaacaattgaaagaaccagcttaaagatttggctattgctactggtggtgcagtgtttggagatgagggcttggccctaaatcttgaatatgtgcagcctcgtgacttagcttttctcagtcctctgagctcaagctaagccaccatatcccctgtgacctgcacatacacatccagatggccggttcctgccttaactgatgacattccaccacaaaaaaagaaatgaaaatggcctgttcctgccttaactgatggcattatcttgtgaggcatctcaccaatttcaaatccgatcttctcggcttagcggctgaagactgacactgcccgatcgcctcagaagccccctagaccatcacggatgccgagctttagtataagaagacaggaatgtcaggcctctgagcccaagctaagccatcatatcccctgtgacctgcacatacacatccacatggccggttcctgccttaactgatgacattccaccacaaaagaagtgaaaatggcctgttcctgccttaactgttgacattatcttgtgaaattccttctcctagctcatcctggctcaaaagctcccctactgagcaccttgtgacccctactcctgcccgccagagaacaacccccctttttcctttacctacccaaatcctataaaacagccccacccttatctcccttcactgactttcttttcggactcagcccacctgcacccaggtgaaataaacagctttattgctcacacaaagcctgtttggtggtctcttcacacggacatgcatgaaagctttccatatttgtgttccaaagaatcacattcagagactctcttattaccataagaaatagataagcgcatgtattttttttttctaaactctgatatagtcttcttttcaggccagtcataagtttgccttgtttaatggactcattcaaacatagtagttacatctacttagttttatgcatttttgtatttaaatatttttatatatgctatcaattttctttaaataagtaatgctttcatttaatttgcttactaaggttattttttaacaagattaaattaacaaaacgcttttatcttgtcaacatttctaacaaatttctttagttcacttaagtcaattttaacaattctaggggctaattttatttaaaatgattatttaacatgagtgtttaatttcagtgttaaatctacatgtaaagtgttgaattcacaggaaacaaaacatattccttggtgtcaaagatcatataatctagtatttaaggattcaagtattcaaatagataattattaaaagtaaaaatttatcgaagctttgaatgttgtgctatggagctaacaaatggaac

SEQ ID NO: 460363 - DNA, 1041 bp, Homo sapiens
gtcaccggcctctctggcaataggctgcgagctcagctccctgaagcggcggcgaaggcggcggcggcggcggcggcggcggcagcagcgcggctcggtctctggtccattcactccacgctttctgcagccgccactgcagccgcgcggcgggggctccctccttgcagccagccggcggtccagcctggtgcctctgcaaaggaaaggggagcgtggagacgtgttcgaggtggtatcggcgaggatctctcgggcgccgctcactccttggtcgccttgcttgccagcagttgctcccttagtccttggctcgctcgcacaccccctcccgctacagggagcagttttgggtggcgtgggctccgtcctcttcttggctggtaggaacggtgtgcccaagaggggaagcctagtgggcctggcccctcccagccccgcgccaatgagtgccagggcgccgaaggagctgaggctggcgttgccgccgtgtctcctcaaccggacctttgcttcccccaacgccagcggcagcggcaacacgggtgcccgcggcccaggcgcagtaggcagcggcacctgcatcacgcaggtgggacagcagctcttccagtccttctcctccacgctggtgctgattgtcctggttaccctcatcttctgcctcatcgtgctgtccctctccactttccacatccacaagcgtaggatgaagaagcggaagatgcagagggctcaggaggaatatgagcgggatcactgcagcggcagccgcggtggcggggggctgccccgacctggcaggcaggccccaacccacgcaaaggaaacccggctggagaggcagccccgggactctcccttctgcgccccttccaacgcctcgtcgttgtcctcttcgtcccctggcctcccgtgccagggtccctgtgctcctccgcctccaccgccagcctccagtccccaaggagcacacgcagcttcctcctgtttggacacagctggcgagggccttttgcaaacggtggtactgtcctgatc

SEQ ID NO: 460364 - DNA, 1077 bp, Homo sapiens
gggtgacacagaccacatgcgtcatggcagagccctcatcttgaattgtgactgggttcaagtgctcactattcacttgtcaaccaatgcttgttgaactcttggccggcgtggggtagggcacacccctgccttctgcctctcgggaagccattcattcattttcaagtacttgtggaacatccggtggtcattttaaggagtgggttagaggcatttagaccacaatctccatcagtcttgccgtccaaactcgccctcaaataaaaacacaatgtgcaaccttggcaggctcgggtctcctgccacctcctctgagaagccccaccacccatggtctggggcgtgtcccccgtcgctgggataccttgctcacccagctgagcctgccactcttctgttgaatctgttaagcaggaaacatccctccaccctccccagcccccctcctgcgtcccactcattccctaaccaccccgactggatgacgaagggcgcagagcagcgcgagggtttcgggccattcatctctgctctgcacgcggcgtccaaggggcccattttaccctccctcatctacaccagagagaaagacttacagtcagcagagctttgtgcaaacgtaggaaaaacctgcttgtcctgtgtgagcgtttcagagacctaccaaaaggtctttaattcagcaagttgctaacatgtctgtggctcagttttctcctctgcacagagtttttctggggctcgtgtgtctacaacaatagagtacgcgctccatgcttgttggctgttatttgtattagcatcattgtttttatggtgcaattacaggttcaattatttaagatacttatgcccacaccaaagtatattaaaagcaaataaaaggcctgatggctcatgtcgctcccatcctgggtgaaggtgttttctagattaagggaagacatttgcttggggtctgcaggctccttgcaaggggttaccagataaaatacagtgacaagcttacatttaaaaattgtaattatttatctgaaattcaaatttaaccagatgtcttatattttatttgct

SEQ ID NO: 460365 - DNA, 1754 bp, Homo sapiens
ctgcagctgtgtgtctttgagcaagctgcctaccctctctgtgccttatcaggagagggtgactctgtgccgactttacaaggctatgggaaggacacaatgaactaagacctaatcaccacgggatgatgtcagagcgtggggcttctgggaggtgatgagctgtcatgagtgggattggtgcccccagaaagccgccctgcccctcttcctgggagaagccaccatctatgaaccaggaaacgggccctcgtcccatgtgacaccaaatctgccagcatcttggtcttggacatccagcctccagaactgtgagcaataaagttctattgtttgtgagccacccagtccaaatagactaaaacaaggtggggacaggggtgatgggcataccgcagaccctggtggtgacagtgttacaaggagtagtgaaggtgtcacagggagtcacaactgacatcaggcctctctcaggaggcgccattagcagaggcctatatcagggaggctgaaggtctcaggaaagggtgttcccagaagaggttacagccaggccgggtgtggtggctcatgcctgtaatcctagcactttgggaggccgaggcaggtggatcacttgaggtcaggagttcaagaccagcctggctaacatggcaaaaccctgtctccactcaaaatacaaaaattaggcatggtggtatgcgcctgtagtcccagctactcaggaggcaggagaatcgcttgaacctgaaagaaaggtggccacagctctgcactccagcctgcgggagtgagactttgtctcaaaaaaaaaaaaaaaaaaaggttatagccagtgcaaaggtcctgaggcaggcccatgatcaggggccccaaagaacagcaaagaagaggctcatgaggctggatgcccccaaaccctatcccacccccatctctccagaccctaagctacgacccatgcccacgggacacaagcctccaccacgccactctgatgacaggaacacccttacagcagctcagtcatgaggcccccacaggccctgcaggcaccacatactccgcagcaaattgtttgttgagtgacttaatgaagaccacaaatcatcaaacaccagaaacagccacaggcagcagcccccagacagagcctgtggccaaaaccaaactcatattcagaataagccagtgtctggttatctgctcagcaaaagaactccccatcacgcaagccttcgacggcgaccacccctccatacttcgaaaaagcatcccctggccaaaatctgccgacaggccgcttcctggagcccgtctgctgagcagagctttgacggtgggaaagatcggtgaagaccccccagaatatgattcaccgcaggccacaggggccaggacggtcaacagaaactacatgtgtggggcccaggggggaggtgggggccagaactctgaggaccagatccagacccacagccgcagctacgcttcagcatccggctccagctggaagagacccccactcacttcctccccacacactgctgcttcctggccaggcacagatacgagtggagcagggtgggggcaggagaaagagacagcaccgtgagccagacacgtctggctatctgcacctcctcaatcccgggccccagggctccgtgacctgggcagcctcagtttcctcatctgaaaagccacttagatatcaaatggttctattgatgtatgccacacaatggaattcc

SEQ ID NO: 460366 - DNA, 631 bp, Homo sapiens
cttgggatgcttggtgggtaccccagtggcagtcagagaaaaagcatgagaacttttcctggttttccaaatcatccccaaaatgcagggcctccttcaccagagaggccccatttatggggaggggacaggctgaggccccgtggaagacactgagtcaggcacaactgtctcctaagtgcctgctacatacccagtgctggggacacagcggtgacaaagatgaacaaaatcctggatggaggggtgctggagtgtgaatgtttatgtccccccaaaatctgcatgttgagacctaatcaccacgggatgatgtcagagcgtggggcttctgggaggtgatgagctgtcatgagtgggattggtgcccccagaaagccgccctgcccctcttcctgggagaagccaccatctatgaaccaggaaacgggccctcgtcccatgtgacaccaaatctgccagcatcttggtcttggacatccagcctccagaactgtgagcaataaagttctattgtttgtgagccacccagtccaaatagactaaaacaaggtggggacaggggtgatgggcataccgcagaccctggtggtgacagtgttacaaggagtagtgaaggtgtcacagggag

SEQ ID NO: 460367 - DNA, 2709 bp, Homo sapiens
agctttacacatgcagctccatctgggtgaacacttctctgcaacatgcctaacattcctatttcctatggcctggatttcaaggattctcaaccagaggcagttcatttagccagttttgagtgggtgaccgtccccccttccctgttcattgtgaatttccgcccaacgtgtgtcgccgccaggtccctgttcctcctacccgcctcggctcacggggcgcaggctgtggctctgcacctgcccgggcacctccaccggcggctcacagcccattcgggacttcctgtcggacaacgcacaccagaggcgattcggtcctcgccttcccgctcttcaccttcggttgcacaccggtctacggcgacctctgtgacaatttgccgccccgtccctcgtcctgagcctcaacgaaattgggcagccgcgagcggaggccagggccgcctggcgtgcttggtgcgaacgcggcgggcccagcgcgagagctggggaatcccgggatgagccaagcgccgcgagcccgctgctgcctcagcagttccgggtctgggcggtccgcggataagagaaatggtgcttcctggggaactggttatgatggaaggagaggtcccttttatcttcattgttgctcatttgttaatctcacatacttttgttgggtctttccaaaatattaaacatagatttttaaagaaacaacaatttccacactatttcattggtttatacaatattaagttacgaaagcacaatatcaagcacaactggcaaaaacaggtttgcaaacaaacacaaagggggaggaaataaaagaccttgccccttgcctctctgaatgagacaagcaggtaggttataactggatttcaccaaaggtctatataacttctgtcccagaggtagaaatcttttcgaaacagttgcctggacatcctttaaagcttggatttgagctgcagaccaaccccttaatgtctacactccaaaacaagagatgttttggtagtccagtactgtctatacattcagcaaagcccctcctttggtagaaacctagaagcagtgtggataatgtatgaatgttgcctattattatcttggataaggaggtaaggaacagtacaaaccctctgttttctttctttttcagtgccctgaaactctaatctcattgcctggccagaaaaggaagtaatccctagtgtcagcagattcagcggtactggtgtataatagaatgaacttcatgagcttgaaaaagaaatagcagctatctctgcagaaactaaagaaacagaaagacaaatttatcaacaagattctgccatagagaataccaaacttcattgtgatagcctggaaactcaaatcaaatccttacattcagaaaatgtaaagcttaaatttgacatagaaacagcccaagaagattttgaggaacacatgataaaatataatgcatattatgcaaaaataaaagcacataaaaatagtttgggggaagtagagagcaaatggtcatttatgactgaactccatgaaaagcgagattttgttaaaaaattaaagacaatgaaagaagaacttatgcaagatcttcaaaatccaggagggaaccgaataacacaagtacaggtgtgcaaaattacttagtaaaactattttttctattactccttttttgcaagtacatacattaaatgataaatttattgtgaagttaataaaatgcccatagctgttctattaccttcagaaactattttcataattgaaaaaaacttggaataagtacatgtgttatataacaacgaccctagatgctcaaatgcataaaggaaacatccacaaatcccctgtagatttataaaactatatggtcaaataaaatcacagtgaacaattaatccatttgttgtagaaaatgtaattcacaaaaatgttaaagacttagcttctatgccaatggatccagaccaattcaaatcaatttagtacacttaatggtgttatgcaagcaatataaattaataactgaaccttaagcatcttactatttctcttactgttctttgaagacgatagaagacacaaacttaaaatattgatcatttcttgctagagaattaaaaagtgtcttttacactgttgttcggcagttgccaccataactaccactttcctttttgtcttattttcatttggtttttagttctgtgtcaaatgtaaggtttctttgagtaacagttctttatttttgtatacgtatagaagtaatattctaatgctatttatcaaaactaaattttgatttggctagttttcttaaattatagaaacactgaaaaattggatttatattgatcatccttttttgacttctatatttcaaatgttgtcaacatacaggaagacattacaaacttaaaggataaaattataactgtaaaagaatctatcattgaaaaaacttgttttcttgaggaagaaaaaaagacacatgaaaaattaagaaaagaaatagagtaattcaaaagtcatttgacactttaaaatcaaagcaataatggattttgggttttatagcatgtagagtaagatatatatcaagaatagccttttgttgtaaggttcttatatttttacatgtactgatatgttaattgaagacagattgtgataagttaagagaatatattaaaa

SEQ ID NO: 460368 - DNA, 3208 bp, Homo sapiens
tcattctgaattcctcttagttcttgagctgtgattacgtttatttcaatggactgtttaaaaagccctcccctaaaagtcacttgcaaatcttcaaattcaaaattgtaaacatcagtgaagagttgatcaataaaagctttcattaatgtcttcctgtgcctgggtacaattaccttaatgctgctcagatttttttcatcaattttctgtttaatggtatacaaagtggcagccatgctgggacagctaacaatctcaaattcttccaagagagctgataatccattgcttgtttctatttcacaattatcttgttctccatccctttcatagctgatgttactgcaacacattatacagagaaacttggccttggcagcatggtggtattggacagcattcaaagtcttcagtaatgtctgatggcagtttttttgagagttcaatttcaaaccaaaaagatcaatcaaaacagcttctgccatccttgaaagaatacttttatgccaaataaatcacctcacctacctcgccgcggccgcacagattccccgcctgataccgtcccaggatcccaggggaaacctgacggccaggttccctcgtgccagctgccgggaggcgggagggagaggccagggccgcctggcgtgcttggtgcgaacgcggcgggcccagcgcgagagctggggaatcccgggatgagccaagcgccgcgagcccgctgctgcctcagcagttccgggtctgggcggtccgcggataagagaaatggtgcttcctggggaactggttatgatggaaggagaggtcccttttatcttcattgttgctcatttgttaatctcacatacttttgttgggtctttccaaaatattaaacatagatttttaaagaaacaacaatttccacactatttcattggtttatacaatattaagttacgaaagcacaatatcaagcacaactggcaaaaacaggtttgcaaacaaacacaaagggggaggaaataaaagaccttgccccttgcctctctgaatgagacaagcaggtaggttataactggatttcaccaaaggtctatataacttctgtcccagaggtagaaatcttttcgaaacagttgcctggacatcctttaaagcttggatttgagctgcagaccaaccccttaatgtctacactccaaaacaagagatgttttggtagtccagtactgtctatacattcagcaaagcccctcctttggtagaaacctagaagcagtgtggataatgtatgaatgttgcctattattatcttggataaggaggtaaggaacagtacaaaccctctgttttctttctttttcagtgccctgaaactctaatctcattgcctggccagaaaaggaagtaatccctagtgtcagcagattcagcggtactggtgtataatagaatgaacttcatgagcttgaaaaagaaatagcagctatctctgcagaaactaaagaaacagaaagacaaatttatcaacaagattctgccatagagaataccaaacttcattgtgatagcctggaaactcaaatcaaatccttacattcagaaaatgtaaagcttaaatttgacatagaaacagcccaagaagattttgaggaacacatgataaaatataatgcatattatgcaaaaataaaagcacataaaaatagtttgggggaagtagagagcaaatggtcatttatgactgaactccatgaaaagcgagattttgttaaaaaattaaagacaatgaaagaagaacttatgcaagatcttcaaaatccaggagggaaccgaataacacaagtacaggtgtgcaaaattacttagtaaaactattttttctattactccttttttgcaagtacatacattaaatgataaatttattgtgaagttaataaaatgcccatagctgttctattaccttcagaaactattttcataattgaaaaaaacttggaataagtacatgtgttatataacaacgaccctagatgctcaaatgcataaaggaaacatccacaaatcccctgtagatttataaaactatatggtcaaataaaatcacagtgaacaattaatccatttgttgtagaaaatgtaattcacaaaaatgttaaagacttagcttctatgccaatggatccagaccaattcaaatcaatttagtacacttaatggtgttatgcaagcaatataaattaataactgaaccttaagcatcttactatttctcttactgttctttgaagacgatagaagacacaaacttaaaatattgatcatttcttgctagagaattaaaaagtgtcttttacactgttgttcggcagttgccaccataactaccactttcctttttgtcttattttcatttggtttttagttctgtgtcaaatgtaaggtttctttgagtaacagttctttatttttgtatacgtatagaagtaatattctaatgctatttatcaaaactaaattttgatttggctagttttcttaaattatagaaacactgaaaaattggatttatattgatcatccttttttgacttctatatttcaaatgttgtcaacatacaggaagacattacaaacttaaaggataaaattataactgtaaaagaatctatcattgaaaaaacttgttttcttgaggaagaaaaaaagacacatgaaaaattaagaaaagaaatagaggtacaacataagaggtatgatgcaattcttaagcgtttgcattgtcaggtgaacaagcttcagtcaaatagacgacagtggcaatggaacattcaacaattggaaaaaactgcagccgaattaagaaaatgcattggaatgcaagagtaacattgccatagggcaatgtggaacacagaccatgacaacaaaaattactggacagaacattaagaaaatcttttggattcttaataacaagcatccactattagagacctgtcttaatgacagatgtcttcggttgttgttttttttaaatcagtcatcgatttgttaaaatgccttctaaccctacacttgatagcagtagacagacaataggaatgtctacgggaaaataatgcaagagtctctgtgactatttggagtgtgtaaaatgtattatactcatgaatacctgtttatgttgcattcactaccctatgaagtaaaa

SEQ ID NO: 460369 - DNA, 2434 bp, Homo sapiens
tcattctgaattcctcttagttcttgagctgtgattacgtttatttcaatggactgtttaaaaagccctcccctaaaagtcacttgcaaatcttcaaattcaaaattgtaaacatcagtgaagagttgatcaataaaagctttcattaatgtcttcctgtgcctgggtacaattaccttaatgctgctcagatttttttcatcaattttctgtttaatggtatacaaagtggcagccatgctgggacagctaacaatctcaaattcttccaagagagctgataatccattgcttgtttctatttcacaattatcttgttctccatccctttcatagctgatgttactgcaacacattatacagagaaacttggccttggcagcatggtggtattggacagcattcaaagtcttcagtaatgtctgatggcagtttttttgagagttcaatttcaaaccaaaaagatcaatcaaaacagcttctgccatccttgaaagaatacttttatgccaaataaatcacctcacctacctcgccgcggccgcacagattccccgcctgataccgtcccaggatcccaggggaaacctgacggccaggttccctcgtgccagctgccgggaggcgggagggagaggccagggccgcctggcgtgcttggtgcgaacgcggcgggcccagcgcgagagctggggaatcccgggatgagccaagcgccgcgagcccgctgctgcctcagcagttccgggtctgggcggtccgcggataagagaaatggtgcttcctggggaactggttatgatggaaggagaggtcccttttatcttcattgttgctcatttgttaatctcacatacttttgttgggtctttccaaaatattaaacatagatttttaaagaaacaacaatttccacactatttcattggtttatacaatattaagttacgaaagcacaatatcaagcacaactggcaaaaacaggtttgcaaacaaacacaaagggggaggaaataaaagaccttgccccttgcctctctgaatgagacaagcaggtaggttataactggatttcaccaaaggtctatataacttctgtcccagaggtagaaatcttttcgaaacagttgcctggacatcctttaaagcttggatttgagctgcagaccaaccccttaatgtctacactccaaaacaagagatgttttggtagtccagtactgtctatacattcagcaaagcccctcctttggtagaaacctagaagcagtgtggataatgtatgaatgttgcctattattatcttggataaggaggtaaggaacagtacaaaccctctgttttctttctttttcagtgccctgaaactctaatctcattgcctggccagaaaaggaagtaatccctagtgtcagcagattcagcggtactggtgtataatagaatgaacttcatgagcttgaaaaagaaatagcagctatctctgcagaaactaaagaaacagaaagacaaatttatcaacaagattctgccatagagaataccaaacttcattgtgatagcctggaaactcaaatcaaatccttacattcagaaaatgtaaagcttaaatttgacatagaaacagcccaagaagattttgaggaacacatgataaaatataatgcatattatgcaaaaataaaagcacataaaaatagtttgggggaagtagagagcaaatggtcatttatgactgaactccatgaaaagcgagattttgttaaaaaattaaagacaatgaaagaagaacttatgcaagatcttcaaaatccaggagggaaccgaataacacaagtacaggaagacattacaaacttaaaggataaaattataactgtaaaagaatctatcattgaaaaaacttgttttcttgaggaagaaaaaaagacacatgaaaaattaagaaaagaaatagaggtacaacataagaggtatgatgcaattcttaagcgtttgcattgtcaggtgaacaagcttcagtcaaatagacgacagtggcaatggaacattcaacaattggaaaaaactgcagccgaattaagaaaatgcattggaatgcaagagtaacattgccatagggcaatgtggaacacagaccatgacaacaaaaattactggacagaacattaagaaaatcttttggattcttaataacaagcatccactattagagacctgtcttaatgacagatgtcttcggttgttgttttttttaaatcagtcatcgatttgttaaaatgccttctaaccctacacttgatagcagtagacagacaataggaatgtctacgggaaaataatgcaagagtctctgtgactatttggagtgtgtaaaatgtattatactcatgaatacctgtttatgttgcattcactaccctatgaagtaaaa

SEQ ID NO: 460370 - DNA, 2645 bp, Homo sapiens
tcattctgaattcctcttagttcttgagctgtgattacgtttatttcaatggactgtttaaaaagccctcccctaaaagtcacttgcaaatcttcaaattcaaaattgtaaacatcagtgaagagttgatcaataaaagctttcattaatgtcttcctgtgcctgggtacaattaccttaatgctgctcagatttttttcatcaattttctgtttaatggtatacaaagtggcagccatgctgggacagctaacaatctcaaattcttccaagagagctgataatccattgcttgtttctatttcacaattatcttgttctccatccctttcatagctgatgttactgcaacacattatacagagaaacttggccttggcagcatggtggtattggacagcattcaaagtcttcagtaatgtctgatggcagtttttttgagagttcaatttcaaaccaaaaagatcaatcaaaacagcttctgccatccttgaaagaatacttttatgccaaataaatcacctcacctacctcgccgcggccgcacagattccccgcctgataccgtcccaggatcccaggggaaacctgacggccaggttccctcgtgccagctgccgggaggcgggagggagtgccctgaaactctaatctcattgcctggccagaaaaggaagtaatccctagtgtcagcagattcagcggtactggtgtataataggatcaccaatatacaacaggaaaaaacaaaagtgaaagattatcaatatagattattgagtaggagtaaagaaggtaaatcaaaaaggggaaaagagattacagacacagaaaatgtcagacaacaaagaaaggaagagtcaaggatttcctaaagaagaatgaacttcatgagcttgaaaaagaaatagcagctatctctgcagaaactaaagaaacagaaagacaaatttatcaacaagattctgccatagagaataccaaacttcattgtgatagcctggaaactcaaatcaaatccttacattcagaaaatgtaaagcttaaatttgacatagaaacagcccaagaagattttgaggaacacatgataaaatataatgcatattatgcaaaaataaaagcacataaaaatagtttgggggaagtagagagcaaatggtcatttatgactgaactccatgaaaagcgagattttgttaaaaaattaaagacaatgaaagaagaacttatgcaagatcttcaaaatccaggagggaaccgaataacacaagtacaggtgtgcaaaattacttagtaaaactattttttctattactccttttttgcaagtacatacattaaatgataaatttattgtgaagttaataaaatgcccatagctgttctattaccttcagaaactattttcataattgaaaaaaacttggaataagtacatgtgttatataacaacgaccctagatgctcaaatgcataaaggaaacatccacaaatcccctgtagatttataaaactatatggtcaaataaaatcacagtgaacaattaatccatttgttgtagaaaatgtaattcacaaaaatgttaaagacttagcttctatgccaatggatccagaccaattcaaatcaatttagtacacttaatggtgttatgcaagcaatataaattaataactgaaccttaagcatcttactatttctcttactgttctttgaagacgatagaagacacaaacttaaaatattgatcatttcttgctagagaattaaaaagtgtcttttacactgttgttcggcagttgccaccataactaccactttcctttttgtcttattttcatttggtttttagttctgtgtcaaatgtaaggtttctttgagtaacagttctttatttttgtatacgtatagaagtaatattctaatgctatttatcaaaactaaattttgatttggctagttttcttaaattatagaaacactgaaaaattggatttatattgatcatccttttttgacttctatatttcaaatgttgtcaacatacaggaagacattacaaacttaaaggataaaattataactgtaaaagaatctatcattgaaaaaacttgttttcttgaggaagaaaaaaagacacatgaaaaattaagaaaagaaatagaggtacaacataagaggtatgatgcaattcttaagcgtttgcattgtcaggtgaacaagcttcagtcaaatagacgacagtggcaatggaacattcaacaattggaaaaaactgcagccgaattaagaaaatgcattggaatgcaagagtaacattgccatagggcaatgtggaacacagaccatgacaacaaaaattactggacagaacattaagaaaatcttttggattcttaataacaagcatccactattagagacctgtcttaatgacagatgtcttcggttgttgttttttttaaatcagtcatcgatttgttaaaatgccttctaaccctacacttgatagcagtagacagacaataggaatgtctacgggaaaataatgcaagagtctctgtgactatttggagtgtgtaaaatgtattatactcatgaatacctgtttatgttgcattcactaccctatgaagtaaaa

SEQ ID NO: 460371 - DNA, 2350 bp, Homo sapiens
aagtagtctggcaggataattgtgttaaaattgatagcaaattagaatagatggaagcagttacatttagctgggacaaacatatacagtgtttagcaaaggcatatcaacctgaaaatacagacctacaatgaaaatgcatcaactctaattgctatagagttgttatggtagcactataattatagtatatgtgcaagtggtctggataaaaaaaattaggacaatcaaaatatttatactgttccgtagaggaacgggtatgacattgcagtaggcaactttgaattgcctattattgttgcctttacttttggttttgtttatatcagcaagggaaaattactaattctaaatttagtttagaaggaaaaaatatcaaatatttcatgattttgagtaaagaaacataactttcttaaaatggctgtattttaatttttattatatactttattcttttgtctaattgtagataaccaagacacaagttcattagctgatgctgtagagaaagttgcaaagcaacaacaatcacaagcatcagagatagaaaaaaacaaaaaggttctgttcaatttgaagaatgaacttcatgagcttgaaaaagaaatagcagctatctctgcagaaactaaagaaacagaaagacaaatttatcaacaagattctgccatagagaataccaaacttcattgtgatagcctggaaactcaaatcaaatccttacattcagaaaatgtaaagcttaaatttgacatagaaacagcccaagaagattttgaggaacacatgataaaatataatgcatattatgcaaaaataaaagcacataaaaatagtttgggggaagtagagagcaaatggtcatttatgactgaactccatgaaaagcgagattttgttaaaaaattaaagacaatgaaagaagaacttatgcaagatcttcaaaatccaggagggaaccgaataacacaagtacaggtgtgcaaaattacttagtaaaactattttttctattactccttttttgcaagtacatacattaaatgataaatttattgtgaagttaataaaatgcccatagctgttctattaccttcagaaactattttcataattgaaaaaaacttggaataagtacatgtgttatataacaacgaccctagatgctcaaatgcataaaggaaacatccacaaatcccctgtagatttataaaactatatggtcaaataaaatcacagtgaacaattaatccatttgttgtagaaaatgtaattcacaaaaatgttaaagacttagcttctatgccaatggatccagaccaattcaaatcaatttagtacacttaatggtgttatgcaagcaatataaattaataactgaaccttaagcatcttactatttctcttactgttctttgaagacgatagaagacacaaacttaaaatattgatcatttcttgctagagaattaaaaagtgtcttttacactgttgttcggcagttgccaccataactaccactttcctttttgtcttattttcatttggtttttagttctgtgtcaaatgtaaggtttctttgagtaacagttctttatttttgtatacgtatagaagtaatattctaatgctatttatcaaaactaaattttgatttggctagttttcttaaattatagaaacactgaaaaattggatttatattgatcatccttttttgacttctatatttcaaatgttgtcaacatacaggaagacattacaaacttaaaggataaaattataactgtaaaagaatctatcattgaaaaaacttgttttcttgaggaagaaaaaaagacacatgaaaaattaagaaaagaaatagaggtacaacataagaggtatgatgcaattcttaagcgtttgcattgtcaggtgaacaagcttcagtcaaatagacgacagtggcaatggaacattcaacaattggaaaaaactgcagccgaattaagaaaatgcattggaatgcaagagtaacattgccatagggcaatgtggaacacagaccatgacaacaaaaattactggacagaacattaagaaaatcttttggattcttaataacaagcatccactattagagacctgtcttaatgacagatgtcttcggttgttgttttttttaaatcagtcatcgatttgttaaaatgccttctaaccctacacttgatagcagtagacagacaataggaatgtctacgggaaaataatgcaagagtctctgtgactatttggagtgtgtaaaatgtattatactcatgaatacctgtttatgttgcattcactaccctatgaagtaaaa

SEQ ID NO: 460372 - DNA, 888 bp, Homo sapiens
tcattctgaattcctcttagttcttgagctgtgattacgtttatttcaatggactgtttaaaaagccctcccctaaaagtcacttgcaaatcttcaaattcaaaattgtaaacatcagtgaagagttgatcaataaaagctttcattaatgtcttcctgtgcctgggtacaattaccttaatgctgctcagatttttttcatcaattttctgtttaatggtatacaaagtggcagccatgctgggacagctaacaatctcaaattcttccaagagagctgataatccattgcttgtttctatttcacaattatcttgttctccatccctttcatagctgatgttactgcaacacattatacagagaaacttggccttggcagcatggtggtattggacagcattcaaagtcttcagtaatgtctgatggcagtttttttgagagttcaatttcaaaccaaaaagatcaatcaaaacagcttctgccatccttgaaagaatacttttatgccaaataaatcacctcacctacctcgccgcggccgcacagattccccgcctgataccgtcccaggatcccaggggaaacctgacggccaggttccctcgtgccagctgccgggaggcgggagggagaggccagggccgcctggcgtgcttggtgcgaacgcggcgggcccagcgcgagagctggggaatcccgggatgagccaagcgccgcgagcccgctgctgcctcagcagttccgggtctgggcggtccgcggagtcggcatcccgcagccccggcggcgttagaggaacaggaaccagagccgcgcgagggctctcgcccgggagccaggcgggttagcgggcaggactgcaggtctccagagggcacggggcgg

SEQ ID NO: 460373 - DNA, 804 bp, Homo sapiens
tcattctgaattcctcttagttcttgagctgtgattacgtttatttcaatggactgtttaaaaagccctcccctaaaagtcacttgcaaatcttcaaattcaaaattgtaaacatcagtgaagagttgatcaataaaagctttcattaatgtcttcctgtgcctgggtacaattaccttaatgctgctcagatttttttcatcaattttctgtttaatggtatacaaagtggcagccatgctgggacagctaacaatctcaaattcttccaagagagctgataatccattgcttgtttctatttcacaattatcttgttctccatccctttcatagctgatgttactgcaacacattatacagagaaacttggccttggcagcatggtggtattggacagcattcaaagtcttcagtaatgtctgatggcagtttttttgagagttcaatttcaaaccaaaaagatcaatcaaaacagcttctgccatccttgaaagaatacttttatgccaaataaatcacctcacctacctcgccgcggccgcacagattccccgcctgataccgtcccaggatcccaggggaaacctgacggccaggttccctcgtgccagctgccgggaggcgggagggagtgccctgaaactctaatctcattgcctggccagaaaaggaagtaatccctagtgtcagcagattcagcggtactggtgtataataggtatacagtttatttttaattattcaattaattctttttggatgtctctgatgatgttctaacttctcttaaaaacatgtttg

SEQ ID NO: 460374 - DNA, 207 bp, Homo sapiens
gcccgctgctgcctcagcagttccgggtctgggcggtccgcggagtcggcatcccgcagccccggcggcgttagaggaacaggaaccagagccgcgcgagggctctcgcccgggagccaggcgggttagcgggcaggagtgggcaggccgagtccggaaagggtcgcgaggaggcagctaggggccccttgaggagggatagggcgg

SEQ ID NO: 460375 - DNA, 1132 bp, Homo sapiens
ctccacacaactacagtcgcgcctaattcccgctagccgacccacgacgcgtctgtgccctgaaactctaatctcattgcctggccagaaaaggaagtaatccctagtgtcagcagattcagcggtactggtgtataatagaatgaacttcatgagcttgaaaaagaaatagcagctatctctgcagaaactaaagaaacagaaagacaaatttatcaacaagattctgccatagagaataccaaacttcattgtgatagcctggaaactcaaatcaaatccttacattcagaaaatgtaaagcttaaatttgacatagaaacagcccaagaagattttgaggaacacatgataaaatataatgcatattatgcaaaaataaaagcacataaaaatagtttgggggaagtagagagcaaatggtcatttatgactgaactccatgaaaagcgagattttgttaaaaaattaaagacaatgaaagaagaacttatgcaagatcttcaaaatccaggagggaaccgaataacacaagtacaggaagacattacaaacttaaaggataaaattataactgtaaaagaatctatcattgaaaaaacttgttttcttgaggaagaaaaaaagacacatgaaaaattaagaaaagaaatagaggtacaacataagaggtatgatgcaattcttaagcgtttgcattgtcaggtgaacaagcttcagtcaaatagacgacagtggcaatggaacattcaacaattggaaaaaactgcagccgaattaagaaaatgcattggaatgcaagagtaacattgccatagggcaatgtggaacacagaccatgacaacaaaaattactggacagaacattaagaaaatcttttggattcttaataacaagcatccactattagagacctgtcttaatgacagatgtcttcggttgttgttttttttaaatcagtcatcgatttgttaaaatgccttctaaccctacacttgatagcagtagacagacaataggaatgtctacgggaaaataatgcaagagtctctgtgactatttggagtgtgtaaaatgtattatactcatgaatacctgtttatgttgcattcactaccctatgaagtaaaa

SEQ ID NO: 460376 - DNA, 3327 bp, Homo sapiens
tcattctgaattcctcttagttcttgagctgtgattacgtttatttcaatggactgtttaaaaagccctcccctaaaagtcacttgcaaatcttcaaattcaaaattgtaaacatcagtgaagagttgatcaataaaagctttcattaatgtcttcctgtgcctgggtacaattaccttaatgctgctcagatttttttcatcaattttctgtttaatggtatacaaagtggcagccatgctgggacagctaacaatctcaaattcttccaagagagctgataatccattgcttgtttctatttcacaattatcttgttctccatccctttcatagctgatgttactgcaacacattatacagagaaacttggccttggcagcatggtggtattggacagcattcaaagtcttcagtaatgtctgatggcagtttttttgagagttcaatttcaaaccaaaaagatcaatcaaaacagcttctgccatccttgaaagaatacttttatgccaaataaatcacccgcctcggctcacggggcgcaggctgtggctctgcacctgcccgggcacctccaccggcggctcacagcccattcgggacttcctgtcggacaacgcacaccagaggcgattcggtcctcgccttcccgctcttcaccttcggttgcacaccggtctacggcgacctctgtgacaatttgccgccccgtccctcgtcctgagcctcaacgaaattgggcagccgcgagcggaggccagggccgcctggcgtgcttggtgcgaacgcggcgggcccagcgcgagagctggggaatcccgggatgagccaagcgccgcgagcccgctgctgcctcagcagttccgggtctgggcggtccgcggataagagaaatggtgcttcctggggaactggttatgatggaaggagaggtcccttttatcttcattgttgctcatttgttaatctcacatacttttgttgggtctttccaaaatattaaacatagatttttaaagaaacaacaatttccacactatttcattggtttatacaatattaagttacgaaagcacaatatcaagcacaactggcaaaaacaggtttgcaaacaaacacaaagggggaggaaataaaagaccttgccccttgcctctctgaatgagacaagcaggtaggttataactggatttcaccaaaggtctatataacttctgtcccagaggtagaaatcttttcgaaacagttgcctggacatcctttaaagcttggatttgagctgcagaccaaccccttaatgtctacactccaaaacaagagatgttttggtagtccagtactgtctatacattcagcaaagcccctcctttggtagaaacctagaagcagtgtggataatgtatgaatgttgcctattattatcttggataaggaggtaaggaacagtacaaaccctctgttttctttctttttcagtgccctgaaactctaatctcattgcctggccagaaaaggaagtaatccctagtgtcagcagattcagcggtactggtgtataatagaatgaacttcatgagcttgaaaaagaaatagcagctatctctgcagaaactaaagaaacagaaagacaaatttatcaacaagattctgccatagagaataccaaacttcattgtgatagcctggaaactcaaatcaaatccttacattcagaaaatgtaaagcttaaatttgacatagaaacagcccaagaagattttgaggaacacatgataaaatataatgcatattatgcaaaaataaaagcacataaaaatagtttgggggaagtagagagcaaatggtcatttatgactgaactccatgaaaagcgagattttgttaaaaaattaaagacaatgaaagaagaacttatgcaagatcttcaaaatccaggagggaaccgaataacacaagtacaggtgtgcaaaattacttagtaaaactattttttctattactccttttttgcaagtacatacattaaatgataaatttattgtgaagttaataaaatgcccatagctgttctattaccttcagaaactattttcataattgaaaaaaacttggaataagtacatgtgttatataacaacgaccctagatgctcaaatgcataaaggaaacatccacaaatcccctgtagatttataaaactatatggtcaaataaaatcacagtgaacaattaatccatttgttgtagaaaatgtaattcacaaaaatgttaaagacttagcttctatgccaatggatccagaccaattcaaatcaatttagtacacttaatggtgttatgcaagcaatataaattaataactgaaccttaagcatcttactatttctcttactgttctttgaagacgatagaagacacaaacttaaaatattgatcatttcttgctagagaattaaaaagtgtcttttacactgttgttcggcagttgccaccataactaccactttcctttttgtcttattttcatttggtttttagttctgtgtcaaatgtaaggtttctttgagtaacagttctttatttttgtatacgtatagaagtaatattctaatgctatttatcaaaactaaattttgatttggctagttttcttaaattatagaaacactgaaaaattggatttatattgatcatccttttttgacttctatatttcaaatgttgtcaacatacaggaagacattacaaacttaaaggataaaattataactgtaaaagaatctatcattgaaaaaacttgttttcttgaggaagaaaaaaagacacatgaaaaattaagaaaagaaatagaggtacaacataagaggtatgatgcaattcttaagcgtttgcattgtcaggtgaacaagcttcagtcaaatagacgacagtggcaatggaacattcaacaattggaaaaaactgcagccgaattaagaaaatgcattggaatgcaagagtaacattgccatagggcaatgtggaacacagaccatgacaacaaaaattactggacagaacattaagaaaatcttttggattcttaataacaagcatccactattagagacctgtcttaatgacagatgtcttcggttgttgttttttttaaatcagtcatcgatttgttaaaatgccttctaaccctacacttgatagcagtagacagacaataggaatgtctacgggaaaataatgcaagagtctctgtgactatttggagtgtgtaaaatgtattatactcatgaatacctgtttatgttgcattcactaccctatgaagtaaaa

SEQ ID NO: 460377 - DNA, 2755 bp, Homo sapiens
tcattctgaattcctcttagttcttgagctgtgattacgtttatttcaatggactgtttaaaaagccctcccctaaaagtcacttgcaaatcttcaaattcaaaattgtaaacatcagtgaagagttgatcaataaaagctttcattaatgtcttcctgtgcctgggtacaattaccttaatgctgctcagatttttttcatcaattttctgtttaatggtatacaaagtggcagccatgctgggacagctaacaatctcaaattcttccaagagagctgataatccattgcttgtttctatttcacaattatcttgttctccatccctttcatagctgatgttactgcaacacattatacagagaaacttggccttggcagcatggtggtattggacagcattcaaagtcttcagtaatgtctgatggcagtttttttgagagttcaatttcaaaccaaaaagatcaatcaaaacagcttctgccatccttgaaagaatacttttatgccaaataaatcacctcacctacctcgccgcggccgcacagattccccgcctgataccgtcccaggatcccaggggaaacctgacggccaggttccctcgtgccagctgccgggaggcgggagggagtgccctgaaactctaatctcattgcctggccagaaaaggaagtaatccctagtgtcagcagattcagcggtactggtgtataataggatcaccaatatacaacaggaaaaaacaaaagtgaaagattatcaatatagattattgagtaggagtaaagaaggtaaatcaaaaaggggaaaagagattacagacacagaaaatgtcagacaacaaagaaaggaagagtcaaggatttcctaaagaagataaccaagacacaagttcattagctgatgctgtagagaaagttgcaaagcaacaacaatcacaagcatcagagatagaaaaaaacaaaaaggttctgttcaatttgaagaatgaacttcatgagcttgaaaaagaaatagcagctatctctgcagaaactaaagaaacagaaagacaaatttatcaacaagattctgccatagagaataccaaacttcattgtgatagcctggaaactcaaatcaaatccttacattcagaaaatgtaaagcttaaatttgacatagaaacagcccaagaagattttgaggaacacatgataaaatataatgcatattatgcaaaaataaaagcacataaaaatagtttgggggaagtagagagcaaatggtcatttatgactgaactccatgaaaagcgagattttgttaaaaaattaaagacaatgaaagaagaacttatgcaagatcttcaaaatccaggagggaaccgaataacacaagtacaggtgtgcaaaattacttagtaaaactattttttctattactccttttttgcaagtacatacattaaatgataaatttattgtgaagttaataaaatgcccatagctgttctattaccttcagaaactattttcataattgaaaaaaacttggaataagtacatgtgttatataacaacgaccctagatgctcaaatgcataaaggaaacatccacaaatcccctgtagatttataaaactatatggtcaaataaaatcacagtgaacaattaatccatttgttgtagaaaatgtaattcacaaaaatgttaaagacttagcttctatgccaatggatccagaccaattcaaatcaatttagtacacttaatggtgttatgcaagcaatataaattaataactgaaccttaagcatcttactatttctcttactgttctttgaagacgatagaagacacaaacttaaaatattgatcatttcttgctagagaattaaaaagtgtcttttacactgttgttcggcagttgccaccataactaccactttcctttttgtcttattttcatttggtttttagttctgtgtcaaatgtaaggtttctttgagtaacagttctttatttttgtatacgtatagaagtaatattctaatgctatttatcaaaactaaattttgatttggctagttttcttaaattatagaaacactgaaaaattggatttatattgatcatccttttttgacttctatatttcaaatgttgtcaacatacaggaagacattacaaacttaaaggataaaattataactgtaaaagaatctatcattgaaaaaacttgttttcttgaggaagaaaaaaagacacatgaaaaattaagaaaagaaatagaggtacaacataagaggtatgatgcaattcttaagcgtttgcattgtcaggtgaacaagcttcagtcaaatagacgacagtggcaatggaacattcaacaattggaaaaaactgcagccgaattaagaaaatgcattggaatgcaagagtaacattgccatagggcaatgtggaacacagaccatgacaacaaaaattactggacagaacattaagaaaatcttttggattcttaataacaagcatccactattagagacctgtcttaatgacagatgtcttcggttgttgttttttttaaatcagtcatcgatttgttaaaatgccttctaaccctacacttgatagcagtagacagacaataggaatgtctacgggaaaataatgcaagagtctctgtgactatttggagtgtgtaaaatgtattatactcatgaatacctgtttatgttgcattcactaccctatgaagtaaaa

SEQ ID NO: 460378 - DNA, 696 bp, Homo sapiens
caagcccctataaaagccaagagaataaacacaatgtttgtagtagaaagtcagtcccaagaatcaaaatacaatcactacacaatctcttgcaatgcttacaaactgcaccttttgatcaactgttgctaggttttttgttgactttatgcggaaagtggttaaatgtaaggttgtaaacatgtcgtctaaatctgtaaagataattcccaagctatgcttttattaaaaaaaaaatcctcaaaacaaaaatgtaaacaaaaaatagtgaaggtcatagcccaaggcatacccatctgtatcatcatagataacgtgtccaggagagacagcacaaggggctccatcttcatcacacaactcatcgcatgcttccagagatattcctggcgctgccacctagaggaagtattttggaaggttcagcaagcatttgaaagtccggaggcaacagtccaaatgcccaccatagaacgagtgtccatgacaagatatttctacctctttcctggcaactgaaaatggttaagcattgagagttgttggtggtgtatgaaataaatgaaagtgtgatattggaggaaaccacaagcagcccagccctcctttatcaacttcaagaaacacctttactagtacagattgaatgcttaacattttgtatttcaataaaggtgaagacaaatgaactgtgtc

SEQ ID NO: 460379 - DNA, 2567 bp, Homo sapiens
tcagtctgagccttttttcagtgctgtaagaaaggacggaggctgttatctatggcagatctatccaataaaggagagaaaggaccgcatacgcctggttctcatcatatgcaataaagagtttgaccatctgcctccaagaaatggggctgactttgccatcatggagatgaagaagctgcttgaggatctgggttacagtgtggatgtagaagagaatctgacagccaggcaaaccatggggaacagtgggtcagagactgtccagcatctttgggagtcatgtcttcacagtcacctaagaacctggaggatgcagtttgcaagacataccagagaaggacttcattgttttctgctcttcaacctcatgtatacgtcttttggtggtattaagtgatttgtgggcctgaggctacctttgaatgattctaccaaatcaagaatccctaagaaacaatgatccgagggaatgttgtgtgctctcccatattttacatgatcttagatgtgatgtgaaaacagattccttccccctcccacacccacgtttttaaaaattgtacttttcttataagtgttacaatttaaagccaaaggcataccaaatattaaagcaacacaacataaggaatcccattcaccacacaccatttaaacacaaatgatggattctgttatttatcaaacccatttaatgttttgtgtagtgttttcatggattccaggaatggcttccctttctcaaatgatcaatttcaagtcttattctccatatttcccatctgattccactatgagcagtgccattgcatgccctactagaactgtggataccctttaaaacaagtagaagatgatagggtgggactcattacgtctaatcttggggaacactgcccaaggcatacccatctgtatcatcatagataacgtgtccaggagagacagcacaaggggctccatcttcatcacacaactcatcgcatgcttccagagatattcctggcgctgccacctagaggaagtattttggaagatgagaaaccatccaacggtgttctggtccacatggtgaagttgctgatcaagacctttctagatggcatttttgatgatttgatggaaaataatgtattaaatacagatgagatacaccttataggaaaatgtctaaagtttgtggtgagcaatgctgaaaacctggttgatgatatcactgagacagctcaaactgcaggcaaaatatttagggaacacctgtggaattccaaaaaacagctgagttcagcttttctggaaatccagggtgcccaacccagtggcaagttaaagctttgtcctcatgctcacttccatgaactaaagacaaaaagggcagatgaggtgatatgctttgaaatacggagacacaagattactcattcagacaagacactggggacttactggaatgatatatccagtgatggagaaagagaggcgaacatgcctggcctcaacatccgcaacaaagaattcaactatcttcataatcgaaatggttctgaacttgaccttttggggatgcgagatctacttgaaaaccttggatactcagtggttataaaagagaatctcacagctcaggaaatggaaacagcactaaggcagtttgctgctcacccagagcaccagtcctcagacagcacattcctggtgtttatgtcacatagcatcctgaatggaatctgtgggaccaagcactgggatcaagagccagatgttcttcacgatgacaccatctttgaaattttcaacaaccgtaactgccagagtctgaaagacaaacccaaggtcatcatcatgcaagcctgccgaggcagcctgggcttggtgcaggacataggatgcacaattaaagcagcaaatttgactcacaaagtagaatcagagaataagaaagtacacaaggagtatgcgttgtcagactttaatgtgaatgaaagatcaggtgaagaacatctctaaaggctttctttaccattttaggttcaacattcatttgagaccccaaatatactgacccagctgcccaccattgaaagactatccatgacacgatatttctatctctttcctgggaattaaaactcataagaagcaactcaggaaaatgaaggcattatggtgtctatgaatctgctattagaaaaggtcaatttttgattaagaatatttttataccaaactgctcagctgtccaccttttcaaataccaggctaaaatcaatctcatatttttgctaaattaatgcttaataaatttttattataaaattgtgcttgttttctaattttgtcataaattaagtcatgcttataggagaaaaaattaagtattaaaaatcataaaaaatgaagaaataatcatcatcaacctttttaaaactattcataaaaactcaagttttttatatagcttatttattttgtatatccaattttgtgtgcttttattatattgttataacattactactagtaataaaactatcctaaatataacttttaagtttataatattc

SEQ ID NO: 460380 - DNA, 742 bp, Homo sapiens
aatggggaatattggattctgatgtatgcagaaagtaaagtcattggaaatgtgatgtatagccaatgtttgtctctcttcacccaaaagtcagtttttgtgagtcatgttctcctctctttgtgatgaggctttcctgtaccatatgtcccactagctgctaaatctatgctgaggcaatgagaccctagtacaggtcttcccatttggggatgacagatccgtagcccttttgtaaaagtatttctcacagtagacattagttatatttacatcttaccgataatagccagattactcatgttcttttcttctactttctctaggaaaatgaaggcattatggtgtctatgaatctgctattagaaaaggtcaatttttgattaagaatatttttataccaaactgctcagctgtccaccttttcaaataccaggctaaaatcaatctcatatttttgctaaattaatgcttaataaatttttattataaaattgtgcttgttttctaattttgtcataaattaagtcatgcttataggagaaaaaattaagtattaaaaatcataaaaaatgaagaaataatcatcatcaacctttttaaaactattcataaaaactcaagttttttatatagcttatttattttgtatatccaattttgtgtgcttttattatattgttataacattactactagtaataaaactatcctaaatataacttttaagtttataatattc

SEQ ID NO: 460381 - DNA, 435 bp, Homo sapiens
aggtagtgtacaacgttgagaagacagaatacccatgggcttggtcctatgaaacctgcaaactctcttcattccaggactttcctggttcatggtggaagatgctttctgagacttgaaaagagtcgtatctcatctatagcctactttctttttcaggttcagcaagcatttgaaagtccggaggcaacagtccaaatgcccaccatagaacgagtgtccatgacaagatatttctacctctttcctggcaactgaaaatggttaagcattgagagttgttggtggtgtatgaaataaatgaaagtgtgatattggaggaaaccacaagcagcccagccctcctttatcaacttcaagaaacacctttactagtacagattgaatgcttaacattttgtatttcaataaaggtgaagacaaatgaactgtgtc

SEQ ID NO: 460382 - DNA, 758 bp, Homo sapiens
tcagtctgagccttttttcagtgctgtaagaaaggacggaggctgttatctatggcagatctatccaataaaggagagaaaggaccgcatacgcctggttctcatcatatgcaataaagagtttgaccatctgcctccaagaaatggggctgactttgccatcatggagatgaagaagctgcttgaggatctgggttacagtgtggatgtagaagagaatctgacagccaggcaaaccatggggaacagtgggtcagagactgtccagcatctttgggagtcatgtcttcacagtcacctaagaacctggaggatgcagtttgcaagacataccagagaaggacttcattgttttctgctcttcaacctcatataacgtgtccaggagagacagcacaaggggctccatcttcatcacacaactcatcgcatgcttccagagatattcctggcgctgccacctagaggaagtattttggaaggttcagcaagcatttgaaagtccggaggcaacagtccaaatgcccaccatagaacgagtgtccatgacaagatatttctacctctttcctggcaactgaaaatggttaagcattgagagttgttggtggtgtatgaaataaatgaaagtgtgatattggaggaaaccacaagcagcccagccctcctttatcaacttcaagaaacacctttactagtacagattgaatgcttaacattttgtatttcaataaaggtgaagacaaatgaactgtgtc

SEQ ID NO: 460383 - DNA, 618 bp, Homo sapiens
tcagtctgagccttttttcagtgctgtaagaaaggacggaggctgttatctatggcagatctatccaataaaggagagaaaggaccgcatacgcctggttctcatcatatgcaataaagagtttgaccatctgcctccaagaaatggggctgactttgccatcatggagatgaagaagctgcttgaggatctgggttacagtgtggatgtagaagagaatctgacagccaggataacgtgtccaggagagacagcacaaggggctccatcttcatcacacaactcatcgcatgcttccagagatattcctggcgctgccacctagaggaagtattttggaaggttcagcaagcatttgaaagtccggaggcaacagtccaaatgcccaccatagaacgagtgtccatgacaagatatttctacctctttcctggcaactgaaaatggttaagcattgagagttgttggtggtgtatgaaataaatgaaagtgtgatattggaggaaaccacaagcagcccagccctcctttatcaacttcaagaaacacctttactagtacagattgaatgcttaacattttgtatttcaataaaggtgaagacaaatgaactgtgtc

SEQ ID NO: 460384 - DNA, 642 bp, Homo sapiens
tcagtctgagccttttttcagtgctgtaagaaaggacggaggctgttatctatggcagatctatccaataaaggagagaaaggaccgcatacgcctggttctcatcatatgcaataaagagtttgaccatctgcctccaagaaatggggctgactttgccatcatggagatgaagaagctgcttgaggatctgggttacagtgtggatgtagaagagaatctgacagccaggaatatgaagtcattgctgtgggcatttgctgcctgaccagagcacaagtcctccgacagcacgttcttggtgctcatgtctcatggcatcctggggggaatgtgtggaactgaacatgatgaggcaaacccagatgggctgctttccttcaggccaaagctgaaggaacacttgaagccaggattttgagaccaattgattcatagctcttgggagctatttttcaaatgaaagagaaaacagaaataatttttctaaaaactggtaactacaagatgatttcattatcactaggcacactgttgaatgacacttgagagaaaacaaagtggtatgtatgtgtgtgtgtgtgtgtgtttgtgtgtgtgtgtctgtgtgtttgtatgtgtatgggtctatgtgtatgaaac

SEQ ID NO: 460385 - DNA, 1322 bp, Homo sapiens
  misc_feature (266)..(266): n is a, c, g, or t
  misc_feature (268)..(268): n is a, c, g, or t
  misc_feature (271)..(271): n is a, c, g, or t
agggtctttgcagatgatcaagttaagatgaggtgatcaggatgggccctaatccaatgtggctatgtcctaataaaaaggagcaattggatacatatacactcccagggagagcacggtgtgaagatgaggcagagatcagggtgatgcacccactcatcaaggaatgccaaagattgccagaaaaccaccagaagctaagacatagcatggaacagactttccctcacagcaccttgatcttggacttccagcctcaaaaaccntnagncagattgtgacaagtgctgcaaagaaatacaggacagtaggaacatggacaacagaattccttccatagaatcttactcattgttgatttcttctcttaagccggagctcggcttcaggagtacttttcaaaatatcatgtattttgctaactctatataactccatgtgtcatttcatccagaaaacttgtttctaatgcttttttctctggactctaagctggttgatgccaccaggccttgggaaaaagcctgccttctgataggattgctattgagtagcaaaaattcttggattctgataacatctttcatgcagaaactcaaagcatctcccaaattataagcccattcttttacactgttctacactctcacactctaggaacaactcatttcaatcttgggacattgaccagaattcagggaaactagcatgatccttccagtctgacgtttcattccatctactgtccaaagctgtgtctacaaggcatcacctatgagacaataaaacaaaccctctgaaatcaggaaatttgccagaagatggcgagctgggaagaaataaaaccaggatttgagccagaacttggcttcaagctgacctcaccccacctgcaagtcttaatacacttggacatgccatgaaatgacaagaaatattcagattttagatatgtaaaaatattaaaactatgcctcttagaatctgtgaagtatggtatatgtaacccttttttgtgctaaatgttataacatgagaatttactactatcttttaaattatgatgtttaaaggctctacaatagtcaatttaacttatttaagcaaacctctattattgaacatttagaacctttccaactttttgctgttataaataaagaaatattgtcagaccttgtaataagcaagatttctatctctagtatatttatgggccaagtctttctgatcacaggaggtttgtgtaggaaattaaaactatttttaatattcatcctttcagcaagcatccactgggctcacactatttataaggtgca

SEQ ID NO: 460386 - DNA, 409 bp, Homo sapiens
tcatccagatctctggtgagctaccaagctctaggaacaactcatttcaatcttgggacattgaccagaattcagggaaactagcatgatccttccagtctgacgtttcattccatctactgtccaaagctgtgtctacaaggcatcacctatgagacaataaaacaaaccctctgaaatcaggaaatttgccagaagatggcgagctgggaagaaataaaaccaggatttgagccagagacagggtttctctatgttgcccaggcttgtgttgaactcctggcctcaagtgatcttcccacctcagcttctcaaagtgctggaattacaggcataagccaccatgcctggctgcatgaaatcttctgaggtattattttgagaacataaataaagaattccacaatca

SEQ ID NO: 460387 - DNA, 1580 bp, Homo sapiens
tttcactatgttggccaggctggtctcaatcccctgacttcaggcaatccacctgcctcagcctcccaaagtgctgggattacaggtgtgagccaccgcgcccggtcaacaagcatgtttttaaaggcaaatttcttcctcagtcgtgtggcaggccctgagcaggcagctgggtgtccccgctcagatccaggcccgagtgggctgggcggctgcagagccagtcacctgagctacccagggtgggatccctggccccgacctctgtcctgacacgccccaagcggcagcaacaaagccccaattggcctgggcctgggcaggaggagctgggccgggtgccagatactgggatcagccactgcagctccctgagcactctctacagagacgcggaccccagacatgaggaggctcctcctggtcaccagcctggtggttgtgctgctgtgggaggcaggtgcagtcccagcacccaaggtccctatcaagatgcaagtcaaacactggccctcagagcaggacccagagaaggcctggggcgcccgtgtggtggagcctccggagaaggacgaccagctggtggtgctgttccctgtccagaagccgaaactcttgaccaccgaggagaagccacgaggtcagggcaggggccccatccttccaggcaccaaggcctggatggagaccgaggacaccctgggccgtgtcctgagtcccgagcccgaccatgacagcctgtaccaccctccgcctgaggaggaccagggcgaggagaggccccggttgtgggtgatgccaaatcaccaggtgctcctgggaccggaggaagaccaagaccacatctaccacccccagtagggctccaggggccatcactgcccccgccctgtcccaaggcccaggctgttgggactgggaccctccctaccctgccccagctagacaaataaaccccagcaggccgggcgcggtggctcacctctgtaatcccagcacttttagaggccgaggcaggcggatcacctgaaatcaggagttccagaccagcctgggcaacatggtgaaaccccgtctctactaaaaatacaaaaattagccgggtatggtgccgggtgcctgtaatcccagctacttgagaggctgaggcaggagaatcgcttgaatctgggaggcggaggttgcattgagctgagatcgtgccattgcactccaggctgggcgacagagcaagactccatctcaatcgatcaatcaatcaatcaatcaacccctgcaaacaggtgggaggccacatgccccagaagaccgatgaccggggcccagcctgccctgcctaggagaatcaagggctgcacaaggcccaggtgacccttggctcccagaaggttgcactacccccaggccctcctccttgtataccgggatggcagcccaagctggtgtttgtggctttttttttttttttaaagctatcttgattttattttgttttgcccattactttgttttttctcgtgattttacttagtttgctcatatatggcttcatttatataacatgctagagagggcacact

SEQ ID NO: 460388 - DNA, 943 bp, Homo sapiens
tttcactatgttggccaggctggtctcaatcccctgacttcaggcaatccacctgcctcagcctcccaaagtgctgggattacaggtgtgagccaccgcgcccggtcaacaagcatgtttttaaaggcaaatttcttcctcagtcgtgtggcaggccctgagcaggcagctgggtgtccccgctcagatccaggcccgagtgggctgggcggctgcagagccagtcacctgagctacccagggtgggatccctggccccgacctctgtcctgacacgccccaagcggcagcaacaaagccccaattggcctgggcctgggcaggaggagctgggccgggtgccagatactgggatcagccactgcagctccctgagcactctctacagagacgcggaccccagacatgaggaggctcctcctggtcaccagcctggtggttgtgctgctgtgggaggcaggtgcagtcccagcacccaaggtccctatcaagatgcaagtcaaacactggccctcagagcaggacccagagaaggcctggggcgcccgtgtggtggagcctccggagaaggacgaccagctggtggtgctgttccctgtccagaagccgaaactcttgaccaccgaggagaagccacgaggcaccaaggcctggatggagaccgaggacaccctgggccgtgtcctgagtcccgagcccgaccatgacagcctgtaccaccctccgcctgaggaggaccagggcgaggagaggccccggttgtgggtgatgccaaatcaccaggtgctcctgggaccggaggaagaccaagaccacatctaccacccccagtagggctccaggggccatcactgcccccgccctgtcccaaggcccaggctgttgggactgggaccctccctaccctgccccagctagacaaataaaccccagcaggccgggc

SEQ ID NO: 460389 - DNA, 865 bp, Homo sapiens
cccagaccacccaccccgggctgaagactcttcctgagtcgtgtggcaggccctgagcaggcagctgggtgtccccgctcagatccaggcccgagtgggctgggcggctgcagagccagtcacctgagctacccagggtgggatccctggccccgacctctgtcctgacacgccccaagcggcagcaacaaagccccaattggcctgggcctgggcaggaggagctgggccgggtgccagatactgggatcagccactgcagctccctgagcactctctacagagacgcggaccccagacatgaggaggctcctcctggtcaccagcctggtggttgtgctgctgtgggaggcaggtgcagtcccagcacccaaggtccctatcaagatgcaagtcaaacactggccctcagagcaggacccagagaaggcctggggcgcccgtgtggtggagcctccggagaaggacgaccagctggtggtgctgttccctgtccagaagccgaaactcttgaccaccgaggagaagccacgaggtcagggcaggggccccatccttccaggcaccaaggcctggatggagaccgaggacaccctgggccgtgtcctgagtcccgagcccgaccatgacagcctgtaccaccctccgcctgaggaggaccagggcgaggagaggccccggttgtgggtgatgccaaatcaccaggtgctcctgggaccggaggaagaccaagaccacatctaccacccccagtagggctccaggggccatcactgcccccgccctgtcccaaggcccaggctgttgggactgggaccctccctaccctgccccagctagacaaataaaccccagcaggccgggc

SEQ ID NO: 460390 - DNA, 2765 bp, Homo sapiens
gaattggcgggagaataggtttggtggtccgagatccgaggcaacggtggctcctcgaggtccacggtcccggccggtgaactcgataccttgcaagcctgtagccccagctcacacgcctctgggcgtccgcctggatctgtctggtgaatggaactaggatggcctgtgagcccacagaacgtctagaaaagtcagctttacattgggaccaacagaaaattacagggaattatctacatcatccacaggcatcccatttacttaaaaataatcatttttattttgtgacacttaatacggagaatattgtaaatactgtacacccatcaccctaaattgactactggcattatgatttatttgcttattttttaaaagctagataatacaataaaagttaaacttacctgttttttctactctcaagcctattaccctctcatcctctccagaagcaactattatgaattagaattagcttgtgttctcccagtccatttttaataattatatagatgggatttcgccatgttgcccaggctgatcttgaactcctgggctgaagatatccaccctcctcggcctcccaatgtgctgggattacaggcctgagccaccatgcctggcccaagtgttcattgatgatgagagatgggcttttcgcatcaaatcacaaaaatatgctgagtaatgtgaggattcttgcttttctggaagctaacacatagtcagtgccaaagtagtgacagaagaaatcttgagaggaagcatttttgtcttgtacttgaaacagctgctgggcccaccatggctcctgtgaagatcagccatgtggtatcattttcttctcaggatcccaagtatcctgtagagaacttgctaaacccagatagtccaaggagaccttggctcggctgccctcaggacaagagtgggcaattgaaagtagaactacagctggagagggcagtgcccactggctacattgatgtgggtaactgtggctgtgcgttcctgcaaattgatgtgagccaccatgcctggccaagttctcatactatttctgtcacatctgcagttaatttcctccactgaagtcttgaaagcccactaggagggttggaatcaacttcttccaaattcacattcatgttgatgctgtgacctcctcccatgaatcaccagtattcttaatggcatccaagatggtaaattatttccagaaggttttaatttactttcctagatccatcagaggaatcgctatctatatggcaaatatagccttacagaatttatttcttaaatagcaatgcttgaaagttgaattactccttgatccttgggctgcaaaatggatgttacagtaggtacgcccaagaactagtacatactttttacctccacactttggcatctctgtgaagtccacttggagaccttcaaagggggctgctccataagctcgtatgccgggcggaacggctggaccttgcctcgcatcatgctggcggcaggtaacacaccgctgcctcaccgttttggcaagggctgacaaaggctcccctagatggcaaatgacctgctttcgttctgaccccgggctgtgttccgacccctgttggatagtaaatcccagggctatcgggatcacagggagtatacatacgatagacctcacacagtctctggtagaattgtgctggactttcttctttaccctgaatgacctcagagagcttgttaactggttggagtatgacgttactcacaatatagcactgagtgtgcatccacccgtgattttgctcctaatattcacagaagaagagaatgctattactcccaacatcacaggaagtgtacacccccgtgtgagatggtccttaaaaatattccaaggcggagggggtgatatgactacatatatggcagaaagtggacacccccaaggatatcgttcccatgatcctggagggaagaggataatattgctttcaatatcacagaaagtggacacgtccccaactgatatagtttctagttgcaacgtgggagaggacgacctgacacctggtatcccagggagtagaaatacccctgtgatactgttcctaatattcagagaggaagaggatgatattactcccaatacagacgggtgtacagcggtctgtgaaacagttcaaaatctccagagggggaggtgatattactcacaatatgttaaacaggctgtgagtccaccgcggatcctaagagccagggggggcaagaggggctggctcttactccccgcatcgtggggggctcctcgcccccctgcgatgggggtcttaagagccaggggggcaagaggggctggctcttactccccgcatcgcggggggcgcctcacccccctgcgatggggctcgtaatatccagtgggggagagggggtgatattactccgtttctcgtattatgttttctctactgctacacttggttaacaccctgggacattattttccatattctaggaatgtgtcactgtttgagtcccgggggtatacaccctgtgatattattcgtgataatgtggtgaaacgtgaatcctgatgtcacaagtgtctacacactctgatattattcgcaataccctagcgggacgttaataataatgtcacaatgtgtgtacagcttgtgccattattcttaatctcctaaggggaggttgatttttttgtcacacggagtagtttccctttggtatgattc

SEQ ID NO: 460391 - DNA, 2322 bp, Homo sapiens
gaattggcgggagaataggtttggtggtccgagatccgaggcaacggtggctcctcgaggtccacggtcccggagatgggatttcgccatgttgcccaggctgatcttgaactcctgggctgaagatatccaccctcctcggcctcccaatgtgctgggattacaggcctgagccaccatgcctggcccaagtgttcattgatgatgagagatgggcttttcgcatcaaatcacaaaaatatgctgagtaatgtgaggattcttgcttttctggaagctaacacatagtcagtgccaaagtagtgacagaagaaatcttgagaggaagcatttttgtcttgtacttgaaacagctgctgggcccaccatggctcctgtgaagatcagccatgtggtatcattttcttctcaggatcccaagtatcctgtagagaacttgctaaacccagatagtccaaggagaccttggctcggctgccctcaggacaagagtgggcaattgaaagtagaactacagctggagagggcagtgcccactggctacattgatgtgggtaactgtggctgtgcgttcctgcaaattgatgtgagccaccatgcctggccaagttctcatactatttctgtcacatctgcagttaatttcctccactgaagtcttgaaagcccactaggagggttggaatcaacttcttccaaattcacattcatgttgatgctgtgacctcctcccatgaatcaccagtattcttaatggcatccaagatggtaaattatttccagaaggttttaatttactttcctagatccatcagaggaatcgctatctatatggcaaatatagccttacagaatttatttcttaaatagcaatgcttgaaagttgaattactccttgatccttgggctgcaaaatggatgttacagtaggtacgcccaagaactagtacatactttttacctccacactttggcatctctgtgaagtccacttggagaccttcaaagggggctgctccataagctcgtatgccgggcggaacggctggaccttgcctcgcatcatgctggcggcaggtaacacaccgctgcctcaccgttttggcaagggctgacaaaggctcccctagatggcaaatgacctgctttcgttctgaccccgggctgtgttccgacccctgttggatagtaaatcccagggctatcgggatcacagggagtatacatacgatagacctcacacagtctctggtagaattgtgctggactttcttctttaccctgaatgacctcagagagcttgttaactggttggagtatgacgttactcacaatatagcactgagtgtgcatccacccgtgattttgctcctaatattcacagaagaagagaatgctattactcccaacatcacaggaagtgtacacccccgtgtgagatggtccttaaaaatattccaaggcggagggggtgatatgactacatatatggcagaaagtggacacccccaaggatatcgttcccatgatcctggagggaagaggataatattgctttcaatatcacagaaagtggacacgtccccaactgatatagtttctagttgcaacgtgggagaggacgacctgacacctggtatcccagggagtagaaatacccctgtgatactgttcctaatattcagagaggaagaggatgatattactcccaatacagacgggtgtacagcggtctgtgaaacagttcaaaatctccagagggggaggtgatattactcacaatatgttaaacaggctgtgagtccaccgcggatcctaagagccagggggggcaagaggggctggctcttactccccgcatcgtggggggctcctcgcccccctgcgatgggggtcttaagagccaggggggcaagaggggctggctcttactccccgcatcgcggggggcgcctcacccccctgcgatggggctcgtaatatccagtgggggagagggggtgatattactccgtttctcgtattatgttttctctactgctacacttggttaacaccctgggacattattttccatattctaggaatgtgtcactgtttgagtcccgggggtatacaccctgtgatattattcgtgataatgtggtgaaacgtgaatcctgatgtcacaagtgtctacacactctgatattattcgcaataccctagcgggacgttaataataatgtcacaatgtgtgtacagcttgtgccattattcttaatctcctaaggggaggttgatttttttgtcacacggagtagtttccctttggtatgattc

SEQ ID NO: 460392 - DNA, 371 bp, Homo sapiens
ttttctggaagctaacacatagtcagtgccaaagtagtgacagaagaaatcttgagaggaagcatttttgtcttgtacttgaaacagctgctgggcccaccatggctcctgtgaagatcagccatgtggtatcattttcttctcaggtatattaatcagcaggcatgatttgttttcttaataactgaaaggagtgaaaaaaataggagtcttggctccactttcaggaaactcccaatctaatagaagagacattgtgagttcagagtctaagagaagaaacagctcttgccctcaggttgttcccacagaagtgcaggatgcgcaaaagaagtcttctcagaagttgaaagtacagaaagcagcaccct

SEQ ID NO: 460393 - DNA, 304 bp, Homo sapiens
cccgagtagctgggattacagacacgcagcaccacacctggctaattttttgtattttagtagagatggggtttcaccatgttgaccaggctggtctcaaactcctggcctcaagtgatccacccgcctcagccatccaaagttctgggattacaggtgagccaccatgcctggccaagttctcatactatttctgtcacatctgcagttaatttcctccactgaagtcttgaaagcccactaggagggttggaatcaacttcttccaaattcacattcatgttgatgctgtgacctcctccca

SEQ ID NO: 460394 - DNA, 1494 bp, Homo sapiens
gaccgtcgtaaactagaattttcttgcggcttcttagctttacgatggcaacaagtatggcggctgctagtggtagatttgaaagtgcgaagagtatcgaagagcggaaagaacagacccggaatgccagggccgaggtgttgcgccaggctaaagccaattttgaaaaagaagaaaggcgtaaagaacttaagcgacttcggggtgaggatacatggatgctacctgatgtgaatgagagaattgaacagttctcacaggaacactctgtgaagaaaaagaagaaaaaagacaagcattcaaaaaaagcaaagaaagaaaagaaaaaaaagagcaagaaacagaaatatgaaaaaaacaatgagtcatctgatagctcatcaagctctgaagatgagtgggttgaggctgttccatcccagactcctgacaaggaaaaagcctggaaagtgaaagatgaaaagtcaggaaaagatgacacccaaattatcaagagggatgagtggatgactgttgattttatgtctgttaaaactgtgtcatcatcatcactcaaagctgaaaaggaaactatgaggaaaatagagcaagagaaaaaccaagcgcttgaacagtccaaactgatggaaagagaattgaatccgtactggaaggatggtgggacaggtcttccacctgaagactgtagtgtgtcatcgattactaaagaagctgaacttcttcaaatacaggaggagaagaggaaattcctagaaagcacagattcacttaacaatgaacttaaaaggttgtgcggtctgacagtagaagtggatatggagaaagttgcagctgagattgcacaggcagaggaacagaccggcaaaaagcaggaggaaagggagaaggaggcggcagagcaagccgagtgcagtcagggcagcatcattcctgaggaagaacaagcaccaaacaaaggtgaggagaagaaagacgaggagaacattccaatggagacagaggagacacaccttgaagaaacgacagagagtcaacagaatggtgaagaaggcacgtctactactgaggacaaggagaatgggcaggagggggttgacagtatggcagaggaaggaaccagtgatagtaacactggctcagagagcaacagcacaacagtggaagagccaccgacagatcccctaccagaagatgagaaaaaagaataagtgttgccatgttttatgtgttctaaatagttttttaaatgaaaaaaagttttttggttttttaaaaaaatacctgttaggctactcctcctcacttttggtgtccatttgtgtgaaatgcctttttccatccctttattttaagtttatgtaagtccttatgtgttaggtataccgattattcttaggtttggttgattaacataatcccagacttcttggagcctttgttcatattttcttagttttttgtctttgtcttagttggattgggttaatttgaaga

SEQ ID NO: 460395 - DNA, 2735 bp, Homo sapiens
  misc_feature (1)..(2): n is a, c, g, or t
  misc_feature (4)..(4): n is a, c, g, or t
  misc_feature (6)..(6): n is a, c, g, or t
  misc_feature (12)..(12): n is a, c, g, or t
  misc_feature (17)..(17): n is a, c, g, or t
nnancntttgcnttccnaggtgaagaccctgaaacaagaagaatgagaacagttaaaaacatagcagacttgaggcagaatttagaagagactatgtccagtcttcgtgggactcagataagccacagcaccctggagacaacatttgacagcactgtgacaacagaagttaatggaaggaccatacccaacttgacaagtcgacccacccccatgacctggaggttgggccaggcatgtccgcgacttcaggcgggagatgctccctccctgggtgctggctatcctcgcagtggtaccagtcgattcatccacacagacccctcgaggttcatgtataccacgcctctccgtcgagctgctgtctctaggctgggaaacatgtcacagattgacatgagtgagaaagcaagcagtgacctggacatgtcttctgaggtcgatgtgggtggatatatgagtgatggtgatatccttgggaaaagtctcaggactgatgacatcaacagtgggtacatgacagatggaggacttaacctatatactagaagtctgaaccgaataccagacacagcaacttcccgggacatcatccagagaggggttcacgatgtgacagtggatgcagacagcattgaaagagtgaataaaggaagaacaaccattggagagacagagaaatcagctttaacacaaagatcaaaggacaaccagggttagctgatattttttgaaatggagagaagaggaaatatgcaatactatacaattccatggataagtgatgtttgacaactggcaactagtttcttatcagtggctttatcaaagttagtttcaatgaaatactgaaggagcatgctaggttatgaaaaggtgaagaagttaggaggttgaaacaataaagggagatcttcaggaaagttgcagggaaggactcttattgatgtataatttttatcttatctgcttataatagaatttactaatgaatcttatgaggatggtaaacatattgagaagaagaaaagaggaagaagaaaaggaggaaaggaggagaaaagaggaggaggaagaggaggaatgaggaggaaaaggaggagaacgaagaggaggaagagtagtcaaatttgttataataacaatagctataatagacataagtattgaggacctagtgtgtgtagctaacataccatattacttaaatatattattttactttatctttacaatagccctataaagtaggttttattactaccattgaggcaaataattcttacatcaagtagcttacccatagatactttcttaataaataataattgcagaatttgaatttagatcttatgttttaagtattattcataaaattattaatttagataaaggtttttatcatgcctggatgaaatattttgacttcataaattatttaatttttccattttgacctaaacatatctatactataaatagtttttttaaaattcagcttcaaaaaagttggtaaattaattcaatgtataatggtatctatttccattgcagattgtcaatagatcttaaaacacaggtgacagaacagtcatttcacatgtgtgagagcgtctaaaaagctagttagcttgctgatatcaataaagcaatttaacagtgttttgttcttttatatatattatatataatatataattatatataattacatatatataatttataatacatatattttatatataatggatgtaatatatataaatctgtcattatcttgaaatctaattattactgaaatatctatttctaacaggctcaggaaatagaaaaatggaagagggagaaatatgtttggctcataaaatgaaaaatactaaaagagcacttatatgagggaaaaaggaattttggtccttttatattacatgatattacttttcatgatgagagatatcctagctaattaaatggttaattttatttaagaagttatatctatacatgaaacacttcgttattttgccttcaagaactaggcatgaattcttttttttttttaataggctaactaatgggttcagattttcaatttgggatcattaaattgaaggcattttggccggcagctgataaattctgcatcttcctcactccggctgcatagagtgggtggcatggacttatttattagaggcatatgggttccatttatatttttttcttgcttgacttaatttgcattttaaatagttaaagttatttgcaataagcttggttttttttaaagccttaccagagctcccatatgtttttttaggataagttgtaaatgacagtgttttcattataaaattattttctaaactaaatcgttttttattacaaaacttttctaggtttattaatgaaaattcacagagtatacaaaagtgtgaagaagaatctaaaaagaatctgtaatcctctcatcccaaagacaaccaagaatattgcattaagatatttccttctaggcttctttaccctttctatttacatagtttggttacatcatatatatagtatagtaccctgctttcttcactgtatttatataataaataatactgtgtaatattagatattatttttgaatatgatttttaatgattgcatgtccttctgttatgtggaataaattacatatctaaagagctagtgcaataaaccattaaatttaaggtattcat

SEQ ID NO: 460396 - DNA, 2105 bp, Homo sapiens
atacacctcatgtaaatgatgagttaatgggtgcagcacaccaacatggcacatgtatacatatgtaacaaacctgcacgttgtgcacagattgaaaatgttgatgtctgccttagttttctagcagccagaggggtaaatgttcaaggtctatctgctgaagaaataagaaatggaaacttaaaagccattctagggctgtttttcagtttatctcgctacaagcagcaacaacaccatcaacaacagtactatcagtccttggtggaacttcagcagcgagttactcacgcttcccctccatcggaagccagccaggccaaaacccagcaagatatgcagtccaggcttccagggccctctagggtgcctgctgcaggaagcagcagcaaggtccagggagcctctaatttaaataggagaagtcagagctttaacagcattgacaaaaacaagcctccaaattatgcaaatggaaacgaaaaagaatttgtgagtctactcaacccttgctactcaaagtatgacttgtgtgtgagcagcaacggcatcattcagaagattgttggcaatgcagaacctcagggcccactgcagacctgctattcctccaaaggacctcaatcgtcttcaggtgtaaatggtaacgtgcagcctcccagtactgctgggcagcctcctgcctctgccatcccttctccaagtgccagcaagccctggcgcagcaagtccatgaatgtcaaacacagtgccacctccaccatgttgactgtaaagcagtcaagtacagccacctcccccacaccatcttcagacagactgaagccacctgtctcagaaggggtcaaaactgctccctcaggacagaaatccatgcttgagaaattcaagctagtcaatgcccggactgctttacgccccccgcagcctcccagttcaggacctagtgatggtgggaaggatgatgatgccttttctgaatctggtgaaatggaaggttttaacagtggtctgaatagtggtggctcaacaaatagcagtcccaaagtgtcacctaagttggcccctccaaaagctggaagcaaaaatctcagcaataaaaagtctttgctacagccaaaggaaaaagaagaaaagaacagggacaaaaataaagtttgcactgaaaaaccagtcaaagaagagaaggatcaggtgacagagatggctccaaaaaagacctccaaaattgcaagcttgatccctaagggcagcaagacaacagcagctaagaaggaaagcttaattccgtcttccagtggtattccaaaaccaggctctaaagttccaacagtaaagcaaaccatttcacctggcagcacagcaagcaaagagtctgagaaattcaggactaccaaggggagcccttcccagtccttatctaagcctataaccatggagaaagcaagtgcttctagttgtcctgcccctttggaaggaagggaagctggccaagcttctccttctggttcctgtaccatgacagtggcacaaagcagtgggcagagcacaggaaatggtgctgtccaactccctcaacagcagcaacatagccacccgaataccgcgacagtggcaccattcatttacaggtcagtacttattccttctgagacttcaataaatgcttcatagtactctttgtcacacactgggtgttcagagttctataaatataatgtggattctggaagttaatagatttcctattagcctaacttcctatctaatataaattattctgtacatagtttcaaacttccactttgatgagtgactagtgactataactgctatttctttctattttcatggttaatttcagggcacattcagaaaatgaagaaactaatatatcacggtatatctgattgaatagtctgtatttgatgtttttctccacttccttattgtctaccctttgatcactttttcattcttccagttgatatttccttttaacattctgatttttaatagaatacctgaaagtgaatataaactggcaattaatgtaataatttaatgggtttatcagagagcataatatcattttgcagcaataa

SEQ ID NO: 460397 - DNA, 6220 bp, Homo sapiens
  misc_feature (1)..(1): n is a, c, g, or t
  misc_feature (6)..(6): n is a, c, g, or t
ntgtcnagtcaaagtgagtggcctcaaccaatgctggcatttgtaggccagaaaacagtagcagagttgctgtgctgtctggtgggtaggaagaccattgaggatgggtccctcaaatcccaccatcaagatggctcaccaatcaaagctgacacagctggccaggactgcctgacttcatggtaattttgatctttcaggcaaagaaggggaactacgccttcctgtgggatgtggccgtggtggaatacgcagccctgacggatgacgactgctcggtgactgtcatcggcaacagcatcagcagcaagggttacgggattgccctgcagcatggcagcccctacagggacctcttctcccagaggatcctggagctgcaggacacaggggacctggatgtgctgaagcagaagtggtggccgcacatgggccgctgtgacctcaccagccatgccagcgcccaggccgacggcaaatccctcaagctgcacagcttcgccggggtcttctgcatcctggccattggcctgctcctggcctgcctggtggctgccctggagttgtggtggaacagcaaccggtgccaccaggagacccccaaggaggacaaagaagtgaacttggagcaggtccaccggcgcatgaacagcctcatggatgaagacattgctcacaagcagatttccccagcgtcgattgagctctcggccctggagatggggggcctggctcccacccagaccttggagccgacacgggagtaccagaacacccagctctcggtcagcacctttctgccagagcagagcagccatggcaccagccggacactctcatcagggcccagcagcaacctgccgctgccgctgagcagctcggcgaccatgccctccatgcagtgcaaacacaggtcacccaacggggggctgttccggcagagcccggtgaagacccccatccccatgtccttccagcccgtgcctggaggcaccagacctggagtcctcttcaagcagcaatccaacccagagcaggggccctccccactcaggcatctgataacctctgagatttccaggcctatccctgtgcagtcatcctacaggcctcaagccatcaacctgatcttccacccccagatgtgtgtgcttttcagccgacctctgaaaaagtcccctggcttcagtgactttgtgggggacagccccgctgtcggcctcaagctcagtaaagctgatctgaggaggctgtctgacatgatcaaaatttcttcttctagaaaccaaaaggaggatgcccagccctagttcttctgccctgcaccaaggacaggcttctccacgttggggccactcctcagactggggctgaggggcgggcaacagacaccgctggattctgtgagcagatgggtggacaggagcagctgcagggaaccacaaagggctgttttcttaagaagaagctgcctagttcctaaatcagaaatcccccgaatagtgccaaggtaaaactaattccatacctaatgtttgtcttttcaagttctaaaggagaagcagacacattaaagaagaaaagaccagtggtcctaaaggccacgaggacatggagggacgcagtctatggcctgtgcgttttcatttaaaagtcattccatttaataatagatgatagaaatataaaaaattgaaatattaaacatattttaaatattattaaataacagagatgggcaaggtctaacggataactcaggtctctatgtgaccttctgctcccaaggtgaaggggtcacttaattgagtgcctccagcttcgttttcaggaaactttcactcccaaaagtatctgctcatgaattagcatctgtgtcttaactagagccttgttttgtactcctagccttggcaaaagtaaatgagataaaagctccagacaattttaactgacctttccttgctgtggacacaataaaagaggcagcatttctgttcctaatgtaacatttttgtatctaaaatattcttttatgccattagttgtttttaataaaactgtttattcttattatcctcaccctttgtaccaagaaactgcacataaataaccctcttctatgccaataactttaatcattgtctttttttttttttttttttgtctctcagtggtggtatttagtcagaggagattacttatgagagaagtgaacctattccagataaatcaggaacctggttcatatcttccacatattcctaaaattctcgtataaaagctctaagccacttccgttaagagttgtgagtcaggcaagcctctgcatctcactcttccaaggcctagctccctgggcaaggggtgcagggagaagggattcgtgcaccttagatggagacaaatgctagacaaatgctatggcaataaaataagtgagacctgcttttgcattttggctctggactttacagttgtatgattttggatttgaagtgataagaatgaattcacagagctatatgtgtgattcatgattgctgaaatgatgttttcccagttcataagctcccctcttctgccagctgagcctcttgcagaacctatacagttcccaaagaccagagctggctcttgacaagcaaagccatgcttccttttgctttgtggcaaattactttttttcctgcaaaacagcatggcctagtgctgattcagtagatcagagtaggaaaagacagatctggcttaaaaatctgttctttgccactcactagatgggtatccttgatcctattaccaatgtctctgagccttctttctccccctcacctgtagaatggattctgagtcctgagctgttttgaagatcagtgataatgtggtagttaaaataatgctttgttattcagtatcctctctctgttagcttgttggttgtacatttttatattcttaaagggattatcctatagatataaatatatattttaccatgtccaagacaaaatcgggatcttaaaacaccttaacttcatttaacccattccattttttataattgtaattttacatatattttcaacaaaacttcaataataattttttaactattgttacatacagtaaggaatcatttgggcttttcaatatatttatttttttctgtgtctgtttatttcttcctctatgtctctgtttctttctgagatatttttcttctgcctgaaaaaacacttttaagaattacaaataaagctgctacaaatatccatttgtaggtttttggtggccattaagtttttaaatcatttgggtaaatacctaaaagcgcaattggtggtttggataataagactgtgtttgtcacaatttaccgaatttgtcagaaattaccaaactgtcttccaaagtgactgtattcaccatcaataaatgaaagttcctattgcttctcatttgatactatcactgtttcggactttgtccattctaaaagatagttgtgctatctctttgttttaatttgcagttccctaatggcatatgatgtggagcatctttttatatgcttatttgatatctgtatgttttctttgatgaagtgtctgttcaggtcttttgcccatgttttaaattgagttgtttgattttttattgttgaatataagagttctttgtatatttttgataataatctttttatcagatatgtctgttgaaaatatattctcccagtctgtggttgtcttctcatgctcttgacagtgtcttcagcagagcagaaatttttaattttaatgcagtcaccttattgggtttttatttcatagattttgcctttgctgttgtgtctaaaaagccatcatcatactcaaggtcatgtagattttctcctatgatatcttgtggaagttttatagttgtgtactttgcatttaggtctatggtttcttttgagttaatttttgtgagggtataaggtctctgtctaaattctttgtgggtttttttttttttttttgcatgtggattttcagttgttccagaacatttgttgaaaagagtatctttcttcattgcgttacctttggttctatatcaaaatttagttgactttatttatgtggttctacttctgggctctatattcttttccattgatctacttgtctgttcttttgctaatactgcattgtagcttcatagtaagtcttaaagtctgatagtatcagttctctgactttgttcatttgcaatgttgtgttggctattctgggtcttttgcttcttcatataaactttagaatcattttgttgatatccacaaaataactactgggattttggttgagactgtatttagtctattgatcaagttgtgaagaactgataccttgacaatattgagtgtttctatccatgaacatagaatatctttctatttatctggttctttgatttatttcatcaaagtttttcattttttatatagatcttgtaatattttgctagatttatgccaagtaatttaatatttttggcactactgtagatggtattgtggttttaatgtcaaattccatttattgttgacatatagaaagtcaatttaatttgtatattaaccttatatctgaaggctttctataattgcttttgagttttgggagttctgttgttggttatttcagattttcaacataaagaaatctgccacctatgaaagagttttatatctttcttcccaatccgtatactttttatttccttttcttgtgttactgcattatcttgcttattgcatagttttaacactttgaaaaggaatgaagcagggtcgtgttattctgtttggtgttctctgaacttcctggacttgtgatttggtgtctgacattaattggggaatattctcagtcattacttcaagtattttatgtttctttatttcttcttcgtatattcccattaagcatttgttacatcatttgtagttgtcccacagttcttggatattatgttctattttttcatgtttttctctttgattttcagttttagaagtttctgttgacatatgcccaagctcagagattcattcctcagccatatccagtctacgaattactctatcaaaggtattcttcttgttacaatgtttttgatttatatcatttctttttgaatatttcttaaaatttccatctctctgcttacattttacctctgctttgcgtattttctactttttccattagagcctttagcttattaaggatagttccaaattctcggcctgataactccaacatgtctgaaatatatgagtctggttctgatatttgttctgtctcttcaaactgttttttgttgttgttgtttttttttgtattttgcctttagtatatattgtgactttttgtcgtaagcctgactgacatactcagtaaaaggaattctgataacagatctttagtaatgtggtgggcaggtgaagtgttctatcactctgtgattattaggctttcgtccttttgtgatcctatgccccttgaatatgaacttcacaagggcttctcagtctccctgacccctgctccaggtaggacaggttgactagagtgggctagagttgggtctttctctttctccaggttggttaggctctgttaaaaccacaaaagagtaggctttggtaagatattttttattgaccacaggcctttttaagaacagaatgctttggcatatttcataatggttacttctcccttctattttcaaatacatgaggaaagttttctctgatactcactttgagaacctgagagagctcctggaagtaaaactcataaaaagtgaggggcctctgtatgcctgcccccactggagtttctaactctcagattcatccacactgagctttcagcaattcaccagttacagtttgggttttcctgccccagtatttgttcccacagaggtttctgcttgtgggtctctgttctggcaagttgtgattctctgtatacgctcgtgtgtctctcttatttttggggaggaggtttatcctgtgaccttacgtttatgacagatctaagaagagttgatttttcagtttatgtatttttcttttgtttacttgttgttagtgaagacctcaaagctccttacatgcaggtctagaatccagaagaggctttaaaaaatgctc

SEQ ID NO: 460398 - DNA, 4854 bp, Homo sapiens
cccctccccagtagcagccgtggcactgagagccatggctctttgctgggaaatgtattatacagcacagtactcccctcataaaaatacaataaacggccctgcaagtggtcagcaaagtgatgactccaacccagtggtgttcttggaggggcctctttggaagcaaagctgggaagatggaaccgaaatctttgggataagagggccctgtaaagaggccaaagaaagggaaatacacccccctttgatcacaagggattgtaattactcagatattgattgggataatgagtttgccaaaactctagagaaggagagatattcctgcaggtattttgcttttgcagaatttgctgagctctcctgtgaagtcaaagggaaggcaggagaccacacctgtgtttgtgatatcacagacacgctgagatccacaaatgtgtcattagcccaccaggttggcacagaacggctgcatctgaaggtgatttaacacagtacgtatttgttaaagaaaatatagaaaacctacaggagaaaggaggatattatccacaatcataccaccaaaggtaatcactgttaatattttagggaatttccttccaatctttttttttcttttttatcttaaaataaaattcaagtcatattatatttgcatttttatagtttcttttttcatttaatattatatgatgagcctattcctgtccctttcgtattattctacaatatctttttttaatagtttcacagtattcaattttgtggatttatatacatttagttaatctttataactggatatttagatttcctgcaaatttgcaccattgtaaacattactgcaatgaacatctttgtattacaataatctttgaccacaatttctgattgtttccttaggagacactttcctagaagtggaatcactgtttcgaaggctcttgttatatgctggttaattgtccccctcaactccccccacctgaagtgtcacatcaatttacaatctcattaatcagtggctatgacatccttcgcctctggcctgaagccatgagaaatgacaataagaaaaccaccctcaagttggcttgattccctgcccatgacatacaaaggcgcatccagtttgcagagaaaaggctgggttaaccaggctgctgttggtcaagtggctgtaagtggtgcctgaggaatccatattgctgttattaacttgcaaactgttgatgtaaagggttggggtggaatactttgcttctgtaattagaactggtttccttttcctgcaaatttggggactctcctgttattaatgacctttttggatccatgcccaggatttagagatattgtctttggatctaggtaatgaggtcgctactgatcctgaacaaatgggagaagttatttaataattactctgcactgtctgtcggtgacctttcatttgtcgagatgagaggcatctgtttatcatcacccctatgtggaagattttgattttccgggattagttctcctggattgaatccattttgctttctgcctttttagaaaagtttgccatttaaaggtaccacatgctgtagcatatgagggagctgcacctgaagtgatatgagtggaaaccatcttagacaggctggaaacacaagttcttcttaatctggggtgcacaatcaacttctagagctgacagacttgtatgctgctgaggcaagtcagtggcttctcagtggtttctggcggcaagactcaagatttgaagtttgagaggaaataagcctcaaactttgagaggaggtaggaagagattaggctttttctcttttctgcacttaacagtgagatggatagatggcccagtgtgctcagtggctctcagctggggagaacacggatgccataattgggcagacactgtggtggacaaaacagagccaaagctcagagaggctctctgagcgcccccaaagagacgttcctcccataccaggtcttgaagggcttctggagggcttggtagagacaacctgggaaagacgatgacagcgactgaaggcttaggatgaaaaccagattaatttgacttgcacagagaatcatgtgctgccaagtgtgagtggtgtcttacagagcctgagcctattactttacctaactttgtcttccttttaaaaatatccctgctaaatggccgttgagccactgcttgcatttctcctatggagaactcaccacttctcaattccctctggtctccactccatttccagcaattctcataaaattcctttttctaaaatattgagattttaaaaatctgttattttgactttagcccattgacctttgctcttatgttggggcattaattggcatttgtcttcttccttaggacagtccttcaggctttggagcagggttgtcatgccaccctatgtcttctggtgaaacattccagttctctatgttttccatgagccatgcttccaagttctttcacccccctggccacactccttaaaatcagtcgtgttttgtggttctctgaatatgagaattgcaaacaatactcaagtctggtttgtccctcacatactagaacaggtttatcttctcctttcatccagacaatacggttttattaatgcaatctaagtaagggaattttttgaaaagggaaggggggaagcacggttggtagaagaccttcaaatctcttctgaagaattaggtggaagaagccctacggaaagacaacattccacaaggctggcgagactttcacagggagggagcgggctgcaggtagtcctgccctctccccattcccacagccctttggagccctttcttcttcttggataaacagggaaaccagagctgggattgggcaggaggagaaaagcagagagcagcttggagttagaagacacagggcaacaatgatttgagagtccctgcatttctcacactgaccccagaaccaggcaatttctcaggggagaaggccctgtgctcctagaatgagtgagtgccctgtgttacaccccctgaatggtctgcacctccactttgataacatgcatcacatgtgtaacaaatgttcagctttgaacttcctcactaggttgtgagggcacagtccctacttatctgtttaatgatccttaatccacagtgtcaaatacaatgtaggcactcaacaaaaatgtgctggataaatgaacaaagaacaaatcaacgaatctccaggagtgcttgctccaaggtttctgttgatgggttctatccatcagtccatttggcagctcctgttaacttgcctagttccaattggctctctcctcctgcagcgaattctccactgtccagccatgttaagagatagaatagaatcatgaaaacataaaggggttagggctaaagagaactttagaagttatgcacagtttattgataaaaagacttttttccctcatccacactccactaaattctctcactttctttctttcttttcacatcccagctctacaaagcaattcccttgcagataccctcaactccttttttccttattctctccactgaacttacctgggaaaaagccccgactatctgcttactttgttcctgacctgaagcagcttagcattactggagaaaatcatcttcttgaaattgataaactgggctccaaggagacactctcgacccctccaccgcattggtctccagcaatgcaacctttacaacctgtcaggtgctactcttatttctgttgcccattttggaggactgtttccttgaggaggcccatttaggtgtcttttctacctatctacccttctagacttgatctggaaaggatcttagggatcagctgatctcctacctttcagtgtttgtatctttaactgggaaacttccctgtataaaaaatcttatgtggaactcttcattataaaacagtggagttgctcttgttgaaaaatgctgagggccaagggccagggtctctccatgtgagtcccctactgtatctgccagagcacctgagggtgtgtttgtgccttagggtctcagcagagcccattggaaatcactgatttagcctgcaaaccttattatctggatgagggaactgctgtcctgagaggtgacatcacatgatagatcctggacccagcatgtttaatctgggggctcctcccagcagagcatggcaccccttgctctgaccatcatgctttttggcttccctcacctgactctgattcccactgagctgtgtggtggccaccactgcctcctatttggatgcagaaggtcagtttctctgcagacagaccagccctttcagggccactctcccgtgcactcgggccctgtagcacctcccacctcatccttcctagggactgaagcccaaagcctcttacaaaactgtcttctgagggccccttggctgtcctgtttgtaaaaccattcacagtcagccatgcctttcatttccttaatcttaaattgcatcaaaaagggagagattagaggtaaaacctcaataaaggactgaacaaaagcctgcccccacttcggattctcacacctagctttgcctttttcccctccctcttctctgacagactgagtgtatgaacctttttttttttttttaacttagattaaaacgctatttagaaaaggcccgcaagtttgaagtcacctctggttcatacattaaacatcaaatgtacattaactgtgaattatggtcatgaaaagtaaatcctttaatgccgttttctgtgttccactgctgaagcttagcattaa

SEQ ID NO: 460399 - DNA, 3500 bp, Homo sapiens
cgttcgtgcctctctgccccctgtccccctcttgctgcatagtagccacatccatgtctcttgtaccctgcaatctggaggccactgccagaagctggaaatctcaagtagagcagcaaaaggcttgaggatggattcttggctcctggtgcattgccactccctgccaccctcctccttgtcttctatcttctcctggtggcgtcaggccttgcttcgtgtcccaacaggagcctctggggctggcacagccctcactgcctacaacctgggcctggtggttctcctagggtgcctctgggaggtcatggtcaccccgctgctggctaactgcagctacttctgccagccagtggactacagatggagaaagcatggaatgagggtagctaaggcttctcaccagctgatatggatgttgagtcactggatgttggtgatgggctcatgtcctgtgactcaaagtatgatccttgggccagcagcatcatttgggagcttgttggaaatgcagaatctgtgctccaccccaggcacactgattaagaatcttcttttcaacgaacaagatgcccacatgctcattagattccaaggttctgggctggggcacatttggagagtccttctgtggtcactccagtagcttctccccttctttcctgtgcgaacaggcatcttcctggagacaggaagccctgcccagcatctagaagaccacctgaagctttcacactttgagaccttagatcctgcgagggtttgaatttcaaaagcttcaattaaagcacacagtaggtcataaattggtgtttgactgttgttatttccctttagttttactctcttcttcagtaaaacaggtagaattaccatatcccactctaaggggtagttgaggcccctggagaagtctggagaaaggagacctccagagttgatgccatctcttcctcctctccaggtgttctttactttatgaatgaagccagagcagcccaccttcctgcatctctaccaccatggcaccatgccctgtgatgggtgggctggagtcaaatatgtagcaggcagccagggtcagtttgtggccactgctgccccctcttcctacagtctcctcactgagtgccccttccctgttgggttcaacacatctgtgctcctgtaagccctcagcctcctcgttctcttcctcaacttctaccaccagacacatctgagaagcaagcaagagaggctgaactaggagcaggacccagggactgaaaccagcacagcatccccacagagaattgggtggaaggcagcatggcttccagcttactggtgctgagcagattgctctgggtctccattgtatcctctgaaggaaggaggaggattgccttctgtccagatctcaggatcaaacaaataggtccaatttcctgtgctcacttcagttagagcacttctcatgtgactttgtagctttgtgtgcatctccttcctctactagacctaagcccctcacgggagggactctcttattcttgatgttccccacacctggaatttcaataaacatctcaataaacgtgtgtgtttggatccttggatcccatgactgccgtcataaccttggtgaagaagagggctgggagtaggaaagaggtcaaggttcgcttgatctctaaccctatagtgggaaattgtgacggagaatattcaagagtgggtgtgggtctgtttgatttcaggtgtagctgtgtaaatagttagccctgcatatatttttgtctactcacaactgcctgcatgtgtattcatagagttgtgtgattctgtgtatgtgcctggggagtgggagagggccatgtgcacatgtctgaatacttgttttcaaatatacatgcatgtttccatttgggtttctctccatttgtgttgtttgcctgcctcttctgtaagtctctgaaagtgccacattggcaaataaaagccactgggatcaataattctcctgttctgatgggagacatggaagcccactgagaaatctccgaatacatgttccactaagagcttccaaaaataaatgggaaaaaaggagaaatggggcacacccatcttcttcacagagagggaaactgaggaccagcaaaggggaatatatgactgagatactatggcagaagcaaatattggctgagctgttcaaacccagaataggatgggtttcttgaaagcagtttgcctgggagctgtctctatgtctccagtatgatgacttttctcctttataattgcccttcggctgtttttcatctctaggtaagttcttattttgccatgcctcaatagtcaagaaaattaaagaattgctgaaggttatgcagtgctatttggggactgtgtctccatctggccttttagttaatcaacccaaggccaggcaaggctacatcctgtggacagaatactcagagaaaattccctctaaattacgcaggatgtgagcacattccacaccttttccatgcactggttgagtgcctttgggtgggcggtggggggtggtgaggtgcttattttaaggcaaactgttatatttttttaaacacaggagtaaggtttgttcatttgcttagcagccaagggaagggaaaaattagtcacttcacagtttagcattaatatttgcccagttctttgtggctgcctctgcctgataaagcagcgcaaagggaaatgatatgttccaggtcacgtctgaatggaatgagacttttgctggggagagcctttgtgaggcagtgtcccagagagagtttgggggaaattctcaatggactgaaggcccttcatttttctatcctgtactactatgtaacaactccagctctgatgtaggagtgctttgtaggtattgttcattagtgtaggttgattgtgtgaatatgataaaccaaagtggtttatatttagcaaaaataccaaaattcttaactaatattgtagacgttcatctctatgaactgtttaagataatgacaaggaagggtggtggtagacatttaagtatataacatagcagggctgggctactgctcagagaaaaggaggctcagagtactgggagggaatgttccagagacagaagtagggggcaggcccccaccccctgtctcccatgagcttccagcaactgacggtttgggctcctggctgtcacctcataaatcagagtacatctaattgagagataaaaaccacctcccagtggccttcattgtcctcttcctgctaaaaattctgtggagacctctcctcccaacccacccccatacatactccactgtccactcagctgaccacatgtccccaagagctgctgcagcctgaccagtcctcttggagccaggaatcagaagaaaagatgatttgatttcctcctttcctaccctccctttctctttttcttgcaattctccatatacatggaggaacatctttct

SEQ ID NO: 460400 - DNA, 1227 bp, Homo sapiens
tcttgctgccggggctccggtgggagtcgtgcgctggaagaataacgtctgttgagcagagcctggcgaggagggggatgctgctgttgcagcagtacatggaatttcaaatgatgaatgaaacacgcttttaattattaccagagctccatgctctgcgtttcttcaaatggaaatgttgtgctgaaatgaatttgctgttaatcggttgcctcatgcaaggtagtgtgctgggagcaaagtaggttgtggacttatctacaaagcttcctcctctcaacagactttaatcagttggatggtgctacacaggaatacgtgagaatttgtgtgagaaaggcgataggtgcagacctgtgtgactggcaggtcgggtggtaggggaggtttgagagaagcttttggctgaagtagtgttgggtgcaggtactgaagtgtgatgtctggctggatggaagagcgcaggcctctgggctgcgggaaactgctgtgcatcacagcagccatagacgctgctccgcatggtgcctgtgagccaggctgtctgtccgatgggcctgactttgagcagtcgtgggccacggctgtaccctgcttgggaccctcagaggcaccgttgttgtctttgagaacaccgcctccatggcgagagacccaagaaatcttggccaggggttgctatgaagaaagcctgggcttctgtgtgctggggctcatgggccctcgcctctggagagggcaggaaaaggtgctgacacctgtctcctcagcagcagcatctgtgttgctatctgaacgtggtttggtggcgcctctggtgggtcagcggctcatgcaccaggtgaaccggcagcagcaacactgcttctgaggaaggcctggtgcggttaccccgcgagggtcacgtgaaaaagtatgttggtaagattcctggccaggcttttaataaatggtaactacgattacagtttaaaaaggggcaaaaaattgtttcttcagacactcttaatggtaactacgattacagtttaaaaaggggcaaaaaattgtttcttcagacactctaaaatgtaaactactaaagtcctaaaataaggcattgattttagaagtttctattcttagagcatgtcccagtgttgagatacgtggtttttttgttttgttttttctggtgagtttggaatccgcccctctctgtcagggttctgacagtgtctgaatgcc

SEQ ID NO: 460401 - DNA, 719 bp, Homo sapiens
tactactactaaattcgcggccgcgtcgacagaaaaccaaggacaattgcttctgtattcagtatccacttcttaatgtggctttatatgtaaaaataataatgcagtggttgtttctgtcaggaaaataaatcttacagaacaactggtggaattgaagctgctgcgctagacttggatattttgggtagtgaagaagcaatggcaatcttgagtctattattgtataatttagtaaaagaaaaaaataatcgttggtggtcctactaagagaatgcagcttttttgagttgtcacagaggctgtgtgtgccctacactgaccagggtttgtaaaaccctttcattctggtacaagagtcgggggtataacttttatacttgaatctacctaccaagtttacatttctcaattcctttttgtaaggtgctatttctgtatttaaataactttcttttaacgtaaagctgctttctgcttatcttattgcactgctagttgtatgtaggtattaattttattgctgcttactgcttttgttttcttattatttagctctgctctttttcctaatggctatattatctatagctatttacttgtaactgtactacatgtaaactgattttttgttctgattttttttctaatatttttaggaaaatattaagctttataaaatagcaataaaaaataattcatttaaaaaaaaatggtgg

SEQ ID NO: 460402 - DNA, 4543 bp, Homo sapiens
gactacgatccaggctggagttgcgctcggccggtctgagcgctggcgctgcccggacgccgcggggtccccgccagcccagggcactcggcgcggggatctgcgcgcctcgctctcccttcccgatgccgccgcccggctgctgatcgccgcaccaccttccctcatcggcttgggtccgtggaggtccctgcagaggcaggaagcctccttaggaaagcagggatggaggtaaattgtttaacactaaaagacctgatcagccccaggcagcccagactagattttgcagttgaagatggggaaaatgcacaaaaggaaaatatatttgttgatcgatcaaggatggccccgaagactccaataaaaaatgaaccaattgatttatcgaagcaaaaaaaatttactccagaaagaaatcccattactccagttaagcttgttgacagacagcaagcggaaccatggacacccacagctaacctgaagatgctcattagtgctgccagcccagatataagggaccgggagaagaaaaagggactattccgacccattgaaaacaaggacgatgcatttacagattctctacagcttgatgttgttggggacagtgctgtggacgaatttgaaaagcaaaggccaagcagaaaacagaaaagtttaggactcctgtgccagaagtttctagctcgctatccaagttatcccttgtcaactgagaaaactaccatctccctagatgaagttgctgtcagtcttggtgtggaaaggagacgcatctatgacattgtaaatgtgctggagtcgctgcatctggtcagccgggtggctaagaatcagtatggctggcatggacggcacagcctgccaaaaaccctgaggaacctccagagactaggagaggagcagaaatatgaagagcaaatggcctacctccaacagaaagagctggacctgatagattataaatttggagaacgtaaaaaagatggtgatccagattcccaggaacaacagttactggatttctctgaacccgactgtccctcttcatctgcaaacagtagaaaagacaagtctctgagaattatgagccagaagtttgtcatgctgttcctcgtctccaaaaccaagattgtcactctggatgtggctgccaaaatactgatagaagaaagccaagatgccccagaccatagtaaatttaaaacaaaggtacgacgcctctatgacatagccaatgttctgaccagcttggctctgataaagaaagtgcatgtaacagaagagcgaggtcgtaaaccagccttcaagtggatcgggcctgtggacttcagctcaagtgatgaagaactggtggatgtttctgcatctgtcttaccagaattgaaaagagaaacatatggccagattcaagtctgtgcaaaacagaagctggctcgccatggttcttttaacacagttcaggcttctgagaggatccagaggaaagtgaactcagaaccgagcagcccgtacagagaagaacaaggatcaggtggctactctttagaaattggaagcctggcagctgtctatagacagaaaatagaagacaattcacagggaaaagcctttgccagtaagagagtggtgcctccatcaagcagcttggaccctgttgctcctttccctgtcctctctgttgacccagaatattgtgttaatcctttagcccacccagtattttctgttgctcagacggacctgcaggcattctccatgcagaacggtctgaatggacaagtggatgtctcacttgcttctgcagcctctgctgtggagagcctgaagccagcactccttgctggccagcctctagtgtatgtgccctctgcctcactgttcatgctgtatggaagtctgcaggagggaccagcgtcagggtcagggtcagagagggatgacagaagctcagaagccccagccacagtagagctgtcatctgcaccctcagctcagaagcgcctctgtgaggagaggaaacctcaggaggaggatgagccagccactaaaaggcaaagtagggaatatgaagacggcccgctgtcgcttgtcatgcccaagaaaccctcagattccacagaccttgcctctcccaagactatgggtaacagggcatctatacccctcaaagacattcatgtgaatggccaactccctgctgcagaagagatttcaggaaaggcaacagcaaactctcttgtttcttctgagtggggaaatccttcaagaaatacagatgttgaaaagccttcaaaagaaaatgaaagcaccaaagagccttctttgctacaatatctttgtgtgcagtctcctgcaggattaaatggtttcaatgtacttttatctggcagtcaaaccccccctactgtgggcccgtcctcaggtcagctgccgtctttcagtgtcccttgcatggtcttaccatctccacctctgggcccttttcctgttctctattctcctgcaatgccgggcccggtttcttctactcttggtgctctcccaaacacaggacctgtgaatttcagcttgcctggccttggatcaatagcccagcttctcgtcggccccacagctgtggttaatccaaagtcgtccacactcccttctgcagaccctcagcttcagagtcagccctcactaaacctaagtccagtgatgtcaaggtcacacagtgtcgtccaacaacctgagtcccccgtttacgtgggacatccagtctcagtagtaaaattacaacagtcaccagttccagtgacccccaagagcatccaacgcacacatcgtgagacgtttttcaagacacccggcagccttggagaccctgtcctgaagagaagagaaaggaaccagtcacgaaacaccagctcggcccagaggagactagaaatccccagcggcggcgctgactaacctgccgctttgccaggtgggggtgggatcaaacgccctgagagtcccggatgtccgaggcgggatgcaaaccatcccgtcctgagcacgggtccttcctctctctttcatccacacttctgttaacttcccaccaccatcaatcatctgatttcctgaaagtaattaattgtgcatttaataccagttagagttccgactctgcatggtgtcacagtgaaagcgccgactgacttatggttttgattcaagaatcgtcttattgctggaagtagatctgaataggctaccggagccttgtttttctaaaggggggcgctgtctagcacttaactaggggttttattttatttttattttttgacccaataaaatgttatatgaaagaatgaaaatattaatttaagagactctgggagtctgaataaagtagctttatattaactacaggataatattagccttattacccccacaagattttttaaaacttgagtcttctatagagttaggttaaaaatgtggttctaaccatcaacaattgcatggttaaatgaccctgaactaaaactgatgggttccctatcaaaacaaataaaaatatacctttttcaggtttcaatctgtgcagggtatatgcatgttaattctaccatgcttaagaacttccacaaaatatttcatggagaggtctgcatttagacggaaacagaaatggcttttcccctcactgttcctgaatgctctatacttgttttaacatttttgctatctttttttattattctgatcatgatatgaccatttaacctcagaattcataattcctgaggggtgttaagaagcagtcccattggtgaggatattatgacttggtgaccattcttaggagtagaaaaccaaggacaattgcttctgtattcagtatccacttcttaatgtggctttatatgtaaaaataataatgcagtggttgtttctgtcaggaaaataaatcttacagaacaactggtggaattgaagctgctgcgctagacttggatattttgggtagtgaagaagcaatggcaatcttgagtctattattgtataatttagtaaaagaaaaaaataatcgttggtggtcctactaagagaatgcagcttttttgagttgtcacagaggctgtgtgtgccctacactgaccagggtttgtaaaaccctttcattctggtacaagagtcgggggtataacttttatacttgaatctacctaccaagtttacatttctcaattcctttttgtaaggtgctatttctgtatttaaataactttcttttaacgtaaagctgctttctgcttatcttattgcactgctagttgtatgtaggtattaattttattgctgcttactgcttttgttttcttattatttagctctgctctttttcctaatggctatattatctatagctatttacttgtaactgtactacatgtaaactgattttttgttctgattttttttctaatatttttaggaaaatattaagctttataaaatagcaataaaaaataattcatttaaaaaaaaatggtgg

SEQ ID NO: 460403 - DNA, 5313 bp, Homo sapiens
gactacgatccaggctggagttgcgctcggccggtctgagcgctggcgctgcccggacgccgcggggtccccgccagcccagggcactcggcgcggggatctgcgcgcctcgctctcccttcccgatgccgccgcccggctgctgatcgccgcaccaccttccctcatcggcttgggtccgtggaggtccctgcagaggcaggaagcctccttaggaaagcagggatggaggtaaattgtttaacactaaaagacctgatcagccccaggcagcccagactagattttgcagttgaagatggggaaaatgcacaaaaggaaaatatatttgttgatcgatcaaggatggccccgaagactccaataaaaaatgaaccaattgatttatcgaagcaaaaaaaatttactccagaaagaaatcccattactccagttaagcttgttgacagacagcaagcggaaccatggacacccacagctaacctgaagatgctcattagtgctgccagcccagatataagggaccgggagaagaaaaagggactattccgacccattgaaaacaaggacgatgcatttacagattctctacagcttgatgttgttggggacagtgctgtggacgaatttgaaaagcaaaggccaagcagaaaacagaaaagtttaggactcctgtgccagaagtttctagctcgctatccaagttatcccttgtcaactgagaaaactaccatctccctagatgaagttgctgtcagtcttggtgtggaaaggagacgcatctatgacattgtaaatgtgctggagtcgctgcatctggtcagccgggtggctaagaatcagtatggctggcatggacggcacagcctgccaaaaaccctgaggaacctccagagactaggagaggagcagaaatatgaagagcaaatggcctacctccaacagaaagagctggacctgatagattataaatttggagaacgtaaaaaagatggtgatccagattcccaggaacaacagttactggatttctctgaacccgactgtccctcttcatctgcaaacagtagaaaagacaagtctctgagaattatgagccagaagtttgtcatgctgttcctcgtctccaaaaccaagattgtcactctggatgtggctgccaaaatactgatagaagaaagccaagatgccccagaccatagtaaatttaaaacaaaggtacgacgcctctatgacatagccaatgttctgaccagcttggctctgataaagaaagtgcatgtaacagaagagcgaggtcgtaaaccagccttcaagtggatcgggcctgtggacttcagctcaagtgatgaagaactggtggatgtttctgcatctgtcttaccagaattgaaaagagaaacatatggccagattcaagtctgtgcaaaacagaagctggctcgccatggttcttttaacacagttcaggcttctgagaggatccagaggaaagtgaactcagaaccgagcagcccgtacagagaagaacaaggatcaggtggctactctttagaaattggaagcctggcagctgtctatagacagaaaatagaagacaattcacagggaaaagcctttgccagtaagagagtggtgcctccatcaagcagcttggaccctgttgctcctttccctgtcctctctgttgacccagaatattgtgttaatcctttagcccacccagtattttctgttgctcagacggacctgcaggcattctccatgcagaacggtctgaatggacaagtggatgtctcacttgcttctgcagcctctgctgtggagagcctgaagccagcactccttgctggccagcctctagtgtatgtgccctctgcctcactgttcatgctgtatggaagtctgcaggagggaccagcgtcagggtcagggtcagagagggatgacagaagctcagaagccccagccacagtagagctgtcatctgcaccctcagctcagaagcgcctctgtgaggagaggaaacctcaggaggaggatgagccagccactaaaaggcaaagtagggaatatgaagacggcccgctgtcgcttgtcatgcccaagaaaccctcagattccacagaccttgcctctcccaagactatgggtaacagggcatctatacccctcaaagacattcatgtgaatggccaactccctgctgcagaagagatttcaggaaaggcaacagcaaactctcttgtttcttctgagtggggaaatccttcaagaaatacagatgttgaaaagccttcaaaagaaaatgaaagcaccaaagagccttctttgctacaatatctttgtgtgcagtctcctgcagtcaccagttccagtgacccccaagagcatccaacgcacacatcgtgagacgtttttcaagacacccggcagccttggagaccctgtcctgaagagaagagaaaggaaccagtcacgaaacaccagctcggcccagaggagactagaaatccccagcggcggcgctgactaacctgccgctttgccaggtgggggtgggatcaaacgccctgagagtcccggatgtccgaggcgggatgcaaaccatcccgtcctgagcacgggtccttcctctctctttcatccacacttctgttaacttcccaccaccatcaatcatctgatttcctgaaagtaattaattgtgcatttaataccagttagagttccgactctgcatggtgtcacagtgaaagcgccgactgacttatggttttgattcaagaatcgtcttattgctggaagtagatctgaataggctaccggagccttgtttttctaaaggggggcgctgtctagcacttaactagggtaagcattcttaacatgtatttccacttgccctgagtaaatctgtggtgagagaagcttcctttctgcagtttaaaaaagctactgcttccttaggcttcatcaggaagccaccttcagttgtgaatcctatggtgttatttattttgttcctgaaatgggatttagtgcaaaaagtttacaactacagtctttaacacatttttttcagggtatgacgacttgaatgtttatacttttattctataatttgccctgcacttattttacaacctagtaataatgtggataaatgtatctacatgacacatgtcaagaccaaaataactgtgaatgacacaccttgctgtaaatgaactgtgctaaccctgactgtgggcttgagaacaaagatgaactctagaactctagcagcctaactgctgcttctcaaataactgtgtgaacagtgagatattactgtttgtttctaaaaatcctactgtgcccagtttccttcactacatgccctgcattttttatttaaatatttagctgtagcgccatcagatatggatgccttctaacaattgctgtttgtaaaataaatcaggatggtagaaagtgattatatggaaaattggaacctggatgagaccttttcgttgaattctgaagagtaatgatgtgaaaattgatacagggcaagagatgattctttgtttttcttctacttcatgtccagaagagtaagagggaaaatggacatatgtttcatatccaagggtattcaaactgtagttagttggtacctctgaaaaatgagaatggtgagcgcacgggttggttgttctagcatgaatacaattctggaaactgttatgcaatttcccttttttaacccacattactttaggggtgcattaagtcgccaaactatactagttctttgtattcctagacttgctgatatttacctctctcttgtctcttcagagtaaatggttcccttctttccttcctactttccttcattctctcttccttccctccttcctacttcttttcttccttcctcttcctctcttaaaactatcttagatgtagaatcctggtgtagggttttattttatttttattttttgacccaataaaatgttatatgaaagaatgaaaatattaatttaagagactctgggagtctgaataaagtagctttatattaactacaggataatattagccttattacccccacaagattttttaaaacttgaggtaggtagctacattaaataaatttgctacttatataaaaatttttatcaacactaaacttttaaagtttacaagttttttttttcttttttacagtcttctatagagttaggttaaaaatgtggttctaaccatcaacaattgcatggttaaatgaccctgaactaaaactgatgggttccctatcaaaacaaataaaaatatacctttttcaggtttcaatctgtgcagggtatatgcatgttaattctaccatgcttaagaacttccacaaaatatttcatggagaggtctgcatttagacggaaacagaaatggcttttcccctcactgttcctgaatgctctatacttgttttaacatttttgctatctttttttattattctgatcatgatatgaccatttaacctcagaattcataattcctgaggggtgttaagaagcagtcccattggtgaggatattatgacttggtgaccattcttaggagtagaaaaccaaggacaattgcttctgtattcagtatccacttcttaatgtggctttatatgtaaaaataataatgcagtggttgtttctgtcaggaaaataaatcttacagaacaactggtggaattgaagctgctgcgctagacttggatattttgggtagtgaagaagcaatggcaatcttgagtctattattgtataatttagtaaaagaaaaaaataatcgttggtggtcctactaagagaatgcagcttttttgagttgtcacagaggctgtgtgtgccctacactgaccagggtttgtaaaaccctttcattctggtacaagagtcgggggtataacttttatacttgaatctacctaccaagtttacatttctcaattcctttttgtaaggtgctatttctgtatttaaataactttcttttaacgtaaagctgctttctgcttatcttattgcactgctagttgtatgtaggtattaattttattgctgcttactgcttttgttttcttattatttagctctgctctttttcctaatggctatattatctatagctatttacttgtaactgtactacatgtaaactgattttttgttctgattttttttctaatatttttaggaaaatattaagctttataaaatagcaataaaaaataattcatttaaaaaaaaatggtgg

SEQ ID NO: 460404 - DNA, 1390 bp, Homo sapiens
gactacgatccaggctggagttgcgctcggccggtctgagcgctggcgctgcccggacgccgcggggtccccgccagcccagggcactcggcgcggggatctgcgcgcctcgctctcccttcccgatgccgccgcccggctgctgatcgccgcaccaccttccctcatcggcttgggtccgtggaggtccctgcagaggcaggaagcctccttaggaaagcagggatggaggtaaattgtttaacactaaaagacctgatcagccccaggcagcccagactagattttgcagttgaagatggggaaaatgcacaaaaggaaaatatatttgttgatcgatcaaggatggccccgaagactccaataaaaaatgaaccaattgatttatcgaagcaaaaaaaatttactccagaaagaaatcccattactccagttaagcttgttgacagacagcaagcggaaccatggacacccacagctaacctgaagatgctcattagtgctgccagcccagatataagggaccgggagaagaaaaagggactattccgacccattgaaaacaaggacgatgcatttacagattctctacagcttgatgttgttggggacagtgctgtggacgaatttgaaaagcaaaggccaagcagaaaacagaaaagtttaggactcctgtgccagaagtttctagctcgctatccaagttatcccttgtcaactgagaaaactaccatctccctagatgaagttgctgtcagtcttggtgtggaaaggagacgcatctatgacattgtaaatgtgctggagtcgctgcatctggtcagccgggtggctaagaatcagtatggctggcatggacggcacagcctgccaaaaaccctgaggaacctccagagactaggagaggagcagaaatatgaagagcaaatggcctacctccaacagaaagagctggacctgatagattataaatttggagaacgtaaaaaagatggtgatccagattcccaggaacaacagttactggatttctctgaacccgactgtccctcttgtgagtccattgtaacttcatgagtaatggcagagaaagagcaagtgatggtctcttctgcagattcactgctcagatgggaagtgccaggttgacaaccctggagggagatgttctcttattctcctcactgaagaaagagaagcagatggctccccaactggactgcccacttgacctcattgaaataaacctggctcatggcagttcactcgagtttggcctgttgggagaatagatcactagcattactcccatttttagattggcagccccatgctggttctttttgtgcaactgtaagatttactttgaaaaagttatattttcaaagaa

SEQ ID NO: 460405 - DNA, 542 bp, Homo sapiens
atggattctattataggaagtataagtgtaaagcattgagtggtttaaaatatgcatctcagagtttatgcctactgtagagtaattttacaagccacaagaaaatctgcctcatttcttcctgagctgacttctgtgatgtgtatccagtaagcttctgccaatgacaagggtgatctttccatctgctgatagggctagatcattttggcaagctgcaagtatagtctttcttgtagaaaatcatatactttgatgcttttgtttcattccttgtgtagcatctgcaaacagtagaaaagacaagtctctgagaattatgagccagaagtttgtcatgctgttcctcgtctccaaaaccaagattgtcactctggatgtggctgccaaaatactgatagaagaaagccaagatgccccagaccatagtaaatttaaaagtaagaatcttcacctccatcaacttactagcacataaagggtgggatttcatgtgttgatattttctgcttccaagattaaaaatatatatattgtttttg

SEQ ID NO: 460406 - DNA, 5738 bp, Homo sapiens
gactacgatccaggctggagttgcgctcggccggtctgagcgctggcgctgcccggacgccgcggggtccccgccagcccagggcactcggcgcggggatctgcgcgcctcgctctcccttcccgatgccgccgcccggctgctgatcgccgcaccaccttccctcatcggcttgggtccgtggaggtccctgcagaggcaggaagcctccttaggaaagcagggatggaggtaaattgtttaacactaaaagacctgatcagccccaggcagcccagactagattttgcagttgaagatggggaaaatgcacaaaaggaaaatatatttgttgatcgatcaaggatggccccgaagactccaataaaaaatgaaccaattgatttatcgaagcaaaaaaaatttactccagaaagaaatcccattactccagttaagcttgttgacagacagcaagcggaaccatggacacccacagctaacctgaagatgctcattagtgctgccagcccagatataagggaccgggagaagaaaaagggactattccgacccattgaaaacaaggacgatgcatttacagattctctacagcttgatgttgttggggacagtgctgtggacgaatttgaaaagcaaaggccaagcagaaaacagaaaagtttaggactcctgtgccagaagtttctagctcgctatccaagttatcccttgtcaactgagaaaactaccatctccctagatgaagttgctgtcagtcttggtgtggaaaggagacgcatctatgacattgtaaatgtgctggagtcgctgcatctggtcagccgggtggctaagaatcagtatggctggcatggacggcacagcctgccaaaaaccctgaggaacctccagagactaggagaggagcagaaatatgaagagcaaatggcctacctccaacagaaagagctggacctgatagattataaatttggagaacgtaaaaaagatggtgatccagattcccaggaacaacagttactggatttctctgaacccgactgtccctcttcatctgcaaacagtagaaaagacaagtctctgagaattatgagccagaagtttgtcatgctgttcctcgtctccaaaaccaagattgtcactctggatgtggctgccaaaatactgatagaagaaagccaagatgccccagaccatagtaaatttaaaacaaaggtacgacgcctctatgacatagccaatgttctgaccagcttggctctgataaagaaagtgcatgtaacagaagagcgaggtcgtaaaccagccttcaagtggatcgggcctgtggacttcagctcaagtgatgaagaactggtggatgtttctgcatctgtcttaccagaattgaaaagagaaacatatggccagattcaagtctgtgcaaaacagaagctggctcgccatggttcttttaacacagttcaggcttctgagaggatccagaggaaagtgaactcagaaccgagcagcccgtacagagaagaacaaggatcaggtggctactctttagaaattggaagcctggcagctgtctatagacagaaaatagaagacaattcacagggaaaagcctttgccagtaagagagtggtgcctccatcaagcagcttggaccctgttgctcctttccctgtcctctctgttgacccagaatattgtgttaatcctttagcccacccagtattttctgttgctcagacggacctgcaggcattctccatgcagaacggtctgaatggacaagtggatgtctcacttgcttctgcagcctctgctgtggagagcctgaagccagcactccttgctggccagcctctagtgtatgtgccctctgcctcactgttcatgctgtatggaagtctgcaggagggaccagcgtcagggtcagggtcagagagggatgacagaagctcagaagccccagccacagtagagctgtcatctgcaccctcagctcagaagcgcctctgtgaggagaggaaacctcaggaggaggatgagccagccactaaaaggcaaagtagggaatatgaagacggcccgctgtcgcttgtcatgcccaagaaaccctcagattccacagaccttgcctctcccaagactatgggtaacagggcatctatacccctcaaagacattcatgtgaatggccaactccctgctgcagaagagatttcaggaaaggcaacagcaaactctcttgtttcttctgagtggggaaatccttcaagaaatacagatgttgaaaagccttcaaaagaaaatgaaagcaccaaagagccttctttgctacaatatctttgtgtgcagtctcctgcaggattaaatggtttcaatgtacttttatctggcagtcaaaccccccctactgtgggcccgtcctcaggtcagctgccgtctttcagtgtcccttgcatggtcttaccatctccacctctgggcccttttcctgttctctattctcctgcaatgccgggcccggtttcttctactcttggtgctctcccaaacacaggacctgtgaatttcagcttgcctggccttggatcaatagcccagcttctcgtcggccccacagctgtggttaatccaaagtcgtccacactcccttctgcagaccctcagcttcagagtcagccctcactaaacctaagtccagtgatgtcaaggtcacacagtgtcgtccaacaacctgagtcccccgtttacgtgggacatccagtctcagtagtaaaattacaacagtcaccagttccagtgacccccaagagcatccaacgcacacatcgtgagacgtttttcaagacacccggcagccttggagaccctgtcctgaagagaagagaaaggaaccagtcacgaaacaccagctcggcccagaggagactagaaatccccagcggcggcgctgactaacctgccgctttgccaggtgggggtgggatcaaacgccctgagagtcccggatgtccgaggcgggatgcaaaccatcccgtcctgagcacgggtccttcctctctctttcatccacacttctgttaacttcccaccaccatcaatcatctgatttcctgaaagtaattaattgtgcatttaataccagttagagttccgactctgcatggtgtcacagtgaaagcgccgactgacttatggttttgattcaagaatcgtcttattgctggaagtagatctgaataggctaccggagccttgtttttctaaaggggggcgctgtctagcacttaactagggtaagcattcttaacatgtatttccacttgccctgagtaaatctgtggtgagagaagcttcctttctgcagtttaaaaaagctactgcttccttaggcttcatcaggaagccaccttcagttgtgaatcctatggtgttatttattttgttcctgaaatgggatttagtgcaaaaagtttacaactacagtctttaacacatttttttcagggtatgacgacttgaatgtttatacttttattctataatttgccctgcacttattttacaacctagtaataatgtggataaatgtatctacatgacacatgtcaagaccaaaataactgtgaatgacacaccttgctgtaaatgaactgtgctaaccctgactgtgggcttgagaacaaagatgaactctagaactctagcagcctaactgctgcttctcaaataactgtgtgaacagtgagatattactgtttgtttctaaaaatcctactgtgcccagtttccttcactacatgccctgcattttttatttaaatatttagctgtagcgccatcagatatggatgccttctaacaattgctgtttgtaaaataaatcaggatggtagaaagtgattatatggaaaattggaacctggatgagaccttttcgttgaattctgaagagtaatgatgtgaaaattgatacagggcaagagatgattctttgtttttcttctacttcatgtccagaagagtaagagggaaaatggacatatgtttcatatccaagggtattcaaactgtagttagttggtacctctgaaaaatgagaatggtgagcgcacgggttggttgttctagcatgaatacaattctggaaactgttatgcaatttcccttttttaacccacattactttaggggtgcattaagtcgccaaactatactagttctttgtattcctagacttgctgatatttacctctctcttgtctcttcagagtaaatggttcccttctttccttcctactttccttcattctctcttccttccctccttcctacttcttttcttccttcctcttcctctcttaaaactatcttagatgtagaatcctggtgtagggttttattttatttttattttttgacccaataaaatgttatatgaaagaatgaaaatattaatttaagagactctgggagtctgaataaagtagctttatattaactacaggataatattagccttattacccccacaagattttttaaaacttgaggtaggtagctacattaaataaatttgctacttatataaaaatttttatcaacactaaacttttaaagtttacaagttttttttttcttttttacagtcttctatagagttaggttaaaaatgtggttctaaccatcaacaattgcatggttaaatgaccctgaactaaaactgatgggttccctatcaaaacaaataaaaatatacctttttcaggtttcaatctgtgcagggtatatgcatgttaattctaccatgcttaagaacttccacaaaatatttcatggagaggtctgcatttagacggaaacagaaatggcttttcccctcactgttcctgaatgctctatacttgttttaacatttttgctatctttttttattattctgatcatgatatgaccatttaacctcagaattcataattcctgaggggtgttaagaagcagtcccattggtgaggatattatgacttggtgaccattcttaggagtagaaaaccaaggacaattgcttctgtattcagtatccacttcttaatgtggctttatatgtaaaaataataatgcagtggttgtttctgtcaggaaaataaatcttacagaacaactggtggaattgaagctgctgcgctagacttggatattttgggtagtgaagaagcaatggcaatcttgagtctattattgtataatttagtaaaagaaaaaaataatcgttggtggtcctactaagagaatgcagcttttttgagttgtcacagaggctgtgtgtgccctacactgaccagggtttgtaaaaccctttcattctggtacaagagtcgggggtataacttttatacttgaatctacctaccaagtttacatttctcaattcctttttgtaaggtgctatttctgtatttaaataactttcttttaacgtaaagctgctttctgcttatcttattgcactgctagttgtatgtaggtattaattttattgctgcttactgcttttgttttcttattatttagctctgctctttttcctaatggctatattatctatagctatttacttgtaactgtactacatgtaaactgattttttgttctgattttttttctaatatttttaggaaaatattaagctttataaaatagcaataaaaaataattcatttaaaaaaaaatggtgg

SEQ ID NO: 460407 - DNA, 896 bp, Homo sapiens
ttcctgctcaccggtgggctccgggcacgcccggcagggtcctgggggcgcaggcaaggggacgtaggcagagtgctccggccagcatggagggactggtcttccttaacgccctggccactcggttgctgttcctgctgcactcgctggtcggggtctggcgagtgaccgaggtgaagaaggagccgcggtactggctgcttgcgctgctcaacctcttgctcttcctggagactgcgctcaccctcaagttcaagcgcggcagaggctacaaatggttttcaccagccatatttttatatctgattagcatcgttccatcattatggcttcttgaattgcaccatgagacccagtattgcagtatccaggctgaaggaacatcacagaataccagcagaaaagaagacttcaatcaaacattgacatccaatgaacaaaccagtagagctgatgatctcattgagacggccaaagtttttgtgaataacttatctacagtatgtgagaaagtttggacattgggactccatcagacattcctgttaatgctaataattggaagatggcttctacccattggaggcgggatcactcgagatcaactctctcaacttcttcttatgtttgtggggacagcggctgacatactggaattcacaagtgagaccctagaagaacaaaatgtgaggctctgttggaaaaattccactaatagaagacatactaaccccaagtggcaacttgttctattttgagggtactggttttctatccacgttctatgccatatgtgcatgtgagaagccttccatcaatgtccaccaagtcatgataaaatgtgaagtagaaaagaatcaaaagcacagccttcaacaacccattggagagtcccc

SEQ ID NO: 460408 - DNA, 2356 bp, Homo sapiens
agtggttcagtcttaacgtctgtgtgcaataactacacgccacgtgtgatgagaaaactgaggcacagagttattaagtcatcccttttgggaccagttagttgtcagttgagagagaagagtgaagactccaggctcccaatcttactcactccagcagttcagaggagaaaggatatgctgcagaatattgggtcgggaacagggaacttgacagcatttgagctgtcacaggaagaatgggtgagagctgcatccggagagaggaaagtagaaactgtaaatcaaccagagccttatcgaatcactaaatgtttgtggcgagctcatcacatgccagatactctggaaggagcagagaaactggaagaagaacactgttatatgaacacagttggaagaatggcaagcaagagagagcaagaggtgggcagggccctgagtgggcagcatcttgtagtctaagaataatggcagtgtaaaatttgcttgctggcttatggattattgaatagtatgttaagtactcagaataaaaataataattttacagttattctctttctttacatttaggtaatcgataaacattattacatttttatgtttagctataatagagttttaaagcaaaaaaacaaagagaagatttgtacaatgctaaaaatatttcaagattagtacattcagatttaaaaatctattaaagaaaaatataggaagtttttgtgatattaatatggattttataaaactttgctatgtgttatttttcattacacagtataataaaatgagacattaaaacattgtaaaattggttctttaaatactatatggtacaatcccactcgtaagtttaaggctcaaattacttgctagttataggcacccccatcttaaggaccatattagctttttatttttttcagagtgttcagctgaaaggcattttactttctttagtaagtaaagaataactcctgaaaattactctctacaaaagcaaactcttgattgaaagcacagtgaggaaaatatttctctctcaggtggtggctgataatcctgtctgtatgacatttctgttaaacaggccaaagtttttgtgaataacttatctacagtatgtgagaaagtttggacattgggactccatcagacattcctgttaatgctaataattggaagatggcttctacccattggaggcgggatcactcgagatcaactctctcaacttcttcttatgtttgtggggacagcggctgacatactggaattcacaagtgagaccctagaagaacaaaatgtgaggctctgttggaaaaattccactaatagaagacatactaaccccaagtggcaacttgttctattttgaggtaatattattagaaactactttcctctattgtgatgaaatttgaattctcacaggtgcaactgaaatcctttgagcctgaattggccatctcaagtcaaaagaaatgtttcattccttttccacattatagtccttaaacatatgaaataaaacttctaaggaattatctctagtttttagtttcttgaactgtctcacatagatcatgactctgaatgctttagcactctagttctccccctttggtacaagaaactttataaatgtttctcctaatatatgaagcatcacacataatatttcagctcttttgaaatgtcttttcaattcgatccctggtttcttagaataattattaatcctcccactgacattccttgaaatcagccatttgaatatccatgttaatatctatattttctcccctatcatttttctcccataatgtttccataattttgtaaaactaaagacagcaatatgggaccaagaggctttgtcataattcatgcatatgttgggctttaagtctcagattatttatttttcacttcttcattattccattattatcatgtaaggatttttttcattgatttattaaatcaccaagatattttggccacaagaggtttattaggaatatactaaaaaacttgactgagaagacttttctgcatgtgatcatactttttattacaaatttaacattttgtctgtattctaggaatagtcctgcactagtctatgccatccttgttatatggacttggagcatgctgcagtttccacttgacctggcaggaaaggctaccattgatataaccttggtttctcttttgtctttcactctgccgatcctcaccctcccatatcttgtggtttattgccttgctaagaaaatttgtatttaagaaagacattttgtaaactttcaggggtgataatgttatgcagctgtttgaaaaa

SEQ ID NO: 460409 - DNA, 873 bp, Homo sapiens
ttcctgctcaccggtgggctccgggcacgcccggcagggtcctgggggcgcaggcaaggggacgtaggcagagtgctccggccagcatggagggactggtcttccttaacgccctggccactcggttgctgttcctgctgcactcgctggtcggggtctggcgagtgaccgaggtgaagaaggagccgcggtactggctgcttgcgctgctcaacctcttgctcttcctggagactgcgctcaccctcaagttcaagcgcggcagaggctacaaatggttttcaccagccatatttttatatctgattagcatcgttccatcattatggcttcttgaattgcaccatgagacccagtattgcagtatccaggctgaaggaacatcacagaataccagcagaaaagaagacttcaatcaaacattgacatccaatgaacaaaccagtagagctgatgatctcattgagacggccaaagtttttgtgaataacttatctacagtatgtgagaaagtttggacattgggactccatcagacattcctgttaatgctaataattggaagatggcttctacccattggaggcgggatcactcgagatcaactctctcaacttcttcttatgtttgtggggacagcggctgacatactggaattcacaagtgagaccctagaagaacaaaatgtgaggaatagtcctgcactagtctatgccatccttgttatatggacttggagcatgctgcagtttccacttgacctggcagacccatgtattagaacttcagaagacataggagcagttaaaattgtcctcattggaggtccttggaatcctactggtcttactttaataaaaacataaaccccta

SEQ ID NO: 460410 - DNA, 810 bp, Homo sapiens
gcagcccctccagtccctgacagacagcagccctgcccctgggatggccaccagctccagggagcacagcttgcattctaactggatcctgcgggcaccgcgcagacactccgaggatatcgctgcccacactgtgcatactgtagacggccagtttcgaaggagcaccgagcacaggaccgtgggcactcagaggagactcgagaggcaccccatttatttgcccaaggctgtggaaggggccttcaacacctggaaatttaagcccaaagcctgcaaaaaagacctggggagctccagacagatccttttcaacttctcaggagaagatatggagtgggatgcagagctctttgcgttggagccccagttgtctcctggggaggactactatgagacagagaaccccaaaggacagtggctgcttcgagaaagactttgggagcggacggtgccctgactccatctggattccttgacgtgtctcagactgggtccctgagaagctgtccgctttcagcgcagcatgaggtatttggtagagttgaaaatgccaattgtaacacagtcaacccactcagcacactgcctgctggtgccgtgccagtgccaaacagacctgtggcttcccaggggacaggtctcaggacactctcagagcttgagtttctctgcgtgggctgatgaccagggacttacagcctggctggtcttcaagagctgaaggaatggaaggtcttgagtggagtgtctgggctcactcccctgacctcacctggcctggtcctcattctccacgtgtctgtccag

SEQ ID NO: 460411 - DNA, 5913 bp, Homo sapiens
gattttcttcatggaagcgatgtccccccagcaggagactctagggggacagccggggcgctcctcttccctgacaggagtgtctcggctcgcgggaggcagctgcaccaagaagaaaatgaaaacactagcagaaaggaggaggagcgctccatctcttatcctggataaagccctacaaaaacggcctactaccagggacagtccttctgctagtgttgacacatgcacatttctgtcatcattagtgtgctccaataggactctgctgattgatggccgggcagaactcaaaagaggcctccagaggcaggagcggcatcttttcctattcaatgatctgtttgttgtggccaaaatcaaatataacaataactttaagataaaaaataaaattaaattaactgatatgtggacagcaagctgtgtggatgaagtgggagaaggcaacaccaatgccatgaaatcctttgttttgggctggcccacagtgaactttgtggccactttcagttctccagaacaaaaggacaaatggctctctctccttcagagatacatcaatctagagaaagaaaaggactacccgaagagcattcccctcaaaatcttcgccaaggacattgggaattgtgcctactctaaaactataacagtaatgaattcagatacagcgaatgaagttatcaacatgtcattaccaatgctagggataactggctctgagagagattaccagttgtgggtcaattctggcaaagaagaggctccatacccactcattgggcatgaatatccatatggaattaaaatgagccatcttcgagactctgcactcctgacaccgggatcaaaggactctaccacccctttcaacctccaggagcccttccttatggaacagctcccccgagagatgcagtgccagttcatcctgaagcccagccgcctggctgcagcccagcaactgagtgattcaggtcataagacatttaaaaggagaagatctatcataaactgggccttctggcgaggttctagcactcacctggacaacttgccctcatcgccaacatcacctatgccaggacagctctttggaatttctctgccaaatatttgtgagaatgacaatctgcccaaacctgtcttggatatgcttttctttcttaatcaaaaaggacctctcaccaaaggtatcttcaggcaatcagccaatgtgaaatcctgcagagaactaaaagagaaattgaattctggagtcgaagtacacctagactgtgaatctatttttgtgatagcatctgtcttaaaggattttctgcgaaatattccaggaagtattttttcatcagatctctatgatcactgggtctctgtaatggatcaaggaaatgatgaagagaaaataaatactgttcaaaggctattagaccagcttccgagagccaatgttgttctcctaaggtatctttttggggtgttacacaacattgagcaacattcctcatccaatcagatgactgcatttaatttagctgtgtgtgtcgctccaagtattctttggcctcctgcttcctccagcccagaactagaaaacgaatttacaaaaaaggtttccctgcttatacaatttctgattgagaattgccttaggatatttggagaagaaatcacttccctcttcagagaggtttcagtgagatgtgacactagagagaatgcctcagatatttcttgctttcaactgaatgactcctcctatgacagcttggaaaatgagctaaatgaggatgttgatgcaccatgcagtgacttggtaaagaaacttggccaggggagcagaagcatggactctgtcttaaccctcagtgactatgatcttgaccagcccgaggtggaaggccttttaaccctaagcgactttgacttggcccattctaaagatgaagatgttcaaatgaaacggcctcttgaatccaagccggtgaacattttagtgtacacaaagatcccactgcgggatcatgccagggccccatctgccatgtgcacacccagctacctgtccacagctgcagcaaatgctgcaaaaagcctgaggcgacaccggcgttgctcagagcccagcatcgactatctggattcaaagctttcctacctcagggagttttatcagaaaaagctacgcaagtccagctgtgatgcaattctttctcaaaaagatgaagactatctgaagcagaatcaacccctccaggaggaaggaaagacatgttttaaacagagtttagtcacaggcactgatgtcagcaagaaaaatgccactactcaaaacactaagaagaaaagcttgtctggtagtgaaggaaatcacgtgaaacttttccctaagtctaagccagtggccatttctgtggcatcttatagtcctatgtcctcacaggatcattccaagaaccagccctttgatgtgaatacatctggatactccccaccacacacagcagatgccctcaagggtccaaggacacatcggcgctgctcagagcccaacatagaagaccagaaccgcaagctgacctatctcaggggaatttattcaaagaaacaacataaaaccagctgtgaagctggtctcttgcatggagaggaggattatctcaaacggcataagtctttgcaaatggaggggcagaagctcattaatcagagtttagtcatggggattgaggtgggcaagagtagtgccacaaaccaaaacactgagaaggttttacccccaagattaaacctttgcccaaggaccagctattccagcttatcctccccaggcacttccccatccggctcatcagtaagctcccaagacagtgctttttctcagatttctgaacactctgtgtttacacccactgagacttcctctccaatagattgcacttttcaggctcagagaaaacgggaagacctttctcctgactttagcaatgccagccatgtttccggaatgcccggtccctcatcagggcaggcttgcagccgcccagcctatacaaagaaggacaccatggagtggcattcacaaatgcattctgtaactcttcatcccagcacatggttgagaaatggtgtggccagtttgaaaaactggtccctcaaaaagaaagcaaaggcagccagaccagaggaagagaaaatagcttctccaaaaggacccttagagccacccccacatgcttctggtgttccagaagccaactcactgcaagaggaacaaaaagacttgcccttaagggcagctgaaggactgtcccctgtgcagtcagcccaaaggtgtagttcttctcccttccaggactcagagagacactgtagctctccattcagcctggtggagagcagacttaagctgtgcatgaagtcacatgaggaaatagagcctggtagtcagagctcttctggttctctgccttgggaaagagcctcagccagctcttggactctagaggatgcgaccagcccagactcagggcctacagtggtctgcgacattgaggacaggtatttaaccaaagacatttaagcatagtaagaatctgatgtccacaagaacaggaactgggttaataataatagacaataattattatgacccctttgtataagatacctgggagaggtagcataaggattatcattgctaatacttaggacaacgaaataattctctttattgagactacttgacaaatactttatgctaaaaattttgtcacctaagtgtttgggaggctttttcttattaaaggttgggattggtcctgtcatgtggttttagagatactaacagagggctagagaaagcatcttctgcagaggaagcacttatgggaacagtctgtgagattgatgtcctgagaagaccaagatatcaggaatgaggaataggggcctgaggagagaggggaagggtacagagaaaccatctacattccatggaatgtttttaataagtaggcaagaaaaatgccactaatcaaagcattaagtgtgtccagtaatgaagaacatcatataaaatctttccctaaatctaagccagtggccatttttgtgggatcttactaatcacgtgtccttacagaatcattccaagaaccagcccattgctacagctagagtggagaaaaacagagtgactcaaaagccatgggtaccatgatatcagttttgttggttgtatttgtcggtttgttttttcattcatgttgaagtgctttgcaaggcttcaggaaacagagttgtgaggagaaagaagaaaatggctgcccatttcagtaccctttcaaaggtatctctgcctaggaacattcttcagaaatgcaacttcttctatttagaaggtgacctcctgacagcgttcactctcaatatggaggaaaagaccacaacaactgtcctttctcaattacacaaatgctgttaaaatgtgatcaaaccatggcatcactttgctgaaatgtttctgcacagtcctgcctcttagattacagtcagccagaaaaacatacttataaatcatcccttttctgatttttgtagtttggcaattgagagagcaatattgaggttggccggttataaggagtcccacaatagaatacccaacaaagtggctgccaggccttctcagacagccatttgctttgggttttgcttccagacgttgttccatatttttgccccaaatgtttcatggcttataccccattggtttattttatatccatggacctttctttctctgctttcttgacttaaaggttgcagcagtacatctcgtcacctaggaatagattatcaggccttgccaactagtatgcagggatggcactaaaaatggatgtgcatcttctttcacattaactactaacctataagaagttgctctgagcccatttatttaaactctttagttcaccatcagatggacctttctctcacaagctagcttattccaaattatttgtcttattaatcaccagaaaatggtcatatcaaatgttctttcttttttgttctaaaggttgcattttcagttataggggaaaaaatattttctctaagatagaagaagttatttcagtattagctataggtgctacctacctcttggggacatggccctgtttgcgctaaccattacaatgatcttttagaactctgtatccaaagagctacttcgtgacactggccatctgagtcacagatgtgaagtcgatttcactttataactaaccagtcctacatattaagacttctaagtgtccatatgcctcttttttggtataatatataaagtcagcagggactcccctttcccttagggcatactactgtcagtcagaactgcaagatgtgaatgaagctcttaacggcttggagtgtctttctggaagaaattgcctttttttttttttcatgttagcaggtaaaaaatcattcacccaatttgaagcatagaagaaaatagttgctgaggttttttaataaccattcctactatctgtgttcccttagatactcctgtaattcttaatgtgaatagtttgttaatattgctgtaaagtattatattgtatgatttgaagacagactatatgtcattttattatactccatcaatctataatatattagactgatgctttatctaaaatgctttgagtttgtataatatatcttgacaaattttactaccatatgttatgtaataaatgtgtatttttgtacttgcagaaactgctgctaacttttaaagttgtttggttttcaaggcactgataatggatatgtatgaagtccatgctgtctgttaaataaaatgccattctgcagaattaaccatcc

SEQ ID NO: 460412 - DNA, 5352 bp, Homo sapiens
  misc_feature (4)..(4): n is a, c, g, or t
  misc_feature (7)..(10): n is a, c, g, or t
  misc_feature (12)..(13): n is a, c, g, or t
catncannnntnnagagatagagagttctaaaatgttttctgcccccacattcttggaaatgctctacatttttggaaacacctacagtcaaaatgagctttaagcagagcttttgaccttagcagtatcttctgcagacctgtgtcaggctctcacctcccaaaggattggaatgcaccagagctaggggtcgagacaaggccccagcctgtatctcaggctgaaacgtgaaaaccaagttaaggaaaatatggtgaagaagattcttgcatacccctactccagctgagtgcccaggattttctgcgaaatattccaggaagtattttttcatcagatctctatgatcactgggtctctgtaatggatcaaggaaatgatgaagagaaaataaatactgttcaaaggctattagaccagcttccgagagccaatgttgttctcctaaggtatctttttggggtgttacacaacattgagcaacattcctcatccaatcagatgactgcatttaatttagctgtgtgtgtcgctccaagtattctttggcctcctgcttcctccagcccagaactagaaaacgaatttacaaaaaaggtttccctgcttatacaatttctgattgagaattgccttaggatatttggagaagaaatcacttccctcttcagagaggtttcagtgagatgtgacactagagagaatgcctcagatatttcttgctttcaactgaatgactcctcctatgacagcttggaaaatgagctaaatgaggatgttgatgcaccatgcagtgacttggtaaagaaacttggccaggggagcagaagcatggactctgtcttaaccctcagtgactatgatcttgaccagcccgaggtggaaggccttttaaccctaagcgactttgacttggcccattctaaagatgaagatgttcaaatgaaacggcctcttgaatccaagccggtgaacattttagtgtacacaaagatcccactgcgggatcatgccagggccccatctgccatgtgcacacccagctacctgtccacagctgcagcaaatgctgcaaaaagcctgaggcgacaccggcgttgctcagagcccagcatcgactatctggattcaaagctttcctacctcagggagttttatcagaaaaagctacgcaagtccagctgtgatgcaattctttctcaaaaagatgaagactatctgaagcagaatcaacccctccaggaggaaggaaagacatgttttaaacagagtttagtcacaggcactgatgtcagcaagaaaaatgccactactcaaaacactaagaagaaaagcttgtctggtagtgaaggaaatcacgtgaaacttttccctaagtctaagccagtggccatttctgtggcatcttatagtcctatgtcctcacaggatcattccaagaaccagccctttgatgtgaatacatctggatactccccaccacacacagcagatgccctcaagggtccaaggacacatcggcgctgctcagagcccaacatagaagaccagaaccgcaagctgacctatctcaggggaatttattcaaagaaacaacataaaaccagctgtgaagctggtctcttgcatggagaggaggattatctcaaacggcataagtctttgcaaatggaggggcagaagctcattaatcagagtttagtcatggggattgaggtgggcaagagtagtgccacaaaccaaaacactgagaaggttttacccccaagattaaacctttgcccaaggaccagctattccagcttatcctccccaggcacttccccatccggctcatcagtaagctcccaagacagtgctttttctcagatttctgaacactctgtgtttacacccactgagacttcctctccaatagattgcacttttcaggctcagagaaaacgggaagacctttctcctgactttagcaatgccagccatgtttccggaatgcccggtccctcatcagggcaggcttgcagccgcccagcctatacaaagaaggacaccatggagtggcattcacaaatgcattctgtaactcttcatcccagcacatggttgagaaatggtgtggccagtttgaaaaactggtccctcaaaaagaaagcaaaggcagccagaccagaggaagagaaaatagcttctccaaaaggacccttagagccacccccacatgcttctggtgttccagaagccaactcactgcaagaggaacaaaaagacttgcccttaagggcagctgaaggactgtcccctgtgcagtcagcccaaaggtgtagttcttctcccttccaggactcagagagacactgtagctctccattcagcctggtggagagcagacttaagctgtgcatgaagtcacatgaggaaatagagcctggtagtcagagctcttctggttctctgccttgggaaagagcctcagccagctcttggactctagaggatgcgaccagcccagactcagggcctacagtggtctgcgacattgaggacaggtatttaaccaaagacatttaagcatagtaagaatctgatgtccacaagaacaggaactgggttaataataatagacaataattattatgacccctttgtataagatacctgggagaggtagcataaggattatcattgctaatacttaggacaacgaaataattctctttattgagactacttgacaaatactttatgctaaaaattttgtcacctaagtgtttgggaggctttttcttattaaaggttgggattggtcctgtcatgtggttttagagatactaacagagggctagagaaagcatcttctgcagaggaagcacttatgggaacagtctgtgagattgatgtcctgagaagaccaagatatcaggaatgaggaataggggcctgaggagagaggggaagggtacagagaaaccatctacattccatggaatgtttttaataagtaggcaagaaaaatgccactaatcaaagcattaagtgtgtccagtaatgaagaacatcatataaaatctttccctaaatctaagccagtggccatttttgtgggatcttactaatcacgtgtccttacagaatcattccaagaaccagcccattgctacagctagagtggagaaaaacagagtgactcaaaagccatgggtaccatgatatcagttttgttggttgtatttgtcggtttgttttttcattcatgttgaagtgctttgcaaggcttcaggaaacagagttgtgaggagaaagaagaaaatggctgcccatttcagtaccctttcaaaggtatctctgcctaggaacattcttcagaaatgcaacttcttctatttagaaggtgacctcctgacagcgttcactctcaatatggaggaaaagaccacaacaactgtcctttctcaattacacaaatgctgttaaaatgtgatcaaaccatggcatcactttgctgaaatgtttctgcacagtcctgcctcttagattacagtcagccagaaaaacatacttataaatcatcccttttctgatttttgtagtttggcaattgagagagcaatattgaggttggccggttataaggagtcccacaatagaatacccaacaaagtggctgccaggccttctcagacagccatttgctttgggttttgcttccagacgttgttccatatttttgccccaaatgtttcatggcttataccccattggtttattttatatccatggacctttctttctctgctttcttgacttaaaggttgcagcagtacatctcgtcacctaggaatagattatcaggccttgccaactagtatgcagggatggcactaaaaatggatgtgcatcttctttcacattaactactaacctataagaagttgctctgagcccatttatttaaactctttagttcaccatcagatggacctttctctcacaagctagcttattccaaattatttgtcttattaatcaccagaaaatggtcatatcaaatgttctttcttttttgttctaaaggttgcattttcagttataggggaaaaaatattttctctaagatagaagaagttatttcagtattagctataggtgctacctacctcttggggacatggccctgtttgcgctaaccattacaatgatcttttagaactctgtatccaaagagctacttcgtgacactggccatctgagtcacagatgtgaagtcgatttcactttataactaaccagtcctacatattaagacttctaagtgtccatatgcctcttttttggtataatatataaagtcagcagggactcccctttcccttagggcatactactgtcagtcagaactgcaagatgtgaatgaagctcttaacggcttggagtgtctttctggaagaaattgcctttttttttttttcatgttagcaggtaaaaaatcattcacccaatttgaagcatagaagaaaatagttgctgaggttttttaataaccattcctactatctgtgttcccttagatactcctgtaattcttaatgtgaatagtttgttaatattgctgtaaagtattatattgtatgatttgaagacagactatatgtcattttattatactccatcaatctataatatattagactgatgctttatctaaaatgctttgagtttgtataatatatcttgacaaattttactaccatatgttatgtaataaatgtgtatttttgtacttgcagaaactgctgctaacttttaaagttgtttggttttcaaggcactgataatggatatgtatgaagtccatgctgtctgttaaataaaatgccattctgcagaattaaccatcccaccagagcaatattgccctttgtagaattgttctagttaatgatcccaatctctgcctaacattggaaatttcatagagtataatctaacattggaaatttcatagagtataattaatgttgaatttgaaccttgagcttttagtcagaacctgtggtcagtctgtctttttaggaaaagtggttttttaaaatactttttttctaatgttatttaccaaacaaacaagtcatgttttagatacaaagtcttcattttcttagcattgtgttttcactgtgctcctggaatgagatatagtcagtattcttatgtcaaagaaccataagatcacttcgattgtgtgagattttcttatctaagtttggaccattctaaccagaatacccagatgaccccagacacataccaagacatcagtgcttttcaggtcatataaatgtatttaatatgac

SEQ ID NO: 460413 - DNA, 6007 bp, Homo sapiens
gtctccatccgccgccggttctgcagcccggctcctccctcagtctaggcgcgcgggctgtagtgggcgatcgcctttccccgacccctcgccgtgcccctgggcctcccgaagtggcctgggcgagcactgactgccctttggcggtgtcagccccaaagtcagggccggcgatgtctgcccgggagcggcagccggcgctgaagaagaaaatgaaaacactagcagaaaggaggaggagcgctccatctcttatcctggataaagccctacaaaaacggcctactaccagggacagtccttctgctagtgttgacacatgcacatttctgtcatcattagtgtgctccaataggactctgctgattgatggccgggcagaactcaaaagaggcctccagaggcaggagcggcatcttttcctattcaatgatctgtttgttgtggccaaaatcaaatataacaataactttaagataaaaaataaaattaaattaactgatatgtggacagcaagctgtgtggatgaagtgggagaaggcaacaccaatgccatgaaatcctttgttttgggctggcccacagtgaactttgtggccactttcagttctccagaacaaaaggacaaatggctctctctccttcagagatacatcaatctagagaaagaaaaggactacccgaagagcattcccctcaaaatcttcgccaaggacattgggaattgtgcctactctaaaactataacagtaatgaattcagatacagcgaatgaagttatcaacatgtcattaccaatgctagggataactggctctgagagagattaccagttgtgggtcaattctggcaaagaagaggctccatacccactcattgggcatgaatatccatatggaattaaaatgagccatcttcgagactctgcactcctgacaccgggatcaaaggactctaccacccctttcaacctccaggagcccttccttatggaacagctcccccgagagatgcagtgccagttcatcctgaagcccagccgcctggctgcagcccagcaactgagtgattcaggtcataagacatttaaaaggagaagatctatcataaactgggccttctggcgaggttctagcactcacctggacaacttgccctcatcgccaacatcacctatgccaggacagctctttggaatttctctgccaaatatttgtgagaatgacaatctgcccaaacctgtcttggatatgcttttctttcttaatcaaaaaggacctctcaccaaaggtatcttcaggcaatcagccaatgtgaaatcctgcagagaactaaaagagaaattgaattctggagtcgaagtacacctagactgtgaatctatttttgtgatagcatctgtcttaaaggattttctgcgaaatattccaggaagtattttttcatcagatctctatgatcactgggtctctgtaatggatcaaggaaatgatgaagagaaaataaatactgttcaaaggctattagaccagcttccgagagccaatgttgttctcctaaggtatctttttggggtgttacacaacattgagcaacattcctcatccaatcagatgactgcatttaatttagctgtgtgtgtcgctccaagtattctttggcctcctgcttcctccagcccagaactagaaaacgaatttacaaaaaaggtttccctgcttatacaatttctgattgagaattgccttaggatatttggagaagaaatcacttccctcttcagagaggtttcagtgagatgtgacactagagagaatgcctcagatatttcttgctttcaactgaatgactcctcctatgacagcttggaaaatgagctaaatgaggatgttgatgcaccatgcagtgacttggtaaagaaacttggccaggggagcagaagcatggactctgtcttaaccctcagtgactatgatcttgaccagcccgaggtggaaggccttttaaccctaagcgactttgacttggcccattctaaagatgaagatgttcaaatgaaacggcctcttgaatccaagccggtgaacattttagtgtacacaaagatcccactgcgggatcatgccagggccccatctgccatgtgcacacccagctacctgtccacagctgcagcaaatgctgcaaaaagcctgaggcgacaccggcgttgctcagagcccagcatcgactatctggattcaaagctttcctacctcagggagttttatcagaaaaagctacgcaagtccagctgtgatgcaattctttctcaaaaagatgaagactatctgaagcagaatcaacccctccaggaggaaggaaagacatgttttaaacagagtttagtcacaggcactgatgtcagcaagaaaaatgccactactcaaaacactaagaagaaaagcttgtctggtagtgaaggaaatcacgtgaaacttttccctaagtctaagccagtggccatttctgtggcatcttatagtcctatgtcctcacaggatcattccaagaaccagccctttgatgtgaatacatctggatactccccaccacacacagcagatgccctcaagggtccaaggacacatcggcgctgctcagagcccaacatagaagaccagaaccgcaagctgacctatctcaggggaatttattcaaagaaacaacataaaaccagctgtgaagctggtctcttgcatggagaggaggattatctcaaacggcataagtctttgcaaatggaggggcagaagctcattaatcagagtttagtcatggggattgaggtgggcaagagtagtgccacaaaccaaaacactgagaaggttttacccccaagattaaacctttgcccaaggaccagctattccagcttatcctccccaggcacttccccatccggctcatcagtaagctcccaagacagtgctttttctcagatttctgaacactctgtgtttacacccactgagacttcctctccaatagattgcacttttcaggctcagagaaaacgggaagacctttctcctgactttagcaatgccagccatgtttccggaatgcccggtccctcatcagggcaggcttgcagccgcccagcctatacaaagaaggacaccatggagtggcattcacaaatgcattctgtaactcttcatcccagcacatggttgagaaatggtgtggccagtttgaaaaactggtccctcaaaaagaaagcaaaggcagccagaccagaggaagagaaaatagcttctccaaaaggacccttagagccacccccacatgcttctggtgttccagaagccaactcactgcaagaggaacaaaaagacttgcccttaagggcagctgaaggactgtcccctgtgcagtcagcccaaaggtgtagttcttctcccttccaggactcagagagacactgtagctctccattcagcctggtggagagcagacttaagctgtgcatgaagtcacatgaggaaatagagcctggtagtcagagctcttctggttctctgccttgggaaagagcctcagccagctcttggactctagaggatgcgaccagcccagactcagggcctacagtggtctgcgacattgaggacaggtatttaaccaaagacatttaagcatagtaagaatctgatgtccacaagaacaggaactgggttaataataatagacaataattattatgacccctttgtataagatacctgggagaggtagcataaggattatcattgctaatacttaggacaacgaaataattctctttattgagactacttgacaaatactttatgctaaaaattttgtcacctaagtgtttgggaggctttttcttattaaaggttgggattggtcctgtcatgtggttttagagatactaacagagggctagagaaagcatcttctgcagaggaagcacttatgggaacagtctgtgagattgatgtcctgagaagaccaagatatcaggaatgaggaataggggcctgaggagagaggggaagggtacagagaaaccatctacattccatggaatgtttttaataagtaggcaagaaaaatgccactaatcaaagcattaagtgtgtccagtaatgaagaacatcatataaaatctttccctaaatctaagccagtggccatttttgtgggatcttactaatcacgtgtccttacagaatcattccaagaaccagcccattgctacagctagagtggagaaaaacagagtgactcaaaagccatgggtaccatgatatcagttttgttggttgtatttgtcggtttgttttttcattcatgttgaagtgctttgcaaggcttcaggaaacagagttgtgaggagaaagaagaaaatggctgcccatttcagtaccctttcaaaggtatctctgcctaggaacattcttcagaaatgcaacttcttctatttagaaggtgacctcctgacagcgttcactctcaatatggaggaaaagaccacaacaactgtcctttctcaattacacaaatgctgttaaaatgtgatcaaaccatggcatcactttgctgaaatgtttctgcacagtcctgcctcttagattacagtcagccagaaaaacatacttataaatcatcccttttctgatttttgtagtttggcaattgagagagcaatattgaggttggccggttataaggagtcccacaatagaatacccaacaaagtggctgccaggccttctcagacagccatttgctttgggttttgcttccagacgttgttccatatttttgccccaaatgtttcatggcttataccccattggtttattttatatccatggacctttctttctctgctttcttgacttaaaggttgcagcagtacatctcgtcacctaggaatagattatcaggccttgccaactagtatgcagggatggcactaaaaatggatgtgcatcttctttcacattaactactaacctataagaagttgctctgagcccatttatttaaactctttagttcaccatcagatggacctttctctcacaagctagcttattccaaattatttgtcttattaatcaccagaaaatggtcatatcaaatgttctttcttttttgttctaaaggttgcattttcagttataggggaaaaaatattttctctaagatagaagaagttatttcagtattagctataggtgctacctacctcttggggacatggccctgtttgcgctaaccattacaatgatcttttagaactctgtatccaaagagctacttcgtgacactggccatctgagtcacagatgtgaagtcgatttcactttataactaaccagtcctacatattaagacttctaagtgtccatatgcctcttttttggtataatatataaagtcagcagggactcccctttcccttagggcatactactgtcagtcagaactgcaagatgtgaatgaagctcttaacggcttggagtgtctttctggaagaaattgcctttttttttttttcatgttagcaggtaaaaaatcattcacccaatttgaagcatagaagaaaatagttgctgaggttttttaataaccattcctactatctgtgttcccttagatactcctgtaattcttaatgtgaatagtttgttaatattgctgtaaagtattatattgtatgatttgaagacagactatatgtcattttattatactccatcaatctataatatattagactgatgctttatctaaaatgctttgagtttgtataatatatcttgacaaattttactaccatatgttatgtaataaatgtgtatttttgtacttgcagaaactgctgctaacttttaaagttgtttggttttcaaggcactgataatggatatgtatgaagtccatgctgtctgttaaataaaatgccattctgcagaattaaccatcc

SEQ ID NO: 460414 - DNA, 2335 bp, Homo sapiens
ggggagacgatggagcgacgggtagagcagcttgggccgagccgcgggggtggaatccagacgccgggcgggggagggggcggcggggcggcgggacggtgggagcgggagccgagcctcgcggcccggggcacggcgccgcccgcccctccccggcagtgcctcccgaccccctgccctccgctgggacatggcctgaggccccgcccgccgcccgggacccctcccccacgctgcccccggaccctcgccccaggaccgcggggtctcttcccggccccgccgcccgccccggcgagaacaggcccggcgggcaaggcggcggcggaccgagggaggcctggcccggcagcggggagaagggtgcggcgcagcccgagtttcccaccttttctcctggcccagacgcggctggggcggacgggatctctcgcgctctgcctcctcctcttgcttcatggagccatgcgcctgggtggaggctcccgagagaagctggcctgcgggcgggccggacgagctgcgcggacggggcggggcgaaggaggccggcaggcggaggaggaagcggcggggcggaggcggcggcggccgggaagaactagaggtattccccgggcggctggaggactgagtcgagccgggacccgagtcctccggtatcccagcagccaccggaggcagtgaggtaatggaggaagaatgtagggagacctccagtggaccgcactccttctagcgagccgcggaaaccatagagatcagggctcagccggagggccggcccactgctgtcacgtggcctccatccgtgcgctttattggctggtgctggctttacggggttgaattttggacgctgcctgccattcgtgggaccgagtttcaggcagctggaataaagagagacatcgggggaaagccgcgagaaggccagcgtccctggctgggagcagagctagccgagtagggcgcccggctgtcaaactggccggcgcagtgcacgctgggccgccccggagcggtcgcagagcccgtcgggagtcgtagtccgggacgggcccgcggcattgtccgcgacgcagctcgggatccgggtcggggtgtcggccgggttgctgccgggcaccgtcgagcgttagccacccagcattgagctgccagcggctgttctccctaagcaccctcgctcacgtcgcctcgcctcgcctcgcctgaccggccgcagccttggataccagccttaaatcgagccgactacggcccagccccgcccgcggcgaggtgcgcggggttcggtgccagccgctcgcccctggcggggccagcctcttgatgcaccggggacgggcgcccccatccgactcttcgaggggcggcagggccccatctgtgtctttcgctctcgagcccccagctagagttggcttcagcggaatacctactgtgcgggattattcaacaagccgattgatcacattcttcagctctagcagtgcaaaggcttcactgaaaaagaacattacaaattttttttgaaagaaatttgggggaatccactgaagacctacatttcccggaaggttaacagcccccttctcagttttcctggtaaagtgtttttatattggtagaataccttctgtcacactctatatttttcttatctcaagtagaaaaaaattttgcccttttgcttgggactgttaacagccctggtagtggaaagtagaaggaaatgattctgtgaattttctgttatataaattttagccagtttaggacttttgaatgaggggccatacagccaaggatttaggatttcagctcaggaaagaaaactgcataggtgtttaattgtgtcctagccacttattagctgggtaactttgagcaagttttatacatatccttcccatgagtttttcatttctaatactggctgtgtaatacagtatgtttcatagacttgctgtaataatcgatggagtgtatctaatagtgtttattttactgtaactgggccacagttaggaagtactcaattaaaattagccgtcattattcctagtattaatatggtgatgaacagctaaagagcatttaaataattatcattaatatggataaattttgaccatacctgaataaatatttataatataactgttgagagtatacaagtttaatattttagggaaatacaatgtcaaattctatcaagctctattttcaaactaaaacaatagcagtttgctttcagatattttgaatattattgtgacatttcccccttctacctttctgggaccttggatacaggaaccatgtaagg

SEQ ID NO: 460415 - DNA, 1770 bp, Homo sapiens
ggggagacgatggagcgacgggtagagcagcttgggccgagccgcgggggtggaatccagacgccgggcgggggagggggcggcggggcggcgggacggtgggagcgggagccgagcctcgcggcccggggcacggcgccgcccgcccctccccggcagtgcctcccgaccccctgccctccgctgggacatggcctgaggccccgcccgccgcccgggacccctcccccacgctgcccccggaccctcgccccaggaccgcggggtctcttcccggccccgccgcccgccccggcgagaacaggcccggcgggcaaggcggcggcggaccgagggaggcctggcccggcagcggggagaagggtgcggcgcagcccgagtttcccaccttttctcctggcccagacgcggctggggcggacgggatctctcgcgctctgcctcctcctcttgcttcatggagccatgcgcctgggtggaggctcccgagagaagctggcctgcgggcgggccggacgagctgcgcggacggggcggggcgaaggaggccggcaggcggaggaggaagcggcggggcggaggcggcggcggccgggaagaactagaggtattccccgggcggctggaggactgagtcgagccgggacccgagtcctccggtatcccagcagccaccggaggcagtgaggtaatggaggaagaatgtagggagacctccagtggaccgcactccttctagcgagccgcggaaaccatagagatcagggctcagccggagggccggcccactgctgtcacgtggcctccatccgtgcgctttattggctggtgctggctttacggggttgaattttggacgctgcctgccattcgtgggaccgagtttcaggcagctggaataaagagagacatcgggggaaagccgcgagaaggccagcgtccctggctgggagcagagctagccgagtagggcgcccggctgtcaaactggccggcgcagtgcacgctgggccgccccggagcggtcgcagagcccgtcgggagtcgtagtccgggacgggcccgcggcattgtccgcgacgcagctcgggatccgggtcggggtgtcggccgggttgctgccgggcaccgtcgagcgttagccacccagcattgagctgccagcggctgttctccctaagcaccctcgctcacgtcgcctcgcctcgcctcgcctgaccggccgcagccttggataccagccttaaatcgagccgactacggcccagccccgcccgcggcgaggtgcgcggggttcggtgccagccgctcgcccctggcggggccagcctcttgatgcaccggggacgggcgcccccatccgactcttcgaggggcggcagggccccatctgtgtctttcgctctcgagcccccagctagagttggcttcagcggaatacctactgtgcgggattattcaacaagccgattgatcacattcttcagctctagcagtgcaaaggcttcactgaaaaagaacattacaaattttttttgaaagaaatttgggggtaaatttaattttaaatactgatttttgataacatttgatcttatgacagcatttgtatttttaattacagataggattacactaaaagtcatttctgacctgctcccttacccttatggctaaaataaactgctaggccctgaagcaaaggcgagccatgttctagagcaatgtctttcttgtattaaaatacggccccatgctcacaaaaaaaaa

SEQ ID NO: 460416 - DNA, 1785 bp, Homo sapiens
ggggagacgatggagcgacgggtagagcagcttgggccgagccgcgggggtggaatccagacgccgggcgggggagggggcggcggggcggcgggacggtgggagcgggagccgagcctcgcggcccggggcacggcgccgcccgcccctccccggcagtgcctcccgaccccctgccctccgctgggacatggcctgaggccccgcccgccgcccgggacccctcccccacgctgcccccggaccctcgccccaggaccgcggggtctcttcccggccccgccgcccgccccggcgagaacaggcccggcgggcaaggcggcggcggaccgagggaggcctggcccggcagcggggagaagggtgcggcgcagcccgagtttcccaccttttctcctggcccagacgcggctggggcggacgggatctctcgcgctctgcctcctcctcttgcttcatggagccatgcgcctgggtggaggctcccgagagaagctggcctgcgggcgggccggacgagctgcgcggacggggcggggcgaaggaggccggcaggcggaggaggaagcggcggggcggaggcggcggcggccgggaagaactagaggtattccccgggcggctggaggactgagtcgagccgggacccgagtcctccggtatcccagcagccaccggaggcagtgaggtaatggaggaagaatgtagggagacctccagtggaccgcactccttctagcgagccgcggaaaccatagagatcagggctcagccggagggccggcccactgctgtcacgtggcctccatccgtgcgctttattggctggtgctggctttacggggttgaattttggacgctgcctgccattcgtgggaccgagtttcaggcagctggaataaagagagacatcgggggaaagccgcgagaaggccagcgtccctggctgggagcagagctagccgagtagggcgcccggctgtcaaactggccggcgcagtgcacgctgggccgccccggagcggtcgcagagcccgtcgggagtcgtagtccgggacgggcccgcggcattgtccgcgacgcagctcgggatccgggtcggggtgtcggccgggttgctgccgggcaccgtcgagcgttagccacccagcattgagctgccagcggctgttctccctaagcaccctcgctcacgtcgcctcgcctcgcctcgcctgaccggccgcagccttggataccagccttaaatcgagccgactacggcccagccccgcccgcggcgaggtgcgcggggttcggtgccagccgctcgcccctggcggggccagcctcttgatgcaccggggacgggcgcccccatccgactcttcgaggggcggcagggccccatctgtgtctttcgctctcgagcccccagctagagttggcttcagcggaatacctactgtgcgggattattcaacaagccgattgatcacattcttcagctctagcagtgcaaaggcttcactgaaaaagaacattacaaattttttttgaaagaaatttgggggaatccactgaagacctacatttcccggaaggttaacagcccccttctcagttttcctgctgctcctatcagtgacaaatcagcgtattagaacatgcatgctggctgatcattctgatcaagtcaacaagcttcacaacttactctgaatgaggtcgtccgtgagaacttcactgttttacggggacaggagctacttctttgctgaactgcatcacggtttcaactgctga

SEQ ID NO: 460417 - DNA, 1176 bp, Homo sapiens
tgctagagcacagacacatgcatacctttgcacacacatacttgctctgcagttaacacagagacccgctgccagactgtgtgagtgttgatgaccccctacatcttcccggtgtgtcctgagctggctgcagttcaccacatgccacccataagggactctgccctggggaagatggagaccaagatctctgccagtggagaccactggatgcatcaaccgagagccctgctgcactgttccaggaacagcctggaaaatggaggtgcagcttccctggtaccccaagggcagagcacattacacatcacagtgccaggggcccactttcatttgcaaaatgctttaaacccaactcttgaactagaatggattgtgttgatgtatcaacatggcatcctgttcccaggctctttcctgaagtctgcagggtctgccagagaccacgtgcccctttcccccagccctaatctctccctcaagcagaatttgtttaaagccactattgaaagactcacggaattcccccagccttgctaaagaaagagagagagagagagccctatgtaccaaggtcatccaagcactgcatttgtacttggctgtagggaggaagggttggaaaaaagagaagatgttttctatcttggacctttacctaaaataggcaccatcgtgctcagtggccttgcttgtaaacttctacaggagggtgagttggagagaagtgatcactggacaggtctgtgacagaaggcattcagactttgggatggtggtgacccttgaattttaaggttcccttctaacctaataggtttcatggcaatgtttcagtttcatttgacacaccctagcatagtgccttcctaggtgccaggcagtgctggaggcacttacaaacattaattgaattaattgtcacaacagctctgttgaggatgataattttattatcatcccaatttcagagatgagcaaataggcatggagagttgaagcaacttgctcaagttcacagagccaataagtgacagagttgggactcaagcccaggctgcctggtttaagagcccatgcttttgaccaacctgcttttataaatctgtgacttctagccagtgccagatctgccagcttatttctatggattatgtattttagagcggctttgcc

SEQ ID NO: 460418 - DNA, 2543 bp, Homo sapiens
ggagcctgccgggagagtggtggcatctgagaggctggtcgtggactgtggttgggggaggtgggagctgttttaaccgtgtgccccctctcctgtgccggcgtgggcatcccccggggcagtggaacgcgggcgctcctccagcttccgagtccagccagcctgggcgcggggcgccgcccccgagacacccgaggagtccgttcctccctggttacgtggactgtggagctggtctcttgtggctcagcgccgtgcggaggttgaagcgtacctgcggaggtcgcaccagggcgtgaggaggaggaggaagggcatgagccgagcttgaggaatccgtgctccaaactctacactcaagggtggcccttgggtagggtgaagatcccctgtctttatcctagttccacaccttggtgtgggttactgggtgcaggatgaactgtcgctcggaggtgctggaggtgtcggtggaggggcggcaggtggaggaggccatgctggctgtgctgcacacggtgcttctgcaccgcagcacaggcaagttccactacaagaaggagggcacctactccattggcaccgtgggcacccaggatgttgactgtgacttcatcgacttcacttatgtgcgtgtctcttctgaggaactggatcgtgccctgcgcaaggttgttggggagttcaaggatgcactgcgcaactctggtggcgatgggctggggcagatgtccttggagttctaccagaagaagaagtctcgctggccattctcagacgagtgcatcccatgggaagtgtggacggtcaaggtgcatgtggtagccctggccacggagcaggagcggcagatctgccgggagaaggtgggtgagaaactctgcgagaagatcatcaacatcgtggaggtgatgaatcggcatgagtacttgcccaagatgcccacacagtcggaggtggataacgtgtttgacacaggcttgcgggacgtgcagccctacctgtacaagatctccttccagatcactgatgccctgggcacctcagtcaccaccaccatgcgcaggctcatcaaagacacccttgccctctgagcgtcgctggatctctgggagctccttgatggctcccagaccttggcttttgggaattgcactattgggcctttgggctctggaacctgctctgggtcattggtgagacttggaaggggcagcccccgctggcttcttggttttgtggttgccagcctcaggtcatccttttaatctttgctgacggttcagtcctgcctctactgtctctccatagccctggtggggtcccccttctttctccactgtacagaagagccaccactgggatggggaataaagttgagaacatgagtttgggctgagccatctctcccttgtcttgtgtctgcccgacgtgttaacactttctggcattcctgtgaggacacaggtgtacctcttggcccactttgcgaaggggagggactcttggggacagggctcctggttttggctgactggacttgcatgggggtgcctgtgggccttggggatgagaagaaatacagcaggcccggagtccgggcctatggagaaagggccccgccggcccgcccgccagtctgggctcctgcacatctggcgatcccgccacatctgggcagccggcgctggagcatgaacggctctcaggcgggcgccgcggctcaggccgcctggctgagctcctgctgtaaccagtcggcgtcgccgccggagccccccgaggggccgcgcgcggtgcaggcggtggtgctcggcgtgctgtccctgctggtgctttgcggggtcctgttcctgggcggcggcctcctcctccgcgcccagggcctgacagcgctgctgacccgcgagcagcgcgcgtcccgcgagcccgagccgggcagtgccagcggagaggacggcgacgacgactcctcggcgcccggctgcgctcggtggtcgcggcctccaggcagcccctgactccgagcggtccggagcatgcccgacggctgctgcggtcccgaccccttacccgaagcggcgcgccccacacaggagcagtgaggtgtctggaaggtttcatacgggaagtgacatgttaagatctggatcttaaagaacttggggttcccgaagaagctcggtgccatcaacaggaaaggatgagactttggattccagaagaacactgctggggcttccccccgagtctgccacttgctgtcgtgcaggcggagtggagagtgacacggccacgtaattggttgaaaatttgaacggcatgctcttgtacctgggagggcgttccaaaggctatgaaaacattgggaacagactcaaccacttcaaaggcacaggtggctggtgaatggaaccctttgctgcctgctggttcccaattttgaatgtatctttttgtttaaaatgtctttgttacaaaccaaacgttacaagaattgtaggggaaatgaattaaaagtagaaacaatatttcatcctttg

SEQ ID NO: 460419 - DNA, 2654 bp, Homo sapiens
ggagcctgccgggagagtggtggcatctgagaggctggtcgtggactgtggttgggggaggtgggagctgttttaaccgtgtgccccctctcctgtgccggcgtgggcatcccccggggcagtggaacgcgggcgctcctccagcttccgagtccagccagcctgggcgcggggcgccgcccccgagacacccgaggagtccgttcctccctggttacgtggactgtggaggttcgcgcgtagtggcggcgggggatacgggacccgggcgggaattccttcctgcgtccgtcccgagtctcttgatatggagccaagtaagttttctggttttgcttttagctggtctcttgtggctcagcgccgtgcggaggttgaagcgtacctgcggaggtcgcaccagggcgtgaggaggaggaggaagggcatgagccgagcttgaggaatccgtgctccaaactctacactcaagggtggcccttgggtagggtgaagatcccctgtctttatcctagttccacaccttggtgtgggttactgggtgcaggatgaactgtcgctcggaggtgctggaggtgtcggtggaggggcggcaggtggaggaggccatgctggctgtgctgcacacggtgcttctgcaccgcagcacaggcaagttccactacaagaaggagggcacctactccattggcaccgtgggcacccaggatgttgactgtgacttcatcgacttcacttatgtgcgtgtctcttctgaggaactggatcgtgccctgcgcaaggttgttggggagttcaaggatgcactgcgcaactctggtggcgatgggctggggcagatgtccttggagttctaccagaagaagaagtctcgctggccattctcagacgagtgcatcccatgggaagtgtggacggtcaaggtgcatgtggtagccctggccacggagcaggagcggcagatctgccgggagaaggtgggtgagaaactctgcgagaagatcatcaacatcgtggaggtgatgaatcggcatgagtacttgcccaagatgcccacacagtcggaggtggataacgtgtttgacacaggcttgcgggacgtgcagccctacctgtacaagatctccttccagatcactgatgccctgggcacctcagtcaccaccaccatgcgcaggctcatcaaagacacccttgccctctgagcgtcgctggatctctgggagctccttgatggctcccagaccttggcttttgggaattgcactattgggcctttgggctctggaacctgctctgggtcattggtgagacttggaaggggcagcccccgctggcttcttggttttgtggttgccagcctcaggtcatccttttaatctttgctgacggttcagtcctgcctctactgtctctccatagccctggtggggtcccccttctttctccactgtacagaagagccaccactgggatggggaataaagttgagaacatgagtttgggctgagccatctctcccttgtcttgtgtctgcccgacgtgttaacactttctggcattcctgtgaggacacaggtgtacctcttggcccactttgcgaaggggagggactcttggggacagggctcctggttttggctgactggacttgcatgggggtgcctgtgggccttggggatgagaagaaatacagcaggcccggagtccgggcctatggagaaagggccccgccggcccgcccgccagtctgggctcctgcacatctggcgatcccgccacatctgggcagccggcgctggagcatgaacggctctcaggcgggcgccgcggctcaggccgcctggctgagctcctgctgtaaccagtcggcgtcgccgccggagccccccgaggggccgcgcgcggtgcaggcggtggtgctcggcgtgctgtccctgctggtgctttgcggggtcctgttcctgggcggcggcctcctcctccgcgcccagggcctgacagcgctgctgacccgcgagcagcgcgcgtcccgcgagcccgagccgggcagtgccagcggagaggacggcgacgacgactcctcggcgcccggctgcgctcggtggtcgcggcctccaggcagcccctgactccgagcggtccggagcatgcccgacggctgctgcggtcccgaccccttacccgaagcggcgcgccccacacaggagcagtgaggtgtctggaaggtttcatacgggaagtgacatgttaagatctggatcttaaagaacttggggttcccgaagaagctcggtgccatcaacaggaaaggatgagactttggattccagaagaacactgctggggcttccccccgagtctgccacttgctgtcgtgcaggcggagtggagagtgacacggccacgtaattggttgaaaatttgaacggcatgctcttgtacctgggagggcgttccaaaggctatgaaaacattgggaacagactcaaccacttcaaaggcacaggtggctggtgaatggaaccctttgctgcctgctggttcccaattttgaatgtatctttttgtttaaaatgtctttgttacaaaccaaacgttacaagaattgtaggggaaatgaattaaaagtagaaacaatatttcatcctttg

SEQ ID NO: 460420 - DNA, 2804 bp, Homo sapiens
  misc_feature (625)..(625): n is a, c, g, or t
ggagcctgccgggagagtggtggcatctgagaggctggtcgtggactgtggttgggggaggtgggagctgttttaaccgtgtgccccctctcctgtgccggcgtgggcatcccccggggcagtggaacgcgggcgctcctaccttcccaaggcttcccggaaggttccaagcccaagcctggggctggcggtggtcgcccgccctccagagaacagccccagaggaagtcccgggttccctgccccgtgtggtttcaccggtagggaacttggttgtggaaggcgttgtggtccttcgttttgggttgggggctccaagctgggcacaggtaggcagggaagagtttagaaagggctggatacccttagccggtaaatggggtccagccacgcttagtggctctgttgcaccggcggagcggaagggcgcacggacagcggcgctacttagaggctcggagccctttgaaccgggaaattcccccgttggctccaaagagcttctaacgacctccaaggcggtatgggcccctatgaggcgtagcgggcttggaagattcgccgcttgctccttttattccctatggtttacgcaccaccgtttgggctgttggcgtaaaacctnggcggtgccatggattgagagcttggtcggcatctgagacgtgattgctcgtgacgcgatgctccgagctggccacgggagccggccatggttgcgaaggacggggccatgccttgggcttgtgcgttggcacaccgtgtggcttcgtggcacccggcagccacacggcgagagtatccacggtaccaagtaaggacgtggcacctactccattggcaccgtgggcacccaggatgttgactgtgacttcatcgacttcacttatgtgcgtgtctcttctgaggaactggatcgtgccctgcgcaaggttgttggggagttcaaggatgcactgcgcaactctggtggcgatgggctggggcagatgtccttggagttctaccagaagaagaagtctcgctggccattctcagacgagtgcatcccatgggaagtgtggacggtcaaggtgcatgtggtagccctggccacggagcaggagcggcagatctgccgggagaaggtgggtgagaaactctgcgagaagatcatcaacatcgtggaggtgatgaatcggcatgagtacttgcccaagatgcccacacagtcggaggtggataacgtgtttgacacaggcttgcgggacgtgcagccctacctgtacaagatctccttccagatcactgatgccctgggcacctcagtcaccaccaccatgcgcaggctcatcaaagacacccttgccctctgagcgtcgctggatctctgggagctccttgatggctcccagaccttggcttttgggaattgcactattgggcctttgggctctggaacctgctctgggtcattggtgagacttggaaggggcagcccccgctggcttcttggttttgtggttgccagcctcaggtcatccttttaatctttgctgacggttcagtcctgcctctactgtctctccatagccctggtggggtcccccttctttctccactgtacagaagagccaccactgggatggggaataaagttgagaacatgagtttgggctgagccatctctcccttgtcttgtgtctgcccgacgtgttaacactttctggcattcctgtgaggacacaggtgtacctcttggcccactttgcgaaggggagggactcttggggacagggctcctggttttggctgactggacttgcatgggggtgcctgtgggccttggggatgagaagaaatacagcaggcccggagtccgggcctatggagaaagggccccgccggcccgcccgccagtctgggctcctgcacatctggcgatcccgccacatctgggcagccggcgctggagcatgaacggctctcaggcgggcgccgcggctcaggccgcctggctgagctcctgctgtaaccagtcggcgtcgccgccggagccccccgaggggccgcgcgcggtgcaggcggtggtgctcggcgtgctgtccctgctggtgctttgcggggtcctgttcctgggcggcggcctcctcctccgcgcccagggcctgacagcgctgctgacccgcgagcagcgcgcgtcccgcgagcccgagccgggcagtgccagcggagaggacggcgacgacgactcctcggcgcccggctgcgctcggtggtcgcggcctccaggcagcccctgactccgagcggtccggagcatgcccgacggctgctgcggtcccgaccccttacccgaagcggcgcgccccacacaggagcagtgaggtgtctggaaggtttcatacgggaagtgacatgttaagatctggatcttaaagaacttggggttcccgaagaagctcggtgccatcaacaggaaaggatgagactttggattccagaagaacactgctggggcttccccccgagtctgccacttgctgtcgtgcaggcggagtggagagtgacacggccacgtaattggttgaaaatttgaacggcatgctcttgtacctgggagggcgttccaaaggctatgaaaacattgggaacagactcaaccacttcaaaggcacaggtggctggtgaatggaaccctttgctgcctgctggttcccaattttgaatgtatctttttgtttaaaatgtctttgttacaaaccaaacgttacaagaattgtaggggaaatgaattaaaagtagaaacaatatttcatcctttg

SEQ ID NO: 460421 - DNA, 1555 bp, Homo sapiens
tgaaggacaagattgtgtgggtttttaaatcccgtagcaaatgggagggggtacgggtgatgggaacagatggggaagagacacaagtgcttcattggcaccttgcacggatgcctcatgctgactttctccctctggcaccatcattagtgcctctggcttcagagccagatcttaataaaaaggtaaatcttcacaaccacagtggaccaataaacaatcaaacgaagaatctactaacttatttcttcccatcctttcccaaacataatctaatacatgtgcctccagcccataagagccatggcattttccccaattactctgcatatgtgaatttactgtgtcttttgaaaggcagcttatcctccaacggattttgtcggcagcctatttcttcacactattcaggccattttcttccaactaaatattcagttgttgtcactaaaaatatatcaataggataaagaaatctaaaagtcaaaaattaagcaaagtgacatatatttgcatggattgaatgcttcaaggaaaaataaaagcaactgagctcactctgctacataaaatatttgtgcctttttccccttttgcctctgttcttagaaaacaatgagctgtctccttgccaaccagcagctcccttggtaggggcatgcagaagacctgatgacacaaaccctccaaagagtttcaccctcaccacaacaggtggcttcctgctcggcagcccatcctgcatcacttcagtggacttctctgacatctactagaccacattaaatgaatcacagccttgaaactgaactggaaggacttccttcaaggagccagcatatgaacttgctgcctatctttagcaaggagatgcaaatgacatccacaaacctcttctgctgtatacctggatgaaagcaaggctagctgtgtgtcctatggcaccaaggactgaaagattgtaagaagtaagagtaagtaaatttttagctgctatattccctaatagctagactttaaaagtatttttaactcttttcctctattcttgctaggtgaacaaggctaaaacctgggtttagttttcattttataaattattctttaaaaataaattatttcaactgtcttgaagagtctgtaaaacaaggtctgtgaagtcacagagggaaaaagaatcagaaatcagtagacagcagttagaccacgggtgtttgttatacattcgttctagacattcatcaaaagctcagaaagggaaagtcaagcgtgccaaatcaataaagtttctatcgtatttcatctctttggatttgcagaatgctttggtaattctgtttctcaagcctgcacatcacgagcaaacaagtatgcttatgggtgtcttagcccagtaggctgtttatcagaaagctaccagtcccctgtgagaagctggctttcctccaaaatgtagaaggtgtttaaggggacatatttctttggtacaccctaaagcaagcttgtccaatgtgcagcctgcaggccgcatgtggctcaggacagctttgaatgt

SEQ ID NO: 460422 - DNA, 3484 bp, Homo sapiens
ccttacccagtgaggcagtctcagttctgaagccaagaacttgacttcgtgaaatggtacatggaatgcctacacagaagacccaaggctgcgatgctggatacctcaatttgggagctggagactggatatgcaggattgagttatttgagctgagaacccaagaagggctggcaatagctgaaggcttgagtgctgagctccaagtggcacaacaggagaaccatcacttaaatttggacctgaaggaggcgaagagctggcaagaggagcagagtgctcaggctcagcgactgaaagacaaggtggcccagatgaaggacaccctaggccaggcccagcagcgggtggccgagctggagcccttgaaggagcagcttcgaggggcccaggagcttgcagcctcaagccagcagaaagccacccttcttggggaggagttggccagtgcagcagcagccagggaccgcaccatagccgaactacaccgcagctgcctggaagtggctgaagttaacggcaggctggctgagctcggtttgcacttgaaggaagaaaaatgccaatggagcaaggagcgggcagggctgctgcagagtgtggaggcagagaaggacaagatcctgaagctgagtgcagagatacttcgattggagaaggcagttcaggaggagaggacccaaaaccaagtgttcaagactgagctggcccgggagaaggattctagcctggtacagttgtcagaaagtaagcgggagctgacagagctgcggtcagccctgcgtgtgctccagaaggaaaaggagcagttacaggaggagaaacaggaattgctagagtacatgagaaagctagaggcccgcctggagaaggtggcagatgagaagtggaatgaggatgccaccacagaggatgaggaggccgctgtggggctgagctgcccggcagctctgacagactcagaggacgagtccccagaagacatgaggctcccaccctatggcctttgtgagcgtggagacccaggctcctctcctgctgggcctcgagaggcttctccccttgttgtcatcagccagccggctcccatttctcctcacctctctgggccagctgaggacagtagctctgactcgccttggctgctcttcccatacctgtcccaatgtgctgctcccccatcttgggacaccaccccaaagcccaaccctgtctctttggcatccaggaggctgaagatgagacagtcagtcctgatggcagctgtgcagagtgggggtgaggaggccaacttactgcttcctgaactggccagtgccttctatgacatggccagtggctttacagtgggtaccctgtcagaaaccagcactgggggccctgccacccccacatggaaggagtgtcctatctgtaaggagcgctttcctgctgagagtgacaaggatgccctggaggaccacatggatggacacttctttttcagcacccaggaccccttcacctttgagtgatcttactccctcgtacatgcacaaatacacactcatgcacacacacactcacacacatgcatacacttaggtttcatgcccattttctatcacactgggctccatgatattctgttccctaagaactgcttctgtgtgccctgttttcatcccaagatttctcacttcatcctctcctacctggctcttttgtcccagggaggggtcctgttcggaagcagtggctgaatttatcccctgaaagtggttttggaggaaccgggatggaggaggccttcccctgtgggaatagaatcgtccactcctagccctggttgcttctgatacacagccactgcacacacacactcacactcacactcccttgtctgatgccccaaagccaattcctggggcaccctaccctctcttatttggagtttccgttggtttacctgagttttctctggggtctgcacagaggcagcagcatggacatcatggcctctcaggtcccttttggttctcagtttcattggttcctctttctgttcccccattgacttctgtgccccaccctagccttttccataaccttaggtattcagtttggaggggttttttgtatttttgaggattcctgtattctgtatcctctcctcgcatctcctcacatggaaagaaataatgtatttgtgccttctgtgaggaatggggggaacaagtggtcccaggtatccccatttccaaggcccccctccctctccaggtccccccacagcaataaaagcttccccctgatatccatccctttgtagtttgaacaaatatatttatatgatatgtatgactgttgtcacaaaatgtgttcttatcatgaggtgtgactggaacacagggcccagacctccagctcttagaccctggtggagggaggagggaaagaggggacgcatccctgcctcatggcaggggatgctgggcagttactgtcctgtcgtgcctcctggtgtgctggccatgagtgggttgtctcaagtgggagtctggcttggataatgcggcagttggggagggagcaaactcatgggtccctgtcacttctgctcagggtttagtcccagggtgggtgcatgccatggaaaagtgggacaagtttcccactgccgagaacttcacccttcatagcagccatcactgtaccttatgccaaaggacaggctttattcctgtcaagagcgtacacctttgagtatctacttagtaaaaaatggccctaagcctcatacctctaaaggcgattttatattcctcctgtttctgtttctgtttctttctctgttgccatcccctcatacctgtatgcacactctgcctcaacagtcacaaaaacacattcatccactctaaccagcttcacaggctagacagacacatacacagcatcgtaaagcatttgttaaggacctgcacgctcaccaaggctctcagcaatggcctgcacaagcacatgcctacaaccccctcgtcctccaacccaatagctcccttctcagctgccctcctctcccttcagggcccctgtgtggaccacccccaccattccctttctccattcacctgaaatgctcctgtccaccccctttccagccccacctggatgacttcttacatcgttccttcttccctcacgtctccgtctcctagcaaccccatcccgttccctgaatcccttccaaggaaattagagataatggatctctcctctctccatcccaacccctctttattgatcctcctttaatgaaagttaattataacaatgatttaattaatagaatccctctcttcctttattgcttcccgtattaagactattaataaatacgagctgggctgacagaggcatccatcacccgcctgggattccccccatccctccttttaccttcccccctctccctctccctctcttggcctataaacttgcc

SEQ ID NO: 460423 - DNA, 2313 bp, Homo sapiens
agcgaaggggatttcccggtcccatggggagatcacagaagagagggacatcctgagaccggcaacagggagaccatgtggcacgcatcctggagctacaggatgacatccagaccatcagtgagaaagtgctgacgaaggaagtggagctggacaggcttagagacacagtgaaggccctgactcgggaacaagagaagctccgttgggcaactgaaagaagtacaagcagacaaggagcaaagtgaggctgagctccaagtggcacaacaggagaaccatcacttaaatttggacctgaaggaggcgaagagctggcaagaggagcagagtgctcaggctcagcgactgaaagacaaggtggcccagatgaaggacaccctaggccaggcccagcagcgggtggccgagctggagcccttgaaggagcagcttcgaggggcccaggagcttgcagcctcaagccagcagaaagccacccttcttggggaggagttggccagtgcagcagcagccagggaccgcaccatagccgaactacaccgcagctgcctggaagtggctgaagttaacggcaggctggctgagctcggtttgcacttgaaggaagaaaaatgccaatggagcaaggagcgggcagggctgctgcagagtgtggaggcagagaaggacaagatcctgaagctgagtgcagagatacttcgattggagaaggcagttcaggaggagaggacccaaaaccaagtgttcaagactgagctggcccgggagaaggattctagcctggtacagttgtcagaaagtaagcgggagctgacagagctgcggtcagccctgcgtgtgctccagaaggaaaaggagcagttacaggaggagaaacaggaattgctagagtacatgagaaagctagaggcccgcctggagaaggtggcagatgagaagtggaatgaggatgccaccacagaggatgaggaggccgctgtggggctgagctgcccggcagctctgacagactcagaggacgagtccccagaagacatgaggctcccaccctatggcctttgtgagcgtggagacccaggctcctctcctgctgggcctcgagaggcttctccccttgttgtcatcagccagccggctcccatttctcctcacctctctgggccagctgaggacagtagctctgactcgccttggctgctcttcccatacctgtcccaatgtgctgctcccccatcttgggacaccaccccaaagcccaaccctgtctctttggcatccaggaggctgaagatgagacagtcagtcctgatggcagctgtgcagagtgggggtgaggaggccaacttactgcttcctgaactggccagtgccttctatgacatggccagtggctttacagtgggtaccctgtcagaaaccagcactgggggccctgccacccccacatggaaggagtgtcctatctgtaaggagcgctttcctgctgagagtgacaaggatgccctggaggaccacatggatggacacttctttttcagcacccaggaccccttcacctttgagtgatcttactccctcgtacatgcacaaatacacactcatgcacacacacactcacacacatgcatacacttaggtttcatgcccattttctatcacactgggctccatgatattctgttccctaagaactgcttctgtgtgccctgttttcatcccaagatttctcacttcatcctctcctacctggctcttttgtcccagggaggggtcctgttcggaagcagtggctgaatttatcccctgaaagtggttttggaggaaccgggatggaggaggccttcccctgtgggaatagaatcgtccactcctagccctggttgcttctgatacacagccactgcacacacacactcacactcacactcccttgtctgatgccccaaagccaattcctggggcaccctaccctctcttatttggagtttccgttggtttacctgagttttctctggggtctgcacagaggcagcagcatggacatcatggcctctcaggtcccttttggttctcagtttcattggttcctctttctgttcccggtgggaagtcgacttcccacgggaggcagaggtttcagtgagctgagaacgcgccattgcactccagcttgggcaacagaacaagattctgtctcaaaaaaagaaaaaagaaaatcagtttctttttttattcttcaagagttgaaaagtacctgatattaagtgattttttaaaaccattcatcttccctagaattttttagcagtc

SEQ ID NO: 460424 - DNA, 2898 bp, Homo sapiens
tggcagcttccatgtggtgttgggcctgcaggttcacaaaagtccagagtttaggagcagtgcaaaggggaaatgtgggaccagaacccccacacagagtccccactggggcactgcctaatggagctgtgagaagagggccaatgtcctcaagaccccagaatggtagatccagtgacagcttacaccatgcacctgaaaaagccagagacactcaatgccagcccctgaaggagctgtccaaggctgtgggatcccactccttgcatcactgtgccctgattgtgagatgtggagtcaaagggaattattctggagctttaaaatttaatgactgccccactggattttggacttgcatggggcctgtagcccctttgttttggcaaatttctcacatttggaacagggtgcagcttatgacgctctacatgagggctattttattaggaatgctggagaactcagcctgtgcaaaaaccaagcctgaatgtgtgggatctgattttcagggaatccagactttaagagtaacactggtagggctaggaggggttgtgaacatctgagcatttctgaggaagttttagaaaatcaagtaggtaccaggtgccagaaaatctcccacctcccttgtcccagtaaaaggataaagcattcagtggcccctggtagctctttttcaggttctcacagatctcaaacaccctatcccttcccttccaccagaggacttgacgccccacccaaagcacactccgacccacttcccacacggcagccagaatgggaaatcagcctcaacccacataggaatcatgatgagtgcggctgacactcaccacgtgcttcatgtacaccaggcactggatgtgcatgtacacaggccctgcacataacatcctgtttgaagggcacaaaaatcccaagaggatggtattgctactcccgctttacaaaaagaaaaaggaacagaggctcagagagtcccaacacaccatggctcatcagcagggagcgagtttttaaccccaagtctgtgagatcctggtgctcccaactagtatattttagtgcctctttgaaccatgacattggccatgaagaaagtggtagcatctcatcacatgttctagagaggccactggaacatcttctagactttctaaagagagagttaacctcttcttctaatcaatatataagaaccatgtgtcacattaataaagctaatcatgtaattgcagatatatgtatacatacatacacatatatacatatgtatacatgcactcatatatatacctatgcacagtagatgcatacatatatgcatacatttgtatgtatgaatttacatacacaattgcatatagacaaacactatatacatgcatatatataaagtataaggtcagaaactaaatacagtatatatgtatgtatatatatgtaaatgtgtatatatatatgaactcatgtatatacattcacatatatatgtacatatgagtcagatcagaaattacatttatttttcttgttcatgtgtttcttcttcagtgatatatccccaccattctgtgagaatggttggaaattctgatcacttcacacccaaattctctggtttgttgcaaattttttttctcaaaataatactactcaaattttaaaaatatatttatttttaaaagagttgggcatatctgatatagcttaggctaagctaagtgttcatggtttctatccagtgaaatatgagtgaacaagagtttggggagatttaaggatggattcatatgcagccattagaatatttccggaatacctacctactagaagcggaacttataacatattatgatcatgcttgtggaaatttatgctggctagcatttgggggacatcgcctggatcaaggccaaggtcactcttgtctctagcacacatgcagatatgcttctcatcacagtagataccttaattcagaatgatcctacagaagcagacatccctaccagattgctattgctgtgaatgcaactccgaaggggactggaccacaggcagctggactttacataagttacaacaggaatttctgtccaatggataagcttggcctttatgacatacacatcagaggaaagagttagccaacaggtaggagctactgtgaggctgatttcaaatatgttgcctttttcctatcttcagcctttaagatagtgcaaatctttctattttctccctacctccagctttaagtcccttccagtgattgccaaaatctgaagcccaaaagtggggataggaagaaagcttgacccaaaagtgtccttggatgttgtgaatacaatgcgttcataatttttcttgtcacactgtatcacacactagttctagcttttatgtctcatgatcctccaccagaatgtataaaatttaaaaaagactgtcagtactaacaactgctgttgctgagtggagcagagagaaacagtcttcaccaagccctgcccaggttgtacatctatgagcaaaatgctattgttgctatttgaagccactaagttttaaggcagcttgccacaaagataaggatacctggaacactatgtgtcaagtcactgggcagagacatcatctaatttaatctttaaaacagctgctttggaagatatccctgctttatagatgcagaattaggacttgaaggaccaagatcacattgcaaggaagaagagaacaaatcagttggaagaaacagaatgagcaaagtcaagaagacgtaaaagcaaggtgcatctgactttacaattcaatagaataaaaaacacaacaatgacgaaaatggtgtaaaatctgttcattataaagtgactaccttcaccc

SEQ ID NO: 460425 - DNA, 2817 bp, Homo sapiens
tggcagcttccatgtggtgttgggcctgcaggttcacaaaagtccagagtttaggagcagtgcaaaggggaaatgtgggaccagaacccccacacagagtccccactggggcactgcctaatggagctgtgagaagagggccaatgtcctcaagaccccagaatggtagatccagtgacagcttacaccatgcacctgaaaaagccagagacactcaatgccagcccctgaaggagctgtccaaggctgtgggatcccactccttgcatcactgtgccctgattgtgagatgtggagtcaaagggaattattctggagctttaaaatttaatgactgccccactggattttggacttgcatggggcctgtagcccctttgttttggcaaatttctcacatttggaacagggtgcagcttatgacgctctacatgagggctattttattaggaatgctggagaactcagcctgtgcaaaaaccaagcctgaatgtgtgggatctgattttcagggaatccagactttaagagtaacactggtagggctaggaggggttgtgaacatctgagcatttctgaggaagttttagaaaatcaagtaggtaccaggtgccagaaaatctcccacctcccttgtcccagtaaaaggataaagcattcagtggcccctggtagctctttttcaggttctcacagatctcaaacaccctatcccttcccttccaccagaggacttgacgccccacccaaagcacactccgacccacttcccacacggcagccagaatgggaaatcagcctcaacccacataggaatcatgatgagtgcggctgacactcaccacgtgcttcatgtacaccaggcactggatgtgcatgtacacaggccctgcacataacatcctgtttgaagggcacaaaaatcccaagaggatggtattgctactcccgctttacaaaaagaaaaaggaacagaggctcagagagtcccaacacaccatggctcatcagcagggagcgagtttttaaccccaagtctgtgagatcctggtgctcccaactagtatattttagtgcctctttgaaccatgacattggccatgaagaaagtggtagcatctcatcacatgttctagagaggccactggaacatcttctagactttctaaagagagagttaacctcttcttctaatcaatatataagaaccatgtgtcacattaataaagctaatcatgtaattgcagatatatgtatacatacatacacatatatacatatgtatacatgcactcatatatatacctatgcacagtagatgcatacatatatgcatacatttgtatgtatgaatttacatacacaattgcatatagacaaacactatatacatgcatatatataaagtataaggtcagaaactaaatacagtatatatgtatgtatatatatgtaaatgtgtatatatatatgaactcatgtatatacattcacatatatatgtacatatgagtcagatcagaaattacatttatttttcttgttcatgtgtttcttcttcagtgatatatccccaccattctgtgagaatggttggaaattctgatcacttcacacccaaattctctggtttgttgcaaattttttttctcaaaataatactactcaaattttaaaaatatatttatttttaaaagagttgggcatatctgatatagcttaggctaagctaagtgttcatggtttctatccagtgaaatatgagtgaacaagagtttggggagatttaaggatggattcatatgcagccattagaatatttccggaatacctacctactagaagcggaacttataacatattatgatcatgcttgtggaaatttatgctggctagcatttgggggacatcgcctggatcaaggccaaggtcactcttgtctctagcacacatgcagatatgcttctcatcacagtagataccttaattcagaatgatcctacagaagcagacatccctaccagattgctattgctgtgaatgcaactccgaaggggactggaccacaggcagctggactttacataagttacaacaggaatttctgtccaatggataagcttggcctttatgacatacacatcagaggaaagagttagccaacaggtaggagctactgtgaggctgatttcaaatatgttgcctttttcctatcttcagcctttaagatagtgcaaatctttctattttctccctacctccagctttaagtcccttccagtgattgccaaaatctgaagcccaaaagtggggataggaagaaagcttgacccaaaagtgtccttggatgttgtgaatacaatgcgttcataatttttcttgtcacactgtatcacacactagttctagcttttatgtctcatgatcctccaccagaatgtataaaatttaaaaaagactgtcagtactaacaactgctgttgctgagtggagcagagagaaacagtcttcaccaagccctgcccaggttgtacatctatgagcaaaatgctattgttgctatttgaagccactaagttttaaggcagcttgccacaaagataaggatacctggaacactatgtgtcaagtcactgggcagagacatcatctaatttaatctttaaaacagctgctttggaagatatccctgctttatagatgcagaattaggacttgaaggaccaagatcacattgcaagtaagtggagaaaccagaattcctacccatgtctctctggctgcagaacccacatgcttttgataagtaacactcac

SEQ ID NO: 460426 - DNA, 1926 bp, Homo sapiens
  misc_feature (2)..(3): n is a, c, g, or t
  misc_feature (5)..(5): n is a, c, g, or t
  misc_feature (15)..(15): n is a, c, g, or t
  misc_feature (17)..(17): n is a, c, g, or t
  misc_feature (20)..(20): n is a, c, g, or t
  misc_feature (22)..(22): n is a, c, g, or t
cnnangctctctccncnctnancccttatcccctgactggccctggtgtgtgtttctccccatcatgtccatgtgttctcattgttcaactcgcaattatgagtatatacccagtaatgcaattgctgggtcaaatggtatttctgattctagatccttgaggaatctccacgttgtcttccaatttacattaccaccaacagtgatttccaacagaaccaatcaagaaaatcataaaagagattgtggatatagtgaaaaagacgcaggtggtcaagactttcaagataaggattttggagaaaatcaaaagttaatggaaatgaaaacagaggatttaacaggtgatgacttgatgcagatgaatgcttccaaatcagggccagatgatgaggaagaagagaataagagtctactcagtgtgaagataacaaggatcaagatctttattaaaatgatacacttccacttgaccaataccatggctggagctgtagcaactgggatgcagggagcagtgtcccaaagctgtgcagggcagtggggcagaaaccattctgtcctgctaggactctgggcctgtgataaaaaggctgctgaagtttccaattttccctcatcttgctatctacttctgcaccctccacactcttccaacctgtgcacattatccagttccaaagttgcatccacattttcagtgaataagtctcatgagatctgatggttttataaatgagttcccctgaacacactctcttgcctgctgccacgtaagacatttctttgcatttctttcattttccaccatgattgtgaggcctccccagccatgtggaactaaatgcctaagaattacatcaggagtaaaagtgaagaaaaagactgtaaactgcgtgctaactgctttgaagaatgagaagtcatgccaagcaaaatagtagataattgcaagaaggggactaatggtccatggatggagctggaggccattatctttagcaaactaacagaggaacagaaaaccaagtgagaaccacatgttctcacttataagtgggagctaaatgatgagaacacatggacacatagagggaaacaacagacactggggtctattggagggtggagggttggagcagggagagatcagatctaataattaatatgtactaggcttaatacctgggtgatgaaataatctgtacaacaaccctcatgacacaagtttacctgtgtaacaaaactgtgtttgtacccctgaacttaaaataaaacttgaaaaaaaaaaagaaaataatgtacaacaacgaaaaccaaaaaactcacagattcctggaaaattgaatttaaaaatgctgtaaaacaggaggtgaataggtgaaaacaccatgtataatgttagaaatatttataccagttgttctgtccttaatgcaagtgatacttttattttaactgtattagtttgctgctatttctaaaggcaaaatctgtgtgtaaatattttatacatataaaatataaactattattcaaataatgggacacttttttattcaatatcaatgtcaaagtcttttctttgtgtgcatgtgtgtgcacatgtgcgtatgtgtataaaacagtatattaagttcatttattgcaaataatactttatcacattgatccttttcttcaatctctattgaatcacaagtctgtgaacagattcttgaataaaattattcttttcataatgtctctagtatgtgttatctgtaaatattgcctataacattttatttgtgactatattgtgtttctgtgtctccatgatttctctccttttatagaaagtaaatattttctgtaaagaaataaatgtttagtagtatatgagaacaaaagttagacatctaatgagtgccaaaaatagagcct

SEQ ID NO: 460427 - DNA, 1545 bp, Homo sapiens
ttggtgtggctgttctagaggatcccaggtggacaggggagaacatgtccctcccgtccaaccttcagctcaatgacctcactccagattccagagcagtgaaaccagcagaccggcagatggctcagaacaacagccggccagagcttctggacccggagcccggcggcctcctcaccagccaaggtttcatccgcctcccagtgctgggctatatctatcgagtgtccagcgtgagcagtgatgagatctggctctgagccgagggcgagacaggagtattctcttggcctctggacaccctcccattcctccaaggcatcctctacctagctaggtcaccaacgtgaagaagttatgccactgccacttttgcttgccctcctggctggggtgccctccatgtcatgcacgtgatgcatttcactgggctgtaacccgcaggggcacaggtatctttggcaaggctaccagttggacgtaagcccctcatgctgactcagggtgggccctgcatgtgatgactgggcccttccagagggagctctttggccaggggtgttcagatgtcatccagcatccaagtgtggcatggcctgctgtataccccaccccagtactccacagcaccttgtacagtaggcatgggggcgtgcctgtgtgggggacagggagggccctgcatggattttcctccttcctatgctatgtagccttgttccctcaggtaaaatttaggaccctgctagctgtgcagaacccaattgccctttgcacagaaaccaacccctgacccagcggtaccggccaagcacaaacgtcctttttgctgcacacgtctctgcccttcacttcttctcttctgtccccacctcctcttgggaattctaggttacacgttggaccttctctactacttcactgggcactagacttttctattggcctgtgccatcgcccagtattagcacaagttagggaggaagaggcaggcgatgagtctagtagcacccaggacggcttgtagctatgcatcattttcctacggcgttagcactttaagcacatcccctaggggagggggtgagtgaggggcccagagccctctttgtggcttccccacgtttggccttctgggattcactgtgagtgtcctgagctctcggggttgatggtttttctctcagcatgtctcctccaccacgggaccccagccctgaccaacccatggttgcctcatcagcaggaaggtgcccttcctggaggatggtcgccacaggcacataattcaacagtgtggaagctttaggggaacatggagaaagaaggagaccacataccccaaagtgacctaagaacactttaaaaagcaacatgtaaatgattggaaattaatatagtacagaatatatttttcccttgttgagatcttcttttgtaatgtttttcatgttactgcctagggcggtgctgagcacacagcaagtttaataaacttgactgaattcatttacatatctctgcttcatttcttctattaatatg

SEQ ID NO: 460428 - DNA, 2326 bp, Homo sapiens
gagtcagtgctcgcttctgcgcctgcaggatgtccatgtgtctgctggcctagggcctaggcccgggccaccatggcgctgcctccaggcccagccgccctccggcacacactgctgctcctgccagcccttctgagctcaggttggggggagttggagccacaaatagatggtcagacctgggctgagcgggcacttcgggagaatgaacgccacgccttcacctgccgggtggcaggggggcctggcacccccagattggcctggtatctggatggacagctgcaggaggccagcacctcaagactgctgagcgtgggaggggaggccttctctggaggcaccagcaccttcactgtcactgcccatcgggcccagcatgagctcaactgctctctgcaggaccccagaagtggccgatcagccaacgcctctgtcatccttaatgtgcaattcaagccagagattgcccaagtcggcgccaagtaccaggaagctcagggcccaggcctcctggttgtcctgtttgccctggtgcgtgccaacccgccggccaatgtcacctggatcgaccaggatgggccagtgactgtcaacacctctgacttcctggtgctggatgcgcagaactacccctggctcaccaaccacacggtgcagctgcagctccgcagcctggcacacaacctctcggtggtggccaccaatgacgtgggtgtcaccagtgcgtcgcttccagccccagggcccctcccggcaccatctctgatatcaagtgactccaacaacctaaaactcaacaacgtgcgcctgccacgggagaacatgtccctcccgtccaaccttcagctcaatgacctcactccagattccagagcagtgaaaccagcagaccggcagatggctcagaacaacagccggccagagcttctggacccggagcccggcggcctcctcaccagccaaggtttcatccgcctcccagtgctgggctatatctatcgagtgtccagcgtgagcagtgatgagatctggctctgagccgagggcgagacaggagtattctcttggcctctggacaccctcccattcctccaaggcatcctctacctagctaggtcaccaacgtgaagaagttatgccactgccacttttgcttgccctcctggctggggtgccctccatgtcatgcacgtgatgcatttcactgggctgtaacccgcaggggcacaggtatctttggcaaggctaccagttggacgtaagcccctcatgctgactcagggtgggccctgcatgtgatgactgggcccttccagagggagctctttggccaggggtgttcagatgtcatccagcatccaagtgtggcatggcctgctgtataccccaccccagtactccacagcaccttgtacagtaggcatgggggcgtgcctgtgtgggggacagggagggccctgcatggattttcctccttcctatgctatgtagccttgttccctcaggtaaaatttaggaccctgctagctgtgcagaacccaattgccctttgcacagaaaccaacccctgacccagcggtaccggccaagcacaaacgtcctttttgctgcacacgtctctgcccttcacttcttctcttctgtccccacctcctcttgggaattctaggttacacgttggaccttctctactacttcactgggcactagacttttctattggcctgtgccatcgcccagtattagcacaagttagggaggaagaggcaggcgatgagtctagtagcacccaggacggcttgtagctatgcatcattttcctacggcgttagcactttaagcacatcccctaggggagggggtgagtgaggggcccagagccctctttgtggcttccccacgtttggccttctgggattcactgtgagtgtcctgagctctcggggttgatggtttttctctcagcatgtctcctccaccacgggaccccagccctgaccaacccatggttgcctcatcagcaggaaggtgcccttcctggaggatggtcgccacaggcacataattcaacagtgtggaagctttaggggaacatggagaaagaaggagaccacataccccaaagtgacctaagaacactttaaaaagcaacatgtaaatgattggaaattaatatagtacagaatatatttttcccttgttgagatcttcttttgtaatgtttttcatgttactgcctagggcggtgctgagcacacagcaagtttaataaacttgactgaattcatttacatatctctgcttcatttcttctattaatatg

SEQ ID NO: 460429 - DNA, 486 bp, Homo sapiens
ctccaaattccaaggaacaagcgttactgagtccccgcgggcttctttgatcccgcaggtttcatccgcctcccagtgctgggctatatctatcgagtgtccagcgtgagcagtgatgagatctggctctgagccgagggcgagacaggagtattctcttggcctctggacaccctcccattcctccaaggcatcctctacctagctaggtcaccaacgtgaagaagttatgccactgccacttttgcttgccctcctggctggggtgccctccatgtcatgcacgtgatgcatttcactgggctgtaacccgcaggggcacaggtatctttggcaaggctaccagttggacgtaagcccctcatgctgactcagggtgggccctgcatgtgatgactgggcccttccagagggagctctttggccaggggtgttcagatgtcatccagcatccaagtgtggcatggcctgctgtataccccaccc

SEQ ID NO: 460430 - DNA, 2461 bp, Homo sapiens
gagtcagtgctcgcttctgcgcctgcaggatgtccatgtgtctgctggcctagggcctaggcccgggccaccatggcgctgcctccaggcccagccgccctccggcacacactgctgctcctgccagcccttctgagctcaggttggggggagttggagccacaaatagatggtcagacctgggctgagcgggcacttcgggagaatgaacgccacgccttcacctgccgggtggcaggggggcctggcacccccagattggcctggtatctggatggacagctgcaggaggccagcacctcaagactgctgagcgtgggaggggaggccttctctggaggcaccagcaccttcactgtcactgcccatcgggcccagcatgagctcaactgctctctgcaggaccccagaagtggccgatcagccaacgcctctgtcatccttaatgtgcaattcaagccagagattgcccaagtcggcgccaagtaccaggaagctcagggcccaggcctcctggttgtcctgtttgccctggtgcgtgccaacccgccggccaatgtcacctggatcgaccaggatgggccagtgactgtcaacacctctgacttcctggtgctggatgcgcagaactacccctggctcaccaaccacacggtgcagctgcagctccgcagcctggcacacaacctctcggtggtggccaccaatgacgtgggtgtcaccagtgcgtcgcttccagccccagggcttctggctacccgggtggaagtgccactgctgggcattgttgtggctgctgggcttgcactgggcaccctcgtggggttcagcaccttggtggcctgcctggtctgcagaaaagagaagaaaaccaaagggggtggccatgggtacggtgacatgcatcccagtgactccaacaacctaaaactcaacaacgtgcgcctgccacgggagaacatgtccctcccgtccaaccttcagctcaatgacctcactccagattccagagcagtgaaaccagcagaccggcagatggctcagaacaacagccggccagagcttctggacccggagcccggcggcctcctcaccagccaaggtttcatccgcctcccagtgctgggctatatctatcgagtgtccagcgtgagcagtgatgagatctggctctgagccgagggcgagacaggagtattctcttggcctctggacaccctcccattcctccaaggcatcctctacctagctaggtcaccaacgtgaagaagttatgccactgccacttttgcttgccctcctggctggggtgccctccatgtcatgcacgtgatgcatttcactgggctgtaacccgcaggggcacaggtatctttggcaaggctaccagttggacgtaagcccctcatgctgactcagggtgggccctgcatgtgatgactgggcccttccagagggagctctttggccaggggtgttcagatgtcatccagcatccaagtgtggcatggcctgctgtataccccaccccagtactccacagcaccttgtacagtaggcatgggggcgtgcctgtgtgggggacagggagggccctgcatggattttcctccttcctatgctatgtagccttgttccctcaggtaaaatttaggaccctgctagctgtgcagaacccaattgccctttgcacagaaaccaacccctgacccagcggtaccggccaagcacaaacgtcctttttgctgcacacgtctctgcccttcacttcttctcttctgtccccacctcctcttgggaattctaggttacacgttggaccttctctactacttcactgggcactagacttttctattggcctgtgccatcgcccagtattagcacaagttagggaggaagaggcaggcgatgagtctagtagcacccaggacggcttgtagctatgcatcattttcctacggcgttagcactttaagcacatcccctaggggagggggtgagtgaggggcccagagccctctttgtggcttccccacgtttggccttctgggattcactgtgagtgtcctgagctctcggggttgatggtttttctctcagcatgtctcctccaccacgggaccccagccctgaccaacccatggttgcctcatcagcaggaaggtgcccttcctggaggatggtcgccacaggcacataattcaacagtgtggaagctttaggggaacatggagaaagaaggagaccacataccccaaagtgacctaagaacactttaaaaagcaacatgtaaatgattggaaattaatatagtacagaatatatttttcccttgttgagatcttcttttgtaatgtttttcatgttactgcctagggcggtgctgagcacacagcaagtttaataaacttgactgaattcatttacatatctctgcttcatttcttctattaatatg

SEQ ID NO: 460431 - DNA, 1337 bp, Homo sapiens
accataagactctcctaaaaagtactctcctacccgtttctaatcagttccttccacttcaggcaaccacttctgactcgtatcactatagatagatttgttttcttttgttttcttcctccatctctgacagcttcttgatctgtccccaggtgggtggctgtggttgacgggtgttgctctgtgaaaaagttctaaggtgaaacgaaccagaccccatccctgtcccattgttaccctgaggcatccgagctccccttcttactcaccatggggactgctttaagagtactcgggtgtcctccagctagttttctgttccaagcatcgcttcagcaaccctttgacctggatttgagcccccacgaatggacgccacttgcgcgagaccagctcggtcagggagaccctaacccagctacaactgaggtggaaattaagaagaaaggccctggatctcttttagtttccatggaccaattagcctcctacgggcggaaggacagaatcaacagtataatgagtgttgttacaaatacactagtagaagacaaaggagagaaagaaaaaggaaagaagatgatgacccagggagggaaggaggaagaagctgtagaaagaaagagaaaagcaaaggatgagagcaggaaagggcaaaggggcaagaaagaaggagacaggaggagacagaacaaggaaggaaaggtgaaaaggggagaggagtgtgacttgtatttctaactcaaccatgagctgttctagatttttggaaactgtgactttaagctaaatgatatactgtataacaaaaccagttttaccataggccagttgatataaacaagagttaagttcctatggcatatagtacatcatgtggcttaaagttgctgttttcaagaacctattgaggacattaagtgaggacttactgtatacttaataggtatttgtgaggaagaccatttgaaacgatttaaatttcctgttcattcagattttgatttcttcctttatttatatcagtatggattaatggttttctattttatctgagttacaatccatttgatgtttagacttcctctgatgtggccagtggaaattccttcaagctggcttctgatccctttcacatgtcttcttcacttcctggctttctggtaccacaaggtattccaggatactttcgtgtttttccagccccagggctggaatcagccatttctcaagaagccctgagtcttttagtggaaaaatggcatttagaagtagagatctaggctgagtatcagctgaggcaggaggatcgcttaaagtttgagaccagccttagc

SEQ ID NO: 460432 - DNA, 793 bp, Homo sapiens
ttgtgggaggatggggagggctgtgtgcaaggccccagagttctctcaatccatctgcagagcccccagagtccttgggaaactgaaatcgtgttcggtggctctgaggcaggaacacaagcctgtcgttggcactgtctactgctgcctgggtgtctggggcctccacactcaggcccccatgccatggcacagacgggacaacagcctggcgcgaaatgcccaaatgaaatgggatccagcctggcctttcctggccagccattgccaatgcagctggacaacttggcctgacttcatgtacgcttcccatgcaagaagtccatgtcaggcccagtggacacattcagcttatcgggcaatgttaccagggtttggggcagaaggaacagataaaagggacaattctaaggaagatgattgaaagactgaccccaatgtggagaggatgattccagcactactcgtactgcactaggatcagacaacttgaaatctgcctttgcttttattgggcaatctgttccagggatcacagcccctacctgtaactgtcacctcttttgaggtacaattacattctttcctctcatcccattgcaatgtttccatgctgagagggctccagagagatgtagggaagctctgctagtctctgtgctgaagctcagtgcctggcatacctctgcctttgatgaggctctggcacagccctgcatcattcttcatttgcctgcgcattaaagaatgcccctggtggtcatcagagcgccttgtgtcagaggctttgtct

SEQ ID NO: 460433 - DNA, 1576 bp, Homo sapiens
ctgtgggtcaggaatccaggcacagctgagcggagtccacaggctcaggatctctcaccaggttgcaatcaaggtattggcagggctgcagtctcagctgaaggtttgaacggggaatgatcctcttccaagctcatgagtgtggtttttggaaacattcaatcactccagggctgttggccagtggtcatgctctcagttccttaatatgtgggtctctccacagagtaactcacaacaaggcagctagtttcttcagaataagcaagagagaaaagctggagagaggtagtgccagacaaaagacagtcttttataatctaatattggaagtgacattccatcatttttactgtattctattcatccgaacaaagtcactaggcccggccccaagggggtgtgattacacaggatgtgaataccaggaggagaagataattagggggttatcacagaagttcatctaccaatataataaatatgctgattttattaaagcaacagaccactgccatcggccaaagaactgttataataaatacatagattgacaatgtatattatataaacaatacccactagacttatgtgctatacaacatgccaattatataaggttgtttaggaaagatgctttaaaatctttttcaaacttttattgtataagttttcaagcacttataaaagtaggagataggataacaaaaaaataataaaataaacatgatcattcttgtttcactaataccccaaccctttacccccaaaccactagttattgaaaagcaaatctcagacaccaccttacttcatctttagtaattcagtgtaaatatccacatatcttatgtaccattactcaattaagaataccttaatttcatctactattcagttactgttcaaatttctccaattatttcagaaatgtcttttaaaaaaaaacagttggtttgtctgaaagaagctttaactttaaatgaaacttggagttttaaccattacttaagagcaggcattttaattactgacacagaactattctgtgagaaaaatgacttcaggacattttattatccaggaatcaccagcaaagtgatgggggatgctgaaaattttacccacgggcagaggaagcttcaactcatcaaagccttgccaatggacagtggagaaaacagtgagggtgccttctcacactcaacagagtcccgcttattcaccagggtttgtgactggccatggttagagacaaggctgaaaggaagcaagacaggactgcgaaggtgaagaagctgcaagtggaggtgtctaaatatcatgccctaggcaccaggaccggggcaggaaatcagaaccgaaaagagtatctttctcttgtctgactccatcaagtgaccacacatggaaaactggatttctggtgtggaaggtccccaaaaaaggaaaaaggagagatggtaactgagacccagagaagtgccttcctcgacattccccagctcactctatctgccaggcctttaatgtttccatcattaattcaatcttcaaccatcaccgactgagtgtt

SEQ ID NO: 460434 - DNA, 910 bp, Homo sapiens
accacatccagagctcgctcagctgctgcccagcctcggctgtgaggataggctggctgggcagcacgtctctccccacagggctccctgagaccaccaggaagagcccccaaccaatcttgggattctcccttcgtgcggttgtctgggacctttttccagggtcaaagcagatcgtgaggaggaagctgagatgccctgtatccaagcccaatatgggacaccagcaccgagtccgggaccccgtgaccacctggcaagcgaccccctgacccctgagttcatcaagcccaccatggacctggccagccccgaggcagcccccgctgcccccattccaggagctggtgctgccccactttgggaaggaagatgctggggatgtacagcagttctacgacctgctctccggttctctggaggtcatccgcaagtgggcggagaagatccctggctttgctgagctgtcaccggctgaccaggacctgttgctggagtcggccttcctggagctcttcatcctccgcctggcgtacaggtctaagccaggcgagggcaagctcatcttctgctcaggcctggtgctacaccggctgcagtgtgcccgtggcttcggggactggattgacagtatcctggccttctcaaggtccctgcacagcttgcttgtcgatgtccctgccttcgcctgcctctctgcccttgtcctcatcaccgacccggcatgggctagcagggagaccgcgggcggggttggacggagctgcaagaaccggaatagccagagttggcctgaaggaagcaccgtggacaggcttgtgggcgaggcagaaccccccagccaggacaagcttggcatggtccacgtctggatagggggcacacctgcccggaaactgagaggaacctg

SEQ ID NO: 460435 - DNA, 2178 bp, Homo sapiens
ataatgtggttggccaaggcctgttggtccatccagagtgagatgccctgtatccaagcccaatatgggacaccagcaccgagtccgggaccccgtgaccacctggcaagcgaccccctgacccctgagttcatcaagcccaccatggacctggccagccccgaggcagcccccgctgcccccactgccctgcccagcttcagcaccttcatggacggctacacaggagagtttgacaccttcctctaccagctgccaggaacagtccagccatgctcctcagcctcctcctcggcctcctccacatcctcgtcctcagccacctcccctgcctctgcctccttcaagttcgaggacttccaggtgtacggctgctaccccggccccctgagcggcccagtggatgaggccctgtcctccagtggctctgactactatggcagcccctgctcggccccgtcgccctccacgcccagcttccagccgccccagctctctccctgggatggctccttcggccacttctcgcccagccagacttacgaaggcctgcgggcatggacagagcagctgcccaaagcctctgggcccccacagcctccagccttcttttccttcagtcctcccaccggccccagccccagcctggcccagagccccctgaagttgttcccctcacaggccacccaccagctgggggagggagagagctattccatgcctacggccttcccaggtttggcacccacttctccacaccttgagggctcggggatactggatacacccgtgacctcaaccaaggcccggagcggggccccaggtggaagtgaaggccgctgtgctgtgtgtggggacaacgcttcatgccagcattatggtgtccgcacatgtgagggctgcaagggcttcttcaagcgcacagtgcagaaaaacgccaagtacatctgcctggctaacaaggactgccctgtggacaagaggcggcgaaaccgctgccagttctgccgcttccagaagtgcctggcggtgggcatggtgaaggaagttgtccgaacagacagcctgaaggggcggcggggccggctaccttcaaaacccaagcagcccccagatgcctcccctgccaatctcctcacttccctggtccgtgcacacctggactcagggcccagcactgccaaactggactactccaagttccaggagctggtgctgccccactttgggaaggaagatgctggggatgtacagcagttctacgacctgctctccggttctctggaggtcatccgcaagtgggcggagaagatccctggctttgctgagctgtcaccggctgaccaggacctgttgctggagtcggccttcctggagctcttcatcctccgcctggcgtacaggtctaagccaggcgagggcaagctcatcttctgctcaggcctggtgctacaccggctgcagtgtgcccgtggcttcggggactggattgacagtatcctggccttctcaaggtccctgcacagcttgcttgtcgatgtccctgccttcgcctgcctctctgcccttgtcctcatcaccgaccggcatgggctgcaggagccgcggcgggtggaggagctgcagaaccgcatcgccagctgcctgaaggagcacgtggcagctgtggcgggcgagccccagccagccagctgcctgtcacgtctgttgggcaaactgcccgagctgcggaccctgtgcacccagggcctgcagcgcatcttctacctcaagctggaggacttggtgccccctccacccatcattgacaagatcttcatggacacgctgcccttctgacccctgcctgggaacacgtgtgcacatgcgcactctcatatgccaccccatgtgcctttagtccacggacccccagagcaccccaagcctgggcttgagctgcagaatgactccaccttctcacctgctccaggaggtttgcagggagctcaagcccttggggaagggggatgccttcatgggggtgaccccacgatttgtcttatcccccccagcctgccccggcctttatgttttttgtagataaaccgttttaacacatagcgccgtgctgtaaataagcccagtgctgtgtaaatacaggaagaaagagcttgaggtgggagcggggctgggagg

SEQ ID NO: 460436 - DNA, 2834 bp, Homo sapiens
ggcgggggtcccctcgcggcgcccgggacccccggcctccaggcatgggcgcccctgcggtgcagagcagctcagggccggctggtgcgcgaccccggaaagcgggggtggagaggcgagcggagcccgcggggccaggtgaggggctgccggggtggcgggaggctcggagggagccggagggaccgggcgcggttggctcccgggagcaactggagagtgaggagatcctcatccggggaagccccgcggccgcgtctctacagcgccccttctcgggctctggccctcccgctggttattctggacctgggggcccccagctgggacccgagtccggtgcggggagcctagtgggcctgggagctgctatttttagcgggcgcggcgggcgcgaggagcctatttatagatcaaacaatccgcgctccctgcgtcaatggaaccccgcgtgcgtcacgcgcgcagacattccaggccccccctcctcgccccgccccctcgggctccccgggccgcacctccccctggccgcctcccgccggaaccgcaccgccccccgcgcccttgtatggccaaagctcgacgggcggcctgcgtcagtggcgcccccgcccctccccgtgcaggagggtcgggctcggccggggagtcccagtggcggaggctacgaaacttgggggagtgcacagaagaacttcgggagcgcacgcgggaccagggaccaggctgagactcggggcgccagtccgggcaggggcagcgggagccggccggagatgccctgtatccaagcccaatatgggacaccagcaccgagtccgggaccccgtgaccacctggcaagcgaccccctgacccctgagttcatcaagcccaccatggacctggccagccccgaggcagcccccgctgcccccactgccctgcccagcttcagcaccttcatggacggctacacaggagagtttgacaccttcctctaccagctgccaggaacagtccagccatgctcctcagcctcctcctcggcctcctccacatcctcgtcctcagccacctcccctgcctctgcctccttcaagttcgaggacttccaggtgtacggctgctaccccggccccctgagcggcccagtggatgaggccctgtcctccagtggctctgactactatggcagcccctgctcggccccgtcgccctccacgcccagcttccagccgccccagctctctccctgggatggctccttcggccacttctcgcccagccagacttacgaaggcctgcgggcatggacagagcagctgcccaaagcctctgggcccccacagcctccagccttcttttccttcagtcctcccaccggccccagccccagcctggcccagagccccctgaagttgttcccctcacaggccacccaccagctgggggagggagagagctattccatgcctacggccttcccaggtttggcacccacttctccacaccttgagggctcggggatactggatacacccgtgacctcaaccaaggcccggagcggggccccaggtggaagtgaaggccgctgtgctgtgtgtggggacaacgcttcatgccagcattatggtgtccgcacatgtgagggctgcaagggcttcttcaagcgcacagtgcagaaaaacgccaagtacatctgcctggctaacaaggactgccctgtggacaagaggcggcgaaaccgctgccagttctgccgcttccagaagtgcctggcggtgggcatggtgaaggaagttgtccgaacagacagcctgaaggggcggcggggccggctaccttcaaaacccaagcagcccccagatgcctcccctgccaatctcctcacttccctggtccgtgcacacctggactcagggcccagcactgccaaactggactactccaagttccaggagctggtgctgccccactttgggaaggaagatgctggggatgtacagcagttctacgacctgctctccggttctctggaggtcatccgcaagtgggcggagaagatccctggctttgctgagctgtcaccggctgaccaggacctgttgctggagtcggccttcctggagctcttcatcctccgcctggcgtacaggtctaagccaggcgagggcaagctcatcttctgctcaggcctggtgctacaccggctgcagtgtgcccgtggcttcggggactggattgacagtatcctggccttctcaaggtccctgcacagcttgcttgtcgatgtccctgccttcgcctgcctctctgcccttgtcctcatcaccgaccggcatgggctgcaggagccgcggcgggtggaggagctgcagaaccgcatcgccagctgcctgaaggagcacgtggcagctgtggcgggcgagccccagccagccagctgcctgtcacgtctgttgggcaaactgcccgagctgcggaccctgtgcacccagggcctgcagcgcatcttctacctcaagctggaggacttgcaagaagatccagggatctggcggccctcaccttctcggcaagaagattgtactgaagtccctacctgtgcccgtgtccccacgtaggccctccaaccccctaggctcgtcagttgtttagtcagctggcttaaaatgcagattcctgggatctacccccagagactcagatctggggaggattgattagtatcaggtttaaatttatatgtacacatatatggtatttaaaatcatgacctttccattccacctaataaatgttatctattatcgttttgggaaataaaagcatgtgttagaaaaatcagc

SEQ ID NO: 460437 - DNA, 2915 bp, Homo sapiens
ggcgggggtcccctcgcggcgcccgggacccccggcctccaggcatgggcgcccctgcggtgcagagcagctcagggccggctggtgcgcgaccccggaaagcgggggtggagaggcgagcggagcccgcggggccaggtgaggggctgccggggtggcgggaggctcggagggagccggagggaccgggcgcggttggctcccgggagcaactggagagtgaggagatcctcatccggggaagccccgcggccgcgtctctacagcgccccttctcgggctctggccctcccgctggttattctggacctgggggcccccagctgggacccgagtccggtgcggggagcctagtgggcctgggagctgctatttttagcgggcgcggcgggcgcgaggagcctatttatagatcaaacaatccgcgctccctgcgtcaatggaaccccgcgtgcgtcacgcgcgcagacattccaggccccccctcctcgccccgccccctcgggctccccgggccgcacctccccctggccgcctcccgccggaaccgcaccgccccccgcgcccttgtatggccaaagctcgacgggcggcctgcgtcagtggcgcccccgcccctccccgtgcaggagggtcgggctcggccggggagtcccagtggcggaggctacgaaacttgggggagtgcacagaagaacttcgggagcgcacgcgggaccagggaccaggctgagactcggggcgccagtccgggcaggggcagcgggagccggccggagatgccctgtatccaagcccaatatgggacaccagcaccgagtccgggaccccgtgaccacctggcaagcgaccccctgacccctgagttcatcaagcccaccatggacctggccagccccgaggcagcccccgctgcccccactgccctgcccagcttcagcaccttcatggacggctacacaggagagtttgacaccttcctctaccagctgccaggaacagtccagccatgctcctcagcctcctcctcggcctcctccacatcctcgtcctcagccacctcccctgcctctgcctccttcaagttcgaggacttccaggtgtacggctgctaccccggccccctgagcggcccagtggatgaggccctgtcctccagtggctctgactactatggcagcccctgctcggccccgtcgccctccacgcccagcttccagccgccccagctctctccctgggatggctccttcggccacttctcgcccagccagacttacgaaggcctgcgggcatggacagagcagctgcccaaagcctctgggcccccacagcctccagccttcttttccttcagtcctcccaccggccccagccccagcctggcccagagccccctgaagttgttcccctcacaggccacccaccagctgggggagggagagagctattccatgcctacggccttcccaggtttggcacccacttctccacaccttgagggctcggggatactggatacacccgtgacctcaaccaaggcccggagcggggccccaggtggaagtgaaggccgctgtgctgtgtgtggggacaacgcttcatgccagcattatggtgtccgcacatgtgagggctgcaagggcttcttcaagcgcacagtgcagaaaaacgccaagtacatctgcctggctaacaaggactgccctgtggacaagaggcggcgaaaccgctgccagttctgccgcttccagaagtgcctggcggtgggcatggtgaaggaagttgtccgaacagacagcctgaaggggcggcggggccggctaccttcaaaacccaagcagcccccagatgcctcccctgccaatctcctcacttccctggtccgtgcacacctggactcagggcccagcactgccaaactggactactccaagttccaggagctggtgctgccccactttgggaaggaagatgctggggatgtacagcagttctacgacctgctctccggttctctggaggtcatccgcaagtgggcggagaagatccctggctttgctgagctgtcaccggctgaccaggacctgttgctggagtcggccttcctggagctcttcatcctccgcctggcgtacaggtctaagccaggcgagggcaagctcatcttctgctcaggcctggtgctacaccggctgcagtgtgcccgtggcttcggggactggattgacagtatcctggccttctcaaggtccctgcacagcttgcttgtcgatgtccctgccttcgcctgcctctctgcccttgtcctcatcaccgaccggcatgggctgcaggagccgcggcgggtggaggagctgcagaaccgcatcgccagctgcctgaaggagcacgtggcagctgtggcgggcgagccccagccagccagctgcctgtcacgtctgttgggcaaactgcccgagctgcggaccctgtgcacccagggcctgcagcgcatcttctacctcaagctggaggacttggtgccccctccacccatcattgacaagatcttcatggacacgctgcccttctgacccctgcctgggaacacgtgtgcacatgcgcactctcatatgccaccccatgtgcctttagtccacggacccccagagcaccccaagcctgggcttgagctgcagaatgactccaccttctcacctgctccaggaggtttgcagggagctcaagcccttggggaagggggatgccttcatgggggtgaccccacgatttgtcttatcccccccagcctgccccggcctttatgttttttgtagataaaccgttttaacacatagcgccgtgctgtaaataagcccagtgctgtgtaaatacaggaagaaagagcttgaggtgggagcggggctgggagg

SEQ ID NO: 460438 - DNA, 1163 bp, Homo sapiens
tgatcgagctggtaccaggtcaggctcagaaagttgtccgaacagacagcctgaaggggcggcggggccggctaccttcaaaacccaagcagcccccagatgcctcccctgccaatctcctcacttccctggtccgtgcacacctggactcagggcccagcactgccaaactggactactccaagttccaggagctggtgctgccccactttgggaaggaagatgctggggatgtacagcagttctacgacctgctctccggttctctggaggtcatccgcaagtgggcggagaagatccctggctttgctgagctgtcaccggctgaccaggacctgttgctggagtcggccttcctggagctcttcatcctccgcctggcgtacaggtctaagccaggcgagggcaagctcatcttctgctcaggcctggtgctacaccggctgcagtgtgcccgtggcttcggggactggattgacagtatcctggccttctcaaggtccctgcacagcttgcttgtcgatgtccctgccttcgcctgcctctctgcccttgtcctcatcaccgaccggcatgggctgcaggagccgcggcgggtggaggagctgcagaaccgcatcgccagctgcctgaaggagcacgtggcagctgtggcgggcgagccccagccagccagctgcctgtcacgtctgttgggcaaactgcccgagctgcggaccctgtgcacccagggcctgcagcgcatcttctacctcaagctggaggacttggtgccccctccacccatcattgacaagatcttcatggacacgctgcccttctgacccctgcctgggaacacgtgtgcacatgcgcactctcatatgccaccccatgtgcctttagtccacggacccccagagcaccccaagcctgggcttgagctgcagaatgactccaccttctcacctgctccaggaggtttgcagggagctcaagcccttggggaagggggatgccttcatgggggtgaccccacgatttgtcttatcccccccagcctgccccggcctttatgttttttgtagataaaccgttttaacacatagcgccgtgctgtaaataagcccagtgctgtgtaaatacaggaagaaagagcttgaggtgggagcggggctgggagg

SEQ ID NO: 460439 - DNA, 1043 bp, Homo sapiens
atagccaggcaggagttattttatagaatggaagtaatttctacggggccaagcaataataaggaaattggaagtcaaggactatcttccgaatggagaagaagctccatcaaccacagaaggaaattatgatcactcctgccatcctgctcctttgtgtatccaggatgaaggggagaattggagtcttgcacaatgaaaggacaacattgctgccaaaacaatccatcgtgactgtagacatattttccaccctcatcctgcaggttttctgccagttgttggcccctcaccaattttgctcctgggcagtctgaggtggaacataattttgtataaaacaaattatgctcaacctcacttataatcagggaaatgtgagtcaaaaccacaataaaatatcacctcatgctgtttaggattgctgttatcaagtagacaagaaagaagtgttggtgaggtgaaaaacaaaagggatttgaaatacatctgcctggttttcaaaagccaatgtgggtgaggaagggacgcaggaaggaaggttgtcctcgtgacacagggtgaccctcgccattccctgctgaggggaagcagctgatgtttgtggcagagccctaaggtcggggatgttatctccaccccagccatcccctcatgtcatggtgcctgctgtttccacaacctctcctgctaagaagatgaccctagattgccagatccggctagtttcaaaacatgcccaggttctcattgctgcatgttcattgatggggctgagaagagggaaagtggaaaccagaccgtctaggggaattccagaggcagagagcttggggtatttgggaagccagggagtgaaaaatatgtcctgttcttggacacaggggccaatccaaatggcgtgtctttttgtccctgtttgtatgctggcccaggaaagctgccaggtgcttttggtggagcagccagaaacagctctccaaagccctctgacagagactgtggcagcggaagtgatgagtgacaggtcttttctctgaatg

SEQ ID NO: 460440 - DNA, 1217 bp, Homo sapiens
ctctgcagaatgtctggggtcctatgttccaggaacctgtttactttcaaattttccctgtttcagttggactcaggagcatctggtgagccaggtcactctctgggtcttacccttggcttttctcattgcggaaactgccagacagcggtggtcagtgcccagcctgaggggatggcttcaaatggagcatacccagcgctgggaccgggcgtgaccgcgaaccctggcacctccctgtctgtgttcacggctctgcccttcaccacacccgctcccggcccagcacacgggccgctccttgtgactgcaggggctcctccaggcggccctctggtgctgtctaccctccccagcacacctctggtgacagaacaggatggctgcggcccgagtggggccggggcttccaacgtctttgtccagatgaggacagaggtggggcctgtgaaggccgctcaggcgcagaccttggtcctaactcaggcccccctcgtctggcaggctccaggcgccctctgcggaggtgttgtgtgtccacctcccctactcctggcagctgctcctgtggtgcctgttatggctgcccaggtggttgggggcacccaggcctgtgagggaggctggtcccagggccttcctcttccaccaccaccaccaccggctgcccagctgccccccattgtgtcccaagggaatgctgggccatggccacaaggggctcacggagagggcagcctggcttcctcccaggccaaggccccgccagatgactcctgtaaccccaggagtgtctatgagaacttccgactctggcagcactacaagcccctggcccggaggcaccttccccagagtcctgacaccgaagcgctttcgtgcttcctcatcccagttctccgatccctggcccggcggaagcccaccatgaccctggaggagggactgtggcgggccatgcgggaatggcagcacacgagcaactttgaccggatgatcttctacgagatggcggaaaagttcctggagtttgaggctgaggaggagatgcagattcagaaatcgcaatggatgaaggggccccagtgcctgcctcctccagccacaccgaggcttgaacctcgaggacccccggcccctgaggtggtcaagcagccagtgtaccttcccagcaaggccggccccaaggccccgactgcctgcctgccaccacccag

SEQ ID NO: 460441 - DNA, 3109 bp, Homo sapiens
ctctgcagaatgtctggggtcctatgttccaggaacctgtttactttcaaattttccctgtttcagttggactcaggagcatctggtgagccaggtcactctctgggtcttacccttggcttttctcattgcggaaactgccagacagcggtggtcagtgcccagcctgaggggatggcttcaaatggagcatacccagcgctgggaccgggcgtgaccgcgaaccctggcacctccctgtctgtgttcacggctctgcccttcaccacacccgctcccggcccagcacacgggccgctccttgtgactgcaggggctcctccaggcggccctctggtgctgtctaccctccccagcacacctctggtgacagaacaggatggctgcggcccgagtggggccggggcttccaacgtctttgtccagatgaggacagaggtggggcctgtgaaggccgctcaggcgcagaccttggtcctaactcaggcccccctcgtctggcaggctccaggcgccctctgcggaggtgttgtgtgtccacctcccctactcctggcagctgctcctgtggtgcctgttatggctgcccaggtggttgggggcacccaggcctgtgagggaggctggtcccagggccttcctcttccaccaccaccaccaccggctgcccagctgccccccattgtgtcccaagggaatgctgggccatggccacaaggggctcacggagagggcagcctggcttcctcccaggccaaggccccgccagatgactcctgtaaccccaggagtgtctatgagaacttccgactctggcagcactacaagcccctggcccggaggcaccttccccagagtcctgacaccgaagcgctttcgtgcttcctcatcccagttctccgatccctggcccggcggaagcccaccatgaccctggaggagggactgtggcgggccatgcgggaatggcagcacacgagcaactttgaccggatgatcttctacgagatggcggaaaagttcctggagtttgaggctgaggaggagatgcagattcagaaatcgcaatggatgaaggggccccagtgcctgcctcctccagccacaccgaggcttgaacctcgaggacccccggcccctgaggtggtcaagcagccaggtatggcttcccacattcccacaggagccatggcaaaggccaaaggggccaagggaggccactgtccccacaccccatgcttcccttcgagagggggatttgctccctccaacaggacagtttccaggagcatatgttcggtattgacctggtcaagtttcctagctactctctcccctcgcctgtccaaaactccacatatgctctgcccaggaagcagggatgagcggggagagtacacggcatattggtggctccaaacttcctcccaagcgatgctgtctcagatgtgcccctcctgcctcctccgggggcgctgcggttcaggtggtcctgacccagctgggacccacttcacatccccaagccctgccctcccctgtgtggtgccagcaggaggagcggccctcaccacgcccaggccagtgaccaaggcccgccggccaccaccccggccccaccggcgagcagagaccaaggcccgcctgccaccacccaggccccagagaccagcagagaccaaggtccctgaggagatccccccagaagtggtgcaggagtatgtggacatcatggaggagctgctggggccttccctcggggccacgggggagcccgagaaacaacgggaagagggcgaagtgaagcagccacaggaagaggactggacgcccccagacccgggcctcctgagctacactgacaagctgtgttcccagaaagacttcgtcaccaaggtggaggccgtcattcatccccaattcctggaagaattgctttccccagatccacagatggatttcttggccctaagccaggagctggagcaggaggaaggactcacccttgcccaggtaccccaggggcaggagggacctggcacacaaggcccacctgattgtctaatcccccctgctggggatgctcggcttcttggggagccactctggagtgggaagatgcagctagtggagaagcgcctcctacccttgaaggagaaacagcatgcgagggcagcccctagtcgtggcacagcccggttggactcaagttcttctaagtttgcagctggccaaggagcagagagagacgtccctgtcccccaacaaggggttggcatggaaacctgcccaccccagacgactgcccgggactctcagggacgaggcagagcacacactggcatggccaggtccaaagactctgttgtgcttttgggatgtcaggattcccctgggctgagggctgcccggccaacctctcctccccaggaccacagacccacctgccctggcgtgggtaccaaggatgccttggatctccctggagggtctcctgtcagggagtcacatgggctggctcaggggtcaagtgaggaggaggaactccccagcctggccttcctcttgggttcccagcacaagcttctgccctggtggctaccccagagccctgtccctgcctcgggccttctcagcccagaaaagtggggaccccagggaactcatcagttcccatctgctgagagaagaggcctcaacctagcaccttctcctgccaacaaggccaagaagcgacctctctttggaagcctgtcccctgctgaaaagacaccccacccagggcctgggctcagggtctctggggagcaatccctgacttgggggctgggtggcccctcacagtctcaaaagagaaagggtgaccccttggtctccaggaaggagaagaagcagcgttcaggctctctggggccgatccccaaggatggggctctggcatccgatgccccaaagcggtcaaaagcttcttctcccccagtgctgatcttgctgggccttagctttggagggtaggggagggaggggagggagagggtggctgaatggggagggcaggaagggagggtctggggggaaggggctggggagtgggggtgggaagcagtgc

SEQ ID NO: 460442 - DNA, 1850 bp, Homo sapiens
gacggtgaaaaaggatggagatagtgatatgtgtcacaatcagtatttttcacagaaaggtttctaatcaccctgctgggacaaacacctcagtgactgtccactggaacataaatattttattctgtcctttgatagttccagtactggaagtcctcaccaaagcactcaggcaagataaagaaataaaaggcattcaatttggaaaagagaaagtaaaattatttcacttcactgacaatgcaaccttatttctagaaaaacctgaagactcccccaaaagactttttatcttgatatatgactttagtacagttacaggatacaaaatcaacatccaaaaatcatttcctagcagattgtctgtgatgctcaagcagattgtctgtgatgctcatcacatcctggtttcattattcactttcttttctaacttggtaggaagattttctgagttcacaggagattttgttttcacttatatttccatatgcctggtgacaaggacaggatgtctaggacttcccaaattaaatggagcagctaaaaatttatgttcgcacaacaaccagaaaaaccatgcctttcctatgtggataatcagcaaagctgaggacatcgggaagcaactcaggattgccagtttacagctcttctggatgtgcactggttaatgcatggaattcagcaacagcagactttgttcctttgatggatccagaagatcgccacatcaaggaatatggtggtaaaactgcaagataatctgccacccctaacaactatagaagttctaaggatgttagagactcatagagaggaattctaatggccatacttgaaccgttgcagcaatacactcagaagattggtgaaagaaaagaaaggcattttgaaagtgattttcaaaaaacagttaatccagaattccatatttagcaaaattatacttcaagaatgaatgtgacatgataatgtcaatgaaaagaaaaacaaaataatttgtcaccccaaaaaattattgaacaagaatgctaaagaaagtagtgtataacgtatatggctgtgaaatatattatgattaaagcctagaggattttggaagatgtgttaaatgggcatgtgtgtttcaagttttctacatttaaagtaatgctataacatccattgaagtaggctgagaaatgttaagaataaatatcatacctgagaatcagtatctgagagaaaaataatgtgggacatacatgtaattttaaaatatataatagccacgtttgaaaaagcaaaatgaaacaagtgaatttatgtattttatttaatccaatataatcattgcattatctatttaatatgtaattgataaaaataaaatatatatattcttttattttataattaatttttgaaattcagtttgtatttgacccttataacaaacttcaattttgataatttttttaagtagaaatactttatctgcatttgaattcctaaaacttacaggtggaaaggtagcataacatgcctaagttgttcaaacaatttaaaaattttccaatagtgaacttaaatgtaagtttaatatatatttaaaattaaaattaaataaagctaaaaattcaatacctcagtgacaatagccacattgtaagttctcagtgaagatatatgactagtggctcctaggttgaaaagcaaaaatacataactgtatagctaagaagccaataaatgacttaaaaatgtattccaagcaatattcaaataatcaatggaataaacaacatgggaaacagtgaggaataatcataaggatcaggcagaatacaaataatggtcaactctaa

SEQ ID NO: 460443 - DNA, 1094 bp, Homo sapiens
gacggtgaaaaaggatggagatagtgatatgtgtcacaatcagtatttttcacagaaaggtttctaatcaccctgctgggacaaacacctcagtgactgtccactggaacataaatattttattctgtcctttgatagttccagtactggaagtcctcaccaaagcactcaggcaagataaagaaataaaaggcattcaatttggaaaagagaaagtaaaattatttcacttcactgacaatgcaaccttatttctagaaaaacctgaagactcccccaaaagactttttatcttgatatatgactttagtacagttacaggatacaaaatcaacatccaaaaatcatttcctagcagattgtctgtgatgctcaagcagattgtctgtgatgctcatcacatcctggtttcattattcactttcttttctaacttggtaggaagattttctgagttcacaggagattttgttttcacttatatttccatatgcctggtgacaaggacaggatgtctaggacttcccaaattaaatggagcagctaaaaatttatgttcgcacaacaaccagaaaaaccatgcctttcctatgtggataatcagcaaagctgaggacatcgggaagcaactcaggattgccagtttacagctcttctggatgtgcactggttaatgcatggaattcagcaacagcagactttgttcctttgatggatccagaagatcgccacatcaaggaatatggagagatgtccaaatttctaccaaagcaatgctgttctgtccgcagtaggcagtttgtgtggaggtccaggggcccagccaggttgcagctgatgattctgtagaaaggcctaaaattaattttagaaaagcatactcaagacaatagactattattacacggataaaaaatataagaataaagagtgtaaacacgttaccaaagtgaattcttgaaatggaagagaaacttggccttctttagcttcaccatttgttcctgccttccacctccaataatagtatatgtctcaatccttgtctatactccaaatttgaattgtataattaaattggttaaaacttacaa

SEQ ID NO: 460444 - DNA, 1910 bp, Homo sapiens
acttctccccagaccccatacctagaatgaaggtattggttttgtcaaaaccggcattcatgggatttgactttcatcctgcatatcacctcctaatgcctgcaggatatggaagtcatcgggaagtgcaggcactctgtcagcagaaaaatgggagatgggttttcactggaattttcacagcggaaatgttcctgaagctcatagccatggatccctactattatttccaagaaggttggaacatttttgacggatttattgtctccctcagtttaatggaactgagtctagcagacgtggaggggctttcagtgctgcgatctttccgattgctccgagtcttcaaattggccaaatcctggcccaccctgaacatgctaatcaagattattggaaattcagtgggtgccctgggcaacctgacactggtgctggccattattgtcttcatctttgccgtggtggggatgcaactctttggaaaaagctacaaagagtgtgtctgcaagatcaaccaggactgtgaactccctcgctggcatatgcatgactttttccattccttcctcattgtctttcgagtgttgtgcggggagtggattgagaccatgtgggactgcatggaagtggcaggccaggccatgtgcctcattgtctttatgatggtcatggtgattggcaacttggtggtgctgaacctgtttctggccttgctcctgagctccttcagtgcagacaacctggctgccacagatgacgatggggaaatgaacaacctccagatctcagtgatccgtatcaagaagggtgtggcctggaccaaactaaaggtgcacgccttcatgcaggcccactttaagcagcgtgaggctgatgaggtgaagcctctggatgagttgtatgaaaagaaggccaactgtatcgccaatcacaccggtgcagacatccaccggaatggtgacttccagaagaatggcaatggcacaaccagcggcattggcagcagcgtggagaagtacatcattgatgaggaccacatgtccttcatcaacaaccccaacttgactgtacgggtacccattgctgtgggcgagtctgactttgagaacctcaacacagaggatgttagcagcgagtcggatcctgaaggcagcaaagataaactagatgacaccagctcctctgaaggaagcaccattgatatcaaaccagaagtagaagaggtccctgtggaacagcctgaggaatacttggatccagatgcctgcttcacagaaggttgtgtccagcggttcaagtgctgccaggtcaacatcgaggaagggctaggcaagtcttggtggatcctgcggaaaacctgcttcctcatcgtggagcacaactggtttgagaccttcatcatcttcatgattctgctgagcagtggcgccctggccttcgaggacatctacattgagcagagaaagaccatccgcaccatcctggaatatgctgacaaagtcttcacctatatcttcatcctggagatgttgctcaagtggacagcctatggcttcgtcaagttcttcaccaatgcctggtgttggctggacttcctcattgtggctgtaccattaaatttgtctggcttaatttaatggggacttctgggacctgcagagactgtaaagggcgagggtggtggtgaatgccttggtgggcgccatcccctccatcatgaatgtgctgctggtgtgtctcatcttctggctgattttcagcatcatgggagttaacttgtttgcgggaaagtaccactactgctttaatgagacttctgaaatccgatttgaaattgaagatgtcaacaataaaactgaatgtgaaaagcttatggaggggaacaatacagagatcagatggaagaa

SEQ ID NO: 460445 - DNA, 426 bp, Homo sapiens
tactactactaaattcgcggccgcgtcgactgagcaagcaacctgagagagagagagagagagagcaaggaggaagccgcaatgccttttaagaactagtctgagaggccacacaccatcacttctgccctattctattaattagaaatgcatcaagtccagcctatacttatggagaggggaattaagctctatctcttaaaaggaagattgtcaaagaatttgtgaatacatttaaaatcaacacaaagagaaaaggaacaatcttagtgattcctttcaaaggaaaccataagacattggtacagatagtttatttcggagatgatcccagaaagcacaaattagaaattagagaattagaaattagagaattagaaattagagaaattagaaattagagaaagtgacacagggaagggagaa

SEQ ID NO: 460446 - DNA, 1889 bp, Homo sapiens
ccccgccgaccatgcgccgcctcccgcgggccctgctgctgcagctgcgcctcgccctgctggtggccgcgggggccccggaggtgctggtcagcgcgccgcggagcctggtgtgggggcccgggctgcaggcggccgtcgtcctgccggtccgctatttctacctgcaggcggtcaactcggagggccagaacctcactcgctctcccgcaggtgaaacaccattcaaagtcgtagtcaaatctctttcacctaaagagttggtccggatacatgtccctaaacctttggacaggaatgatggaacatttttgatgagatataggatgtatgaaactgtcgatgaaggcctgaagatagaggtcctttatggtgatgaacatgtggctcagtctccctatattttgaaaggaccagtgtaccatgagtactgtgagtgtccggaagatcctcaggcctggcagaagactctttcttgtccaaccaaggaaccacagattgcaaaagattttgcttcctttcccagcatcaatctccagcaaatgctaaaagaagtccccaaaaggtttggggatgagagaggtgccattgttcattacacgattctcaataaccatgtttaccggagatctttagggaaatacacagacttcaagatgttctctgatgagattttgttatcattgacaagaaaggtccttctcccagatttagaattttatgttaatcttggagattggcccttggagcatcgaaaagtcaatggaacccctagccccatacctatcatttcatggtgtggctctctggattcaagagatgttgtccttccaacgtatgacatcacccactccatgcttgaagccatgcggggtgttacaaatgatctcctctctattcagggaaatacagggccttcctggatcaataaaacagagagagctttcttcagaggtagagacagccgagaggagaggctccagttggtacagctgtccaaagaaaatcctcagctactagatgcaggaattacaggatatttctttttccaagagaaagaaaaggagcttggaaaagccaagttgatgggtttctttgatttctttaagtacaagtatcaagtaaatgtggatgggaccgtggctgcttacagatatccatatctcatgctgggcgacagtctggttttaaagcaggactcgccatattatgaacatttctacatggcactagaaccttggaagcattatgttccaattaaaagaaatctgagtgatttattagagaaagttaaatgggctaaggaaaatgatgaagaagccaagaagattgcaaaagaaggacagttgatggctagggacctactacagccacacaggctttactgctactattaccaagtactgcaggtacattgccagctggaaggaaattgctacaagcaactcttcggctaacttcaaaggatagcttgagtggcctcataacatggctgagcaagcaacctgagagagagagagagagagagcaaggaggaagccgcaatgccttttaagaactagtctgagaggccacacaccatcacttctgccctattctattaattagaaatgcatcaagtccagcctatacttatggagaggggaattaagctctatctcttaaaaggaagattgtcaaagaatttgtgaatacatttaaaatcaacacaaagagaaaaggaacaatcttagtgattcctttcaaaggaaaccataagacattggtacagatagtttatttcggagatgatcccagaaagcacaaattagaaattagagaattagaaattagagaattagaaattagagaaattagaaattagagaaagtgacacagggaagggagaa

SEQ ID NO: 460447 - DNA, 1050 bp, Homo sapiens
gatactcggttctagcatctcaacagaccaagacacgctccaatttgccaatgtttgaagcaggattgtgttacttcaagtttattagtgttttgtttattccatcatctgttagctccctgcagcatttttagaaggtaccaaataagaaaaacgtggatgaagatggagaaagcatacaaaacttttacacactggtttgaagggcaagccgttgtacattccttgaagtcaggtgctctgctcaacagaaggtgtgctgaataacgttacaggctctgttcccgggagacgtggaagctgtcaccgcgcggaacataaagaacaggccaagaccagtgcaggcatcgacgactttctccattcagagcctccgcgcatcccaaataaataaacacatcaaaacgtgcaaatacttccttaagttttcttggttccgatcgccctgtttaggcctcttgcgggtgttatttttcacaaaatgtcagtgaggaaaagaacaaactgtgctacacgcacacgcgtgggccgcagggctgggcagggcacagagggagaggcaaaccgttcccaggcacccctggatctcacggcatccccgaagtccgctgctgtgggatctgatggtggaggcagtagggtcatgggatctgagaggggttgtaagtcatcaggggggtcttcctccccacagcttggaaacttattattcgtatacaaaagcagtgagttcaacaacagcagcagcatgtgtccaaagcaattcagtggaagaaaggatctgggccggactcagcagcactcacaccaacaagcatgggtctgcagagcctgcagccagtcaaaagccatacagaaatggctggccctgggctccggtgtggatcagtgggctcgcggggagccctgggagagggtctgtgcagttttcactgtgaaaacgctgctagtacacacataatcctgaaaggaacggggaagagaggagattgtacagctacaggcaagagctgtgctgtttcagagatctcccagcagacgtccgagcac

SEQ ID NO: 460448 - DNA, 439 bp, Homo sapiens
  misc_feature (428)..(428): n is a, c, g, or t
  misc_feature (430)..(430): n is a, c, g, or t
gatactcggttctagcatctcaacagaccaagacacgctccaatttgccaatgtttgaagcaggattgtgttacttcaagtttattagtgttttgtttattccatcatctgttagctccctgcagcatttttagaaggtaccaaataagaaaaacgtggatgaagatggagaaagcatacaaaacttttacacactggtttgaagggcaagccgttgtacattccttgaagtcaggtgctctgctcaacagaaggtgtgctgaataacgttacaggctctgttcccgggagacgtggaagctgtcaccgcgcggaacataaagaacaggccaagaccagtgcaggcatcgacgactttctccattcagagcctccgcgcatcccaaataaataaacttctggcctcgttggcatcagcggtggagctntnccggccagg

SEQ ID NO: 460449 - DNA, 355 bp, Homo sapiens
gatactcggttctagcatctcaacagaccaagacacgctccaatttgccaatgtttgaagcaggattgtgttacttcaagtttattagtgttttgtttattccatcatctgttagctccctgcagcatttttagaaggtaccaaataagaaaaacgtggatgaagatggagaaagcatacaaaacttttacacactggtttgaagctgtcaccgcgcggaacataaagaacaggccaagaccagtgcaggcatcgacgactttctccattcagagcctccgcgcatcccaaataaataaactgtagcaggtataaatcggataaaatgatgagggcagtcgcaaacattgaggag

SEQ ID NO: 460450 - DNA, 1755 bp, Homo sapiens
aggagaagagggcaggcccgcagccgccctccggaggaggactcggggcctcgcgggcgccggaggaggttcctgggcctcggagggccgccccggcgcgccgccccggcgcgagcgggcgcgggcgggggaggggaagtgagaggttgtttatgaccggggactaatctcctccgcgagtcccagcgctccctctggggagtgcggttgaggggctgtcctcgcacggagcctcgctcggcctcgggggagccacgagaggtgggagttggacccgcagcgggccaggagccctgtcattggaggacccgccaaaaaggaagcaaaccctctttttctttatccaaccccaaatagctagggcctagggggaagactcacatatcgataaatggtttgttgcccgttttattctctgggaaatacaactgatcttaccaaagaaataacctgtctcttgccgtgtttacttagagccatagaatacctgtttcagagctgaaggggacctgagcccatgataatccattacctcgtgagaaagcggaaaaactgacttcagcttgcccagatggcgcagagaatgggtttcccgtaaccccgcctgtgtctttccttcagcctcgtcccaaatgccgtgggagggaaggcactctctgtcaagctgctgtcaccttacctgaagtaaggagtccacgcctgcatgtccgaggaaaacagttttctcaaacacattagttgaaaaactgaagacgctgcctaaaatacaagctgagttagagacagcccttgtaagactaggtctggttgttaaaaagagcctgggacctttctcccgtttccctcttgcttcctctctcgtcatctgacataccactctctttccccttccaccatcattggaagcttccaaaagcagaggctcgctctttccttgcctaacgcagccatggcttgtggtcccaagaagcatctgaagtgagtagcagctccaaagcactggatgctggataaattgaccagtatgtttgctccttgtccatccaccagtccccacaacattgacaagacagaagagaatttctctctgatctatgacaccaagagtctctttgctgtacatcatattacacctgaggaggccaagtacaagttgtgcaaagtgagaaaaatctttctgggaacaaaaggaatccctcatctggtgactcatgatggtcgcaccatccgctacactgatccccttatcaaggtgaatgataccattcagattgatttggagactggcaagattactgatttcatcaaattcgacactggtcacctgtgtatggtgactggaggtgctaacctgggaagaattggtgtgatcaccaacagagagaggcaccctggatcttttgacattgttcacatggaagatgccaatggcaacagctttgccactcaactttccaacatttttgttattggcaagggcaacaaactatggatttctcttccctgaggaaagggtatccgcctcaccattgctgaagagagagacaaaagactgccaaacagagcagtgggtgaaatggtcccagggtgacatgttagatctttggaaagctgtttaacatatcggagcctctattatttcatggtaaaacaagaataataacttccttattgaattaatatatggggaatgtccatgcttgcagttttgcaaaacacatagcatagtgtgaaaaatgtacctaatactattaa

SEQ ID NO: 460451 - DNA, 868 bp, Homo sapiens
agcggcgtccgcgcgcgcggggcggccgcggcggtgagcctgcgcgtcagggccgctggcctctccttggctgttggagagccatagaatacctgtttcagagctgaaggggacctgagcccatgataatccattacctcgtgagaaagcggaaaaactgacttcagcttgcccagatggcgcagagaatgggtttcccgtaaccccgcctgtgtctttccttcagcctcgtcccaaatgccgtgggagggaaggcactctctgtcaagctgctgtcaccttacctgaagtaaggagtccacgcctgcatgtccgaggaaaacagttttctcaaacacattagttgaaaaactgaagacgctgcctaaaatacaagctgagttagagacagcccttgtaagactaggtaggtatttacagggcctctcccactagctttgtttttccagagtttgttctttatccggaaattcttaatttgcctactgatcatttaaagaaagggttctattaacattgacacagaagagacactttgtggcactttttaaaaatctgagtctcgtgacttggtataacttctgaaacttactgttaatttatagcagagctatttgagtaatatgctcttctatgagtatgaacaatagaagaagtgtgatttttaaagtgatttggactacaaaataagagcatggaatataggctttacagccagtacttgctgaggatgtactgtgtattaggtgtggtgcatataaaaaataaataaaatgtggtccctgtcttcaaagagcttatgttttctaggaaaatgctacatattactagctactccaaggcagaaagttgttagacaccaaatcag

SEQ ID NO: 460452 - DNA, 1254 bp, Homo sapiens
aggagaagagggcaggcccgcagccgccctccggaggaggactcggggcctcgcgggcgccggaggaggttcctgggcctcggagggccgccccggcgcgccgccccggcgcgagcgggcgcgggcgggggaggggaagtgagaggttgtttatgaccggggactaatctcctccgcgagtcccagcgctccctctggggagtgcggttgaggggctgtcctcgcacggagcctcgctcggcctcgggggagccacgagaggtgggagttggacccgcagcgggccaggagccctgtcattggaggacccgccaaaaaggaagcaaaccctctttttctttatccaaccccaaatagctagggcctagggggaagactcacatatcgataaatggtttgttgcccgttttattctctgggaaatacaactgatcttaccaaagaaataacctgtctcttgccgtgtttacttagagccatagaatacctgtttcagagctgaaggggacctgagcccatgataatccattacctcgtgagaaagcggaaaaactgacttcagcttgcccagatggcgcagagaatgggtttcccgtaaccccgcctgtgtctttccttcagcctcgtcccaaatgccgtgggagggaaggcactctctgtcaagctgctgtcaccttacctgaagtaaggagtccacgcctgcatgtccgaggaaaacagttttctcaaacacattagttgaaaaactgaagacgctgcctaaaatacaagctgagttagagacagcccttgtaagactaggaaaggccttgtgaggacataaccaggaagagagtcctcaccagaacctgaccatacctgcaccctgatctcaagcttccagcttccagaaccatgagaaatcaatgtttgttgttttagccacccagtctacagaaatttgttatagccaccctagctgactaccacattggacatcacagcaaacactacaaccagtaagtctctgcttgtattaactggaacatttccaaagcctgtcctactcaggataaatgcacaaaagaaaaattagtagttgacggcagaattcttaagagagcagttttgcattttttaccaagtaatacttatttaacttctagggcagtaaagtaagagaaattgttactctccacctcctgccatcatgaatttaggaaatgtagaaagttattctgttaataaagatgtgaacttgctgttgaagagaaa

SEQ ID NO: 460453 - DNA, 1848 bp, Homo sapiens
tacttctcactactgccacaaatatcaccatgctcaaaggcaccattatctctcctctggattacagaagtagcctcttaacagtaggcatactgatctcttcacaatgtaagatcatggcacttctcttctcaaaactccccgacagtttcccattagccagagcaaaagccaaagtctctggagtagctaaaagctcctgtataatttatgtgctccttttttgcccctctggtggtttgccttgtttcgccctgccttgctcacttcgcttcagccacattggccttgttgctgttcctcacacacaccgtgcatgccccgccacacatgccttacctgttgctcctgttggttcctttgcctggagtactcttcctcaagaatgtcctccttgccttcaagtctttgctaaatgttgccttctttgttttatttatttatttatttaagatatgatcttgagctgtgtcccaggctgcagcaggaaaggcctagagctcataaagaacatagctttgcctcttcataaattctagtcacatgcatcaaacatgctttcagaatacatatgaacttgcttctgctgcacacttatgaagcaaccaccaagtctcccaaccttagaagttgcaaatgtattccttttcattctcagtaagcttttaaaatatttttttcccttggtgtccaatgtaaacatattgcaattaactttgggaaaaaaaacaagattctttaaatatattgcattcatatgcttaaaatgtaggttaccaatatagttttaattttttatagaagatacaaacaataaagtgccgctgatagaccctgaaggaggtctgcctctcccaaaggcagacggcaaacaatataggctacagacacaaacactgggacttcgtattaattgtgctgccacacaaagggggtgtggtttggggttgaggggctcactggccagtttttccatgtttctcaaataaaactctggtgtcatcaagaaacatggtggagggagacatgaagactttagagacaggaaccactgcagaaatatcaggagatggggaggcagaggaaagaaaggagagatctgtggatcccgtgagcaccccaaattggaaccactccttaccgtgtctcaaggaagcaacagacctccaaactgcatggtgtacctcaaaagagcaagacccaagcaaaaagaatgctgcctgatttcctgacattaacaatgaacacagccagactcaagaggaggaagctactgggaccacggcagtcaaggaaacaccatcaacacccagtcttcctcccacattactcagagacttttatctttgccatccttaaacacattcctgcaggtctccagatcccttccagcccatcttagataaaactgtgcaggaaaaatgtgcttctaatatagaggtttccatctggacaccttgtatttgaatcacaactcaaacttttttaatgccaccctctgtttccctactggatcttaaagacaattggcactgaagcataataaaataatcaattatgtctcatctatgctatgctatttgagagcatttccctcaaaatctcttctatactttgatttaaaagtaagatttataccaaaaagccaatgaatgaatattaatgtgatattttagatgatatctaatgaaaaatctcaaatatcatacaatgtaattaatttatattcttaatataccagtttctcaccaactatgagaatttgattcctaaaaatccccttggtagaagaattcagattcgtgaaataaaagatcttacagaaaaagaatattagtagttaatgtt

SEQ ID NO: 460454 - DNA, 1425 bp, Homo sapiens
tacttctcactactgccacaaatatcaccatgctcaaaggcaccattatctctcctctggattacagaagtagcctcttaacagtaggcatactgatctcttcacaatgtaagatcatggcacttctcttctcaaaactccccgacagtttcccattagccagagcaaaagccaaagtctctggagtagctaaaagctcctgtataatttatgtgctccttttttgcccctctggtggtttgccttgtttcgccctgccttgctcacttcgcttcagccacattggccttgttgctgttcctcacacacaccgtgcatgccccgccacacatgccttacctgttgctcctgttggttcctttgcctggagtactcttcctcaagaatgtcctccttgccttcaagtctttgctaaatgttgccttctttgttttatttatttatttatttaagatatgatcttgagctgtgtcccaggctgcagcaggaaaggcctagagctcataaagaacatagctttgcctcttcataaattctagtcacatgcatcaaacatgctttcagaatacatatgaacttgcttctgctgcacacttatgaagcaaccaccaagtctcccaaccttagaagttgcaaatgtattccttttcattctcagtaagcttttaaaatatttttttcccttggtgtccaatgtaaacatattgcaattaactttgggaaaaaaaacaagattctttaaatatattgcattcatatgcttaaaatgtaggttaccaatatagttttaattttttatagaagatacaaacaataaagtgccgctgatagaccctgaaggaggtctgcctctcccaaaggcagacggcaaacaatataggctacagacacaaacactgggacttcgtattaattgtgctgccacacaaagggggtgtggtttggggttgaggggctcactggccagtttttccatgtttctcaaataaaactctggtgtcatcaagaaacatggtggagggagacatgaagactttagagacaggaaccactgcagaaatatcaggagatggggaggcagaggaaagaaaggagagatctgtggatcccgtgagcaccccaaattggaaccactccttaccgtgtctcaaggaagcaacagacctccaaactgcatggtgtacctcaaaagagcaagacccaagcaaaaaggttaaagaagtccacaattcctcaacaaaactttgggaccagacacatttcgggattcagaactttttgggttttaaagatataagagtaagtgttctttatattattacatggcaactccaatgcagtactctgtaataaagcaccctgatatttctacagaaacatttattaaagtttacattgaataaaatccgatgcggccgcttccca

SEQ ID NO: 460455 - DNA, 1370 bp, Homo sapiens
tacttctcactactgccacaaatatcaccatgctcaaaggcaccattatctctcctctggattacagaagtagcctcttaacagtaggcatactgatctcttcacaatgtaagatcatggcacttctcttctcaaaactccccgacagtttcccattagccagagcaaaagccaaagtctctggagtagctaaaagctcctgtataatttatgtgctccttttttgcccctctggtggtttgccttgtttcgccctgccttgctcacttcgcttcagccacattggccttgttgctgttcctcacacacaccgtgcatgccccgccacacatgccttacctgttgctcctgttggttcctttgcctggagtactcttcctcaagaatgtcctccttgccttcaagtctttgctaaatgttgccttctttgttttatttatttatttatttaagatatgatcttgagctgtgtcccaggctgcagcaggaaaggcctagagctcataaagaacatagctttgcctcttcataaattctagtcacatgcatcaaacatgctttcagaatacatatgaacttgcttctgctgcacacttatgaagcaaccaccaagtctcccaaccttagaagttgcaaatgtattccttttcattctcagtaagcttttaaaatatttttttcccttggtgtccaatgtaaacatattgcaattaactttgggaaaaaaaacaagattctttaaatatattgcattcatatgcttaaaatgtaggttaccaatatagttttaattttttatagaagatacaaacaataaagtgccgctgatagaccctgaaggaggtctgcctctcccaaaggcagacggcaaacaatataggctacagacacaaacactgggacttcgtattaattgtgctgccacacaaagggggtgtggtttggggttgaggggctcactggccagtttttccatgtttctcaaataaaactctggtgtcatcaagaaacatggtggagggagacatgaagactttagagacaggaaccactgcagaaatatcaggagatggggaggcagaggaaagaaagcgtgagcaccccaaattggaaccactccttaccgtgtctcaaggaagcaacagacctccaaactgcatggtgtacctcaaaagagttaaagaagtccacaattcctcaacaaaactttgggaccagacacatttcgggattcagaactttttgggttttaaagatataagagtaaatggcaactccaatgcagtactctgtaataaagcaccctgatatttctacagaaacatttattaaagtttacattgaataaaatccgatgcggccgcttccca

SEQ ID NO: 460456 - DNA, 2407 bp, Homo sapiens
gtggggcacaggcggacggagggccaggagaaggggctgtgctgccagcaggcagtgctttgagctctaatggatgaacattgctaaccagcgaaggtggagagagggcacccgtctgagaagatgaagaggcagcaaagcacagctggcctcggggaaccggaagccacagggacatcaggctgtgtgctgctgtctgtcggccaccagctgggggactatcctggacctggaagggcatccctgacactccccaccagatgccaggggcacccccagccccaggtgagaaccacggatcccatggcgaatgaggtcagcctgtgggaagtggggctgggactgctctgcacagcttaataggaaagttgggttctatttggtggggttttggtcatgccaatggctggtcagggctgtccgtgaggaactgatttgaggacaagttagagaaggggctgccgaggccagtggggcactcgctgtctgggtctaagaaaaagaaaataaaggctggtgatgtgacagttggtgggagcacagacggaaggaactggcggtggagacacacggttggccctgcacagggctacggtagctacctgggggtcatcctattaattctcctcatggtcccaagaggcggctgtgaggatccctctcctgaggacaaaactgctccagagccacacagaaccaagatccgggccaactccaaagcgggcgatcttgacccctcacccgtggtcctgaggcagggatcggagccccctggacacacagacactcccaccttgctgaagataattcgctttctcatccgtgaaagaataaagtcggactaactcatctccacactcacttccaactctaacaacctgtgttaggaaatcaaaggtaaggactctgaccacaaacccaagaagcaaaacccgagactcacggaacgacgccaccattgcagttcccagcttgactagttgtttttcttttctggtctgttctgctcttttggtttaaataattaaagatccttgttgacaagtaaaaaaaattctttatgaagctaaaaaaagtgctgtcttgaaataatggtgaaattttaaaattagttttgtacttaaacatgtccccaaagtgaagcacagcggccaacgtccgtcacggtgccgagcagtgccagccgctctaccatggccgacggcctgattcccaagggctgcgtccaggggccaaaggtacaagcggccagcactgtaactggaaaccacgcgggcaccagcgtgaactcagacccgacagccagcaccgtaactggagaccatgcgggcaccggtgtgaacccagactccacggccagcaccgtaactggagaccatgcgggcaccggtgtgaactcagacccgacggccagcaccgtaactggagaccacgcgggcaccggtgtgaacccagactccacggccagcaccgtaactggagaccacgcgggcaccggtgtgaacccagactccacggccagcaccgtaactggagaccacgcgggcaccggtgtgaactcagacccgacggccagcaccgtaactggagaccacgcgggcaccggtgtgaacccagactccacggccagcaccgtaactggagaccacgcgggcaccggtgtgaacccagactccacggccagcaccgtaactggagaccacgcgggcaccggtgtgaacccagacccgacggccagcaccgtaactggagaccacgcgggcaccggtgtgaacccagactccacggccagcaccgtaactggagaccacgcgggcaccggtgtgaacccagactccacggccagcaccgtaactggagaccatgcgggcaccggtgtgaacccagactccacggccagcaccgtaactggagaccacacaggcaccggtgtgaactcagacgcaacggcaccctcctgggctgctccagccaccaccagaacccgttctgcagctgaactcgaagctgattctggaaggaactgaggaggatgaggacgagatccttctacctcaaccgggatcaattttttaatgatttctttcttttagaaaaatgttaataagatactttgttctaaaatgaccaggatttcagcagcttctacatttcttcatgtcaatcaaagcttaggcacgtgggttacttcactgttctctgtaccctttccaaataaaacccggggccgcctgtgtacccaagagcctgggcactgagcagagagagaaaacgtccagggcaacagcgttcacattccggcggtgccatagagcagacggggggagtccgaggcggtgccgcagagcggacgcggggagtccgaggcggtgctgcagagcggacgcggggagtccgaggtggtgcc

SEQ ID NO: 460457 - DNA, 556 bp, Homo sapiens
ctcagggtggagaccgcagccttgatcaggcccagcctcactgctgggcacagcctgaggatcgccatacatgatgctgaggtgtcccaacgttggggtgcccagagccactcagccgagaatgtggtgctttctgtaactgccctcatttctttacagtatagatctggactccatcctttgcaatgtgtggggttctaggaagaggccagccagccgtggaagtgtcctgggctctgtcccggagacgacgaacttggctccccacgagggcggcctattccccacagtgtcccccgggggccacacctgcacccaccttgctgaagataattcgctttctcatccgtgaaagaataaagtcggactaactcatctccacactcacttccaactctaacaacctgtgttaggaaatcaaaggtaaggactctgaccacaaacccaagaagcaaaacccgagactcacggaacgacgccaccattgcagttcccagcttgactagttgtttttcttttctggtctgttctgctcttttggtttaaataattaaag

SEQ ID NO: 460458 - DNA, 2059 bp, Homo sapiens
gtggggcacaggcggacggagggccaggagaaggggctgtgctgccagcaggcagtgctttgagctctaatggatgaacattgctaaccagcgaaggtggagagagggcacccgtctgagaagatgaagaggcagcaaagcacagctggcctcggggaaccggaagccacagggacatcaggctgtgtgctgctgtctgtcggccaccagctgggggactatcctggacctggaagggcatccctgacactccccaccagatgccaggggcacccccagccccagtatagatctggactccatcctttgcaatgtgtggggttctaggaagaggccagccagccgtggaagtgtcctgggctctgtcccggagacgacgaacttggctccccacgagggcggcctattccccacagtgtcccccgggggccacacctgcacccaccttgctgaagataattcgctttctcatccgtgaaagaataaagtcggactaactcatctccacactcacttccaactctaacaacctgtgttaggaaatcaaaggtaaggactctgaccacaaacccaagaagcaaaacccgagactcacggaacgacgccaccattgcagttcccagcttgactagttgtttttcttttctggtctgttctgctcttttggtttaaataattaaagatccttgttgacaagtaaaaaaaattctttatgaagctaaaaaaagtgctgtcttgaaataatggtgaaattttaaaattagttttgtacttaaacatgtccccaaagtgaagcacagcggccaacgtccgtcacggtgccgagcagtgccagccgctctaccatggccgacggcctgattcccaagggctgcgtccaggggccaaaggtacaagcggccagcactgtaactggaaaccacgcgggcaccagcgtgaactcagacccgacagccagcaccgtaactggagaccatgcgggcaccggtgtgaacccagactccacggccagcaccgtaactggagaccatgcgggcaccggtgtgaactcagacccgacggccagcaccgtaactggagaccacgcgggcaccggtgtgaacccagactccacggccagcaccgtaactggagaccacgcgggcaccggtgtgaacccagactccacggccagcaccgtaactggagaccacgcgggcaccggtgtgaactcagacccgacggccagcaccgtaactggagaccacgcgggcaccggtgtgaacccagactccacggccagcaccgtaactggagaccacgcgggcaccggtgtgaacccagactccacggccagcaccgtaactggagaccacgcgggcaccggtgtgaacccagacccgacggccagcaccgtaactggagaccacgcgggcaccggtgtgaacccagactccacggccagcaccgtaactggagaccacgcgggcaccggtgtgaacccagactccacggccagcaccgtaactggagaccatgcgggcaccggtgtgaacccagactccacggccagcaccgtaactggagaccacacaggcaccggtgtgaactcagacgcaacggcaccctcctgggctgctccagccaccaccagaacccgttctgcagctgaactcgaagctgattctggaaggaactgaggaggatgaggacgagatccttctacctcaaccgggatcaattttttaatgatttctttcttttagaaaaatgttaataagatactttgttctaaaatgaccaggatttcagcagcttctacatttcttcatgtcaatcaaagcttaggcacgtgggttacttcactgttctctgtaccctttccaaataaaacccggggccgcctgtgtacccaagagcctgggcactgagcagagagagaaaacgtccagggcaacagcgttcacattccggcggtgccatagagcagacggggggagtccgaggcggtgccgcagagcggacgcggggagtccgaggcggtgctgcagagcggacgcggggagtccgaggtggtgcc

SEQ ID NO: 460459 - DNA, 895 bp, Homo sapiens
aagagactgagaaaagaccccaagataggggcagaaccaagaatgctgtcctccaagacaacggaaggaagcatttgccacatgacaaatgatgcgggtgggatcaagtaagacaaggacagaaaatagaccatgacatttagctatgtggaaatcattgatgacatagattagagcaatttcagtgaagtgatgaagtgaaagtttaaatttgatggtttaaggaaaggatgggaggatagaaatggaagatagtgtatacattggtcgtctcttaaaaataataatccaaactggaaacaactcaactatcccatcaacagtttttatttttagtagagatgatgtcttgccacattgcccaggctggtctcaaactccaggcctaaagggatcttctgactttggcctcccaaagtgctgagattataggatcgaggctatcaagctacagatgatcttacaaatggaaccccaaatgagctcaactaacaactaccaaggacccctggaccaacccgctggccctttcaatggcctaaagagttcccctctggaggacactacaactgcagggtcctttctttgcccctatccagcaggaagtagctagagtggtcatcacccaattcccaacagcagttggggtgtcttgttaagtgggggagattgagaggtgaagccagctgggcttctgggttgggtggggacttggagaacttttctgtctagctagaggattgtaaacacaccaatcagtgctatgtgtctagctagaggttgtaaatgcaccaatcagcactctgtaaaaacggaccaatcagcactctgtaaaatggaccaatcagtaggatgcgggcagggccaaataagggaataaaagctggccacctga

SEQ ID NO: 460460 - DNA, 826 bp, Homo sapiens
cgtcgacgcgagaagacgacagaaggggacagacaggctgccagccctcagcatggacccggcacatggaatctgtgatcttaaaagagtcaagtgactacctttggcaaccaaaagagacactgccttttagaaggcatatcatctgaaactggctgaaagagctgtcttacttaggaagaaaaatctctcctttggaaagagctggaacttttagaggggagagagattccttttcctcagccgggcacagagccaacctgaagtgtagcactgtggtgacctggcgggatctgctctccagtcactcccgagggcccttctggggacaaggagacttttctgtgcggcctgttgatttgagatcgaggctatcaagctacagatgatcttacaaatggaaccccaaatgagctcaactaacaactaccaaggacccctggaccaacccgctggccctttcaatggcctaaagagttcccctctggaggacactacaactgcagggtcctttctttgcccctatccagcaggaagtagctagagtggtcatcacccaattcccaacagcagttggggtgtcttgttaagtgggggagattgagaggtgaagccagctgggcttctgggttgggtggggacttggagaacttttctgtctagctagaggattgtaaacacaccaatcagtgctatgtgtctagctagaggttgtaaatgcaccaatcagcactctgtaaaaacggaccaatcagcactctgtaaaatggaccaatcagtaggatgcgggcagggccaaataagggaataaaagctggccacctga

SEQ ID NO: 460461 - DNA, 816 bp, Homo sapiens
cgtcgacgcgagaagacgacagaaggggacagacaggctgccagccctcagcatggacccggcacatggaatctgtgatcttaaaagagtcaagtgactacctttggcaaccaaaagagacactgccttttagaaggcatatcatctgaaactggctgaaagagctgtcttacttaggaagaaaaatctctcctttggaaagagctggaacttttagtaaaactgaacagtgaggtggcggaagtttttatttttagtagagatgatgtcttgccacattgcccaggctggtctcaaactccaggcctaaagggatcttctgactttggcctcccaaagtgctgagattataggatcgaggctatcaagctacagatgatcttacaaatggaaccccaaatgagctcaactaacaactaccaaggacccctggaccaacccgctggccctttcaatggcctaaagagttcccctctggaggacactacaactgcagggtcctttctttgcccctatccagcaggaagtagctagagtggtcatcacccaattcccaacagcagttggggtgtcttgttaagtgggggagattgagaggtgaagccagctgggcttctgggttgggtggggacttggagaacttttctgtctagctagaggattgtaaacacaccaatcagtgctatgtgtctagctagaggttgtaaatgcaccaatcagcactctgtaaaaacggaccaatcagcactctgtaaaatggaccaatcagtaggatgcgggcagggccaaataagggaataaaagctggccacctga

SEQ ID NO: 460462 - DNA, 1266 bp, Homo sapiens
cgtcgacgcgagaagacgacagaaggggacagacaggctgccagccctcagcatggacccggcacatggaatctgtgatcttaaaagagtcaagtgactacctttggcaaccaaaagagacactgccttttagaaggcatatcatctgaaactggctgaaagagctgtcttacttaggaagaaaaatctctcctttggaaagagctggaacttttagtaaaactgaacagtgaggtggcggaagataaatatgctgaggcatgttttcaaggaggggagagagattccttttcctcagccgggcacagagccaacctgaagtgtagcactgtggtgacctggcgggatctgctctccagtcactcccgagggcccttctggggacaaggagacttttctgtgcggcctgttgatttgactcagaagattacacactaaccagtccactttattaaaccgggaatggtgcaaaccatttatcaaccaacaggacacaagttggtgaattctcctgctaaattggtttgtgcggttcgcaacacatcaattcctagaactactggatggggcattggggctgcccatgctgcaggggcagaacgctgggcacttggttcaaaaccctggtcacccctccattgctttggacagcgactcaccttattattgcagcaagctagacatgcgcaaccactcgtatttgaacgtgacgacatgtgcccttgctcgcatcctggccatattggggacgttaaccacgaacatgaattcacccgggcttgcgggtattgggccaaaaatactgggttatggacaacaagtcttattcgtgaccagtatggaactgggtcagaattgccatgataaacacagtgtgttgatatgccaaaatacaagtccaattgtgatggtggtgaagagaacctccggtgaaagagtgacacgaattacgggaaatatgtgtctaatgtgggcaatgttgtgaacgcccagttttggtgacattgaatgctggcaatgattgtagcaagaggggtcgttttcaactggagaaacccagtgtgtgatagtgtgagtataagaatttaggagacttagaatgttactcagactgataaaagagaccctatggacgataaatgtagtggagaattgtggcgtgctatgagaaaaagagtagcagataagaattgagcggagatagtgtacaaagagtgatcatgacatgttgaaagaagtgtattgtgtaagaaaagcgattgaatt

SEQ ID NO: 460463 - DNA, 881 bp, Homo sapiens
cgtcgacgcgagaagacgacagaaggggacagacaggctgccagccctcagcatggacccggcacatggaatctgtgatcttaaaagagtcaagtgactacctttggcaaccaaaagagacactgccttttagaaggcatatcatctgaaactggctgaaagagctgtcttacttaggaagaaaaatctctcctttggaaagagctggaacttttagtaaaactgaacagtgaggtggcggaagataaatatgctgaggcatgttttcaaggaggggagagagattccttttcctcagccgggcacagagccaacctgaagtgtagcactgtggtgacctggcgggatctgctctccagtcactcccgagggcccttctggggacaaggagacttttctgtgcggcctgttgatttgagatcgaggctatcaagctacagatgatcttacaaatggaaccccaaatgagctcaactaacaactaccaaggacccctggaccaacccgctggccctttcaatggcctaaagagttcccctctggaggacactacaactgcagggtcctttctttgcccctatccagcaggaagtagctagagtggtcatcacccaattcccaacagcagttggggtgtcttgttaagtgggggagattgagaggtgaagccagctgggcttctgggttgggtggggacttggagaacttttctgtctagctagaggattgtaaacacaccaatcagtgctatgtgtctagctagaggttgtaaatgcaccaatcagcactctgtaaaaacggaccaatcagcactctgtaaaatggaccaatcagtaggatgcgggcagggccaaataagggaataaaagctggccacctga

SEQ ID NO: 460464 - DNA, 1677 bp, Homo sapiens
ctgccagcacgctgtcacctctcaacatgatggcaccactgcactccagcctgggcaacagaacaggggtcgccaacccctggactatgaacctgtccatagcctcatctcagcaggaggtgagaggtgggcaagagagtgaggcttcatctgtatttacagccactccccatcgcttgcattactgccggagctcttcctcctgtcagatcagtgtggcattagattctcagagaagcgcgaaccctactgtgagctgtgcatatccttcttggcattcctgtggagcaacccttcttcctggatacaggacagtcaaggcaggccactgtgcaagcacaaacttccaggaaaagcataaagataagacaatgaaggttgcggagatgacagtggaggatgatggtgggccagcactggtggaggctgtggctgctgctaaggagacggaagtggagaagatggcactcgagacaatgactaaggagatgacggcagatatgatcacaatagacccaatggctgctgaggcagaggtccgtgagcataggccagggggtggagctctagccgaggacctgcccttctccacccaaaacttccctgacccccctcccgtttcaaatccaatggccacagcaggtgaggtggctgcagcccaaggacaacaggccttattattgttggggaggcagcagctgctggtgcggaggagatgataaagttgatgtggccataataactggaggggggaggagggataagagtacaatagagggttgtgtgacacagacaggctgccagccctcagcatggacccggcacatggaatctgtgatcttaaaagagtcaagtgactacctttggcaaccaaaagagacactgccttttagaaggcatatcatctgaaactggctgaaagagctgtcttacttaggaagaaaaatctctcctttggaaagagctggaacttttagtaaaactgaacagtgaggtggcggaagataaatatgctgaggcatgttttcaaggaggggagagagattccttttcctcagccgggcacagagccaacctgaagtgtagcactgtggtgacctggcgggatctgctctccagtcactcccgagggcccttctggggacaaggagacttttctgtgcggcctgttgatttgagtaggtatagcctttctgctagccaccagacacagctctataagaatttactctcaactatcccatgaataagaaaacacttagggaggcttttacctatccatgaatagttacttctgttcaacagtcctacaaatgttttcgaatgcctgaagtgtgccagacatgtactaggcaacagggttagaaaagtgtgggaagcttggtccctggcctggagaactttagttcagtggggagcttacagatattccccccatacctttcagagcatggatgtttacaaagttgtcaaagagtattttggtgtgctttggcaatggtggatctagtgttgtgggccttctaaaaatatgaaatgatgaattcacaattagttataaggttttgaaagggattaatacaaatgggtggggtggggtggatgggaggaaggtcctgaaatagttttattaacttggtagtaaataatttctggatttgaggagtattaaaagga

SEQ ID NO: 460465 - DNA, 699 bp, Homo sapiens
cagcttgtgaaaatgtgtgttataatgctgttaaatcaatggcataacattgtctaccctttagaaaactctttgtatcatgtatcttttataaaatttaagtgtattgcttttaagatagcaaaagcagaaatagtcctcaactgtttttccgagtgttgccacttctacagcatctacactcatctgattcacttgggttgtagatttcatttttatgcatctctgcaaccttttctcttcttcaacacctgtaaaaaaaataataaaaacgtgcatatctattatcttaatatttatttggcttctagtaaaaatagtttttcctgtatcccaatatttgtgatttgttatacaaacaaaagtaggtcaagtgagaaaagggctcagaattctcctgaagaacttctacaacttcctcatgaacctattgattatgtttcagaagaacactattgcaaacaaataaaagaagatctctgggaggtatgatgccattggacagcattttacacacagtggaacttctttccaaatcggaatcaatcctctgaaagcctgccattgctttatgaagtaaacttatggaatattctaaatcttttgtcatttcaacaatattcacgacatcttcaccaggagtagattccatttcagagacccctttcttcgcttattgtaagaagcaactccttatcc

SEQ ID NO: 460466 - DNA, 907 bp, Homo sapiens
ttctatttgcagctgcacctgacccttgaaaactgggaaagtgtcggttttgcctattctgatttcattccttgggagatgatgtttaaattccgggcaaacatccttcgcgattgcaggaggaggtaaaaaactgaggctcagtgaagttaagcaacttactcaaggtcaggcagtcatgaagctgggattccatcattcatctattaattcaaaacacttttgctgagaacctatgtatcgtgccctatgttaggtgttgggaaaacagcaattaagacagtgtccttggcctcataagccttacaatcaagtgggagaaagtaaacaagtcatcaaacaagataaccgctagttataatcactactgttaagtaaataaagagttatgtgatcaagagtaactggcatgggatagggagagcttctctgaggaggtggggaaagattcacctgaggagacgagtcaagaacaagctctctgattctagagttcttgaccactatgttgtattggcctataaaaattgtaccatctccaaaatctgcccttaggggagaatggattagagggggaaacctgaggcagggcgtcagaaagactgactctagcaacgtggtaattcaggagccgaggatggtggccaaaggaaagatgtgcccacatcccccactcccctggaaggcaagtcccagccatggcagaagtggagtagagaaggagccatctgattttccctggatatctctagtcacagagtactcaccatcgaatgaggctggcagccccattccaggttcaatttgcctccttgaaactttcactcttcattccaaatgctctcctctgtaactccaaaggcaaagtctgctcactcttctacatgacagcccttcaaattcttgt

SEQ ID NO: 460467 - DNA, 1991 bp, Homo sapiens
agcagcagtggatggttcaggttgggaagaagagcagtgggattgccagttaaggttgtggaatcaaagagcaaaggctgttgtgaagtggaatatcaggctcaaatggaggtccctcccgaatgagcactgacacctgtgtgcccggacatccacgagggccccaacacctgtgctcctgacagctccatgcactaagcagggcacagtctggatccagggactgactgtctctggcattgagcggttggtaatcaataccccaccctccctgttctcagtcacttggggacaaaaaagaaagcctgcagaacacgactgctggcccacctgccagagtagccaaggaaacaggatgcccgctaaagcatgttaaggaaggtgtggagcagctgctgggaactgtcttgatttaaaggaagacatggaggactgctgtatgctaccgtattacacggcccaaagcagccccgcaatgggcatgtttaacacctccatggggaagctgcagcggcaactgtacaaaggcgagtatactatattcaggtatgcacccatgtttgagagcgactttatccagatcagcaaaagaggagaagtgattgacgtgcacaaccgtgcccgaatggtaacaatgggcatcgttcgcaccagcccctgcctcacactacctgatgtcatgctgctggcccgaccagctgctgtctgtgacaatgccaggtgtggtcctgccacccagaaaagagaaagtccgcctgcagagatcttagaactaaccaggctgcttcccttgatgtttgtgaaaataaccatccacaacagcgtaaaaaaacagctccacctgaagcttgccacgggccgctctttttatcttcagctgtgtcctccatcggatgcaagtgaagacctttttgttcactgggaaaaccttgtttacatcctgagaccaccagtggaggcttacagtgataccagggctatcctagctgggaacacattggactcatctgtgttggaggaagtgcagaggagcccagtgggatatgccatgaagttttgtgaagagaaggagcaattcagaatcagtagacttcacatgaatgctgaaatgtttgggtccacctattgtgattatacaatagagatatgaatccaacatacctcccacatatactacgttcaagagttcacacacccctgcagtcataaaacctatagtgcctgatgaaggggcagggtagcaacagcagtagtgatgacagtttgaatcacagcattgccacacattaactgtgagtttcagtagattgtttctttaaatggtcaccttgagaccatacatgtataatatctggaacatagtaggcactgtgtaaatggtagtgttgagaaacaaattctgagtttaatcatactttccagaaagggcttaattttcccagtctcttcattcttgatttcctttcttaaatcttaattaactgctttgcaattgtcccataaaagctctatttacagtaaatcttctcagtatcttccaagaattttaatcccctgacgctatttagaattctaaattttcatgaatttgtagaaatttcaatctagttacaatggaaagataattgcaaagcactcatcttttacctggttctctccaattttagtattcttggagatagaaaaataaaatgtaatataggatcaattcataatctggacaaaaactggaaattagatcattttagaattgtaagatccacatccatgggattagccaatattctaattttgcaagtaaaaagtctgctcgagtctaaagtaatacatcacatggtttgagaaccagaatgtataggtaacctggcccccaattatgtctgtattgtttccataacactcatgattctgacaagcactgtgctttgaatataaaagatatttgatacatgtttgctggatccaattaagggctataaatgtgaaatata

SEQ ID NO: 460468 - DNA, 984 bp, Homo sapiens
gattctgcgattcgagagacagtcccgcacaataaaggattaccccgcggccctacaatcttggagagtcttcctatacattcctgaatgcaactacatgtaaatcaaggcttgattgcacttcggtttggaggtttaccaagaattgttcaccatttgggaaaaccacgcgcttcactggccacgctgctcctggtcccggagacccaacaatctgcatttgctgccgtcacgttcaggcgactccccaggcgcggctactggctacttctctacattttccaagggtagtagtgccaagcattttcagattgaaatatgtactttcttacttattgctttccttctatttcctctttatgctacaggtgggaagtcggtactgggttgcagggggctgggaaccagctccgcagccaggagaggctgcagacaccggaggatcgggttctgagagagacgcatacggacttggggccgggggtgactcgccgggaactgagggcccgcgaccctcccgcccaaggccgcccctggaagcggccgcgggtgagtggcaagacgcttacccgtacccgacctccgcgtgtggagcgttgccatagagaccgacgcgccctggacgctacacccacacagcccaggacgctaggccttttctgggccgcccccgccgccccaggccgaaactccatccctttcccccaccctgccgagctcccgaagccctgtggcggctccgggcaagaactaagggcggcccctgcaagcgtacctgctccgccggctccgcggggccaacgaagctagcgctccccgctcttgcttaaggtgcaccagacgcttcgcaaacgttctctcttttctttacaacccgtcaaggcagtagtctcccagttttacaaatgagctaaactgatacaggaagagtgtttcttgtacaaggtctcaaatattgccaaaaggtggacgtgagactggaac

SEQ ID NO: 460469 - DNA, 3488 bp, Homo sapiens
tttaggggagcaggttatgcaggaagttgtccagagggcagtactagcggcagtgcccgcggggatggaggcagggaggggggacgatggcgggacgggtggcgccggggttccagccctgcgcctgctccggagcaccgggcccctctcgctgaccccctcgtcccaggaccccgcaggcccgagtgcctgggctcgtcctctttcgcgcccgctgccaggtgccagggccgcgcaggcgggcggaggtgggcaggaagcgccacgccgaggagccgggactctgggagctagcgggagacgcaggtttcgtcccaagccgacccctctgggccgcggctgacggctcccggaactgggcatccgcgggtaaaggcctagcgggcttgataacccttgcgccatggctgggaggccgcgctgagcggggggcagggcgggccgggggaggaggctgtgcaagggccgcggggagatcccggccgagaacgagagggacggagctgggcgctgaatggcgggcgttctggcaagtctccccctgcgttcccgaggccacccgaaagtaggagagctgtttgggacccagtttggtggaggagctctggacctgtaggaacaccgcccctgacagaagtcggtcctaggccccccaggctctgaccttctttcccaggatgaggtggggccaccatttgcccagggcctcttggggctctggttttagaagagcactccagcgaccagggcctttatacgccaccaccgaagctcggtagatagcgctccccaacccgggggggatggacgctgtttccccagcgcttatgcaattgtaaagggactgagtgggacctggtcacggggtgtggtgggcaaacgggctggaaggagaagcaggaagctatacagcggcaccgccggaacctggctgagtggttcagccggctgcccagggaggagcgccagtttggcccaacctttgccctagacacggtccacgttgaccctgtgatccgcgagagtacccctgatgagctacttcgcccacccggaggagctggccctggagcatcagccaccccaggccgggctccccccactggccttgtctcagctctttaacccggatgcctgtgggcgccgggtgcagacagtggtgctgtatgggacagtgggcacaggcaagagcacgctggtgcgcaagatggttctggactggtgttatgggcggctgccggcattcgagctgctcatccccttctcctgtgaggacgtgtcatccgtgggccgtgccccagcctccatgtgccaacttgtggcccagcgctacacgcccctgaaggaggttctgcccctgatggctgctgctgggtcccacctcctctttgtgctccatggcttagagcatctcaacctcgacttccggctggcaggcacgggactttgtagtgacccggaggaaccgcaggaaccagctgctatcatcgtcaacctgctgcgcaaatacatgctgcctcaggccagcattctggtgaccactcggccctctgccattggccgtatccccagcaagtacgtgggccgctatggtgagatctgcggtttctctgataccaacctgcagaagctctacttccagctccgcctcaaccagccgtactgcgggtatgccgttggcggttcacgtgtctctgccacaccagctcagcgtgaccacctggtgcagatgctctcccggaacctggaggggcaccaccagatagccgctgcctgcttcctgccgtcctattgctggctcgtttgtgccaccttgcacttcctgcatgcccccacgcctgctgggcagacccttacaagcatctataccagcttcctgcgcctcaacttcagcggggaaaccctggacagcactgacccctccaatttgtccctgatggcctatgcagcccgaaccatgggcaagttggcctatgagggggtgtcctcccgcaagacctacttctctgaagaggatgtctgtggctgcctggaggctggcatcaggacggaggaggagtttcagctgctgcacatcttccgtccggatgccctgaggttttccctggccccatgtgaatacctcgctgccctctacattgtgctgggtttgcgcaagacgaccctgcaaaaggtgggcaaggaagtggctgagctcgtgggccttgttggggaggacgtcagcctggtactgggcatcatggccaagctgctgccactgccggctctgcctctgctcttcaacctgatcaaggtggttccacgagtgtttgggcgcatggtgggtaaaagccgggaggcggtggctcaggccatggtgctggagatgtttcgagaggaggactactacaacgatgatgttctggaccagatgggcgccagtatcctgggcgtggagggcccccggcgccacccagatgagccccctgaggatgaagtcttcgagctcttccccatgttcatgggggggcttctctctgcccacaaccgagctgtgctagctcagcttggctgccccatcaagaacctggatgccctggagaatgcccaggccatcaagaagaagctgggcaagctgggccggcaggtgctgcccccatcagagctccttgaccacctcttcttccactatgagttccagaaccagcgcttctccgctgaggtgctcagctccctgcgtcagctcaacctggcaggtgtgcgcatgacaccagtcaagtgcacagtggtggcagctgtgctgggcagcggaaggcatgccctggatgaggtgaacttggcctcctgccagctagatcctgctgggctgcgcacactcctgcctgtcttcctgcgtgcccggaagctgggcttgcaactcaacagcctgggccctgaggcctgcaaggacctccgagacctgttgctgcatgaccagtgccaaattaccacactgcggctgtccaacaacccgctgacggcggcaggtgttgccgtgctaatggaggggctggcaggaaacacctcagtgacgcacctgtccctgctgcacacgggccttggggacgaaggcctggagctgctggctgcccagctggaccgcaaccggcagctgcaggagctgaacgtggcgtacaacggtgctggtgacacagcggccctggccctggccagagctgcccgggagcacccttccctggaactgctacagggtgtcgccatccagatgtgttggaagcttcccctcctgccttatgctcacctgtggacaccgaggatgccctcacattggtgctttctcctcatcctcatgccccctttgccacaatggtatgatggcttggtagcccctcgaggcagatgcacctgacttgctgctattaaaaagccgtgtgccttctaccaattgtggcctcttctttactgcctggtgcttccaagaaagggcactgttcttggtctttctggtt

SEQ ID NO: 460470 - DNA, 722 bp, Homo sapiens
tgcctccatccccgcgggcactcgggaggggggacgatggcgggacgggtggcgccggggttccagccctgcgcctgctccggagcaccgggcccctctcgctgaccccctcgtcccaggaccccgcaggcccgagtgcctgggctcgtcctctttcgcgcccgctgccaggtgccagggccgcgcaggcgggcggaggtgggcaggaagcgccacgccgaggagccgggactctgggagctagcgggagacgcaggtttcgtcccaagccgacccctctgggccgcggctgacggctcccggaactgggcatccgcgggtaaaggcctagcgggcttgataacccttgcgccatggctgggaggccgcgctgagcggggggcagggcgggccgggggaggaggctgtgcaagggccgcggggagatcccggccgagaacgagagggacggagctgggcgctgaatggcgggcgttctggcaagtctccccctgcgttcccgaggccacccgaaagtaggagagctgtttgggacccagtttggtggaggagctctggacctgtaggaacaccgcccctgacagaagtcggtcctaggccccccaggctctgaccttctttcccaggatgaggtggggccaccatttgcccagggcctcttggggctctggttttagaagagcactccagcgaccagatgatcgtatccccttccttgatca

SEQ ID NO: 460471 - DNA, 741 bp, Homo sapiens
ggcaaggcccgacctgaagcactggctccagccttagggaaggttttggccgtgggttttgttggcacgtaccattttgctgaaagacagagcaccttgaggacgttatccctaaaatgagagaggactgggattgaaaggctgactacagaaatggctgctgcccagacgccctcaaaagccaaggatcctcagagttggttataaaatatttaagggcgagaaaaggatcgcaggagccaggccctgagatgagcttggagtccctgtttcagcacatcatcttcaccgagcatcaggcggaggagagtcgccgtttgatgcgagaagtaaggtcggaaataaccagatgtcgtgaaaaaattaagaaagcaacggaggagctgaatgaagagaaaatcaagctggaatctaagcttttgaaagctcatgaaaatgctttagaaaaacagtacagtgaaattacaaaccataggaatatgcttcttcaaacctttgaggctataaagaaacaaatgatagaggaggaagacaaatttattaaggaaattacagactttaataatgattatgaaataacaaagaaaagagagcttttgatgaaagaaaatgtcaagattgaaatatctgacttagaaaaccaagcaaacatgttgaaaagtggtatgaataaatatcacctcatttgtcttgcattaatgaaaataacttattttgaatgaatgaattttccaaaaattt

SEQ ID NO: 460472 - DNA, 1645 bp, Homo sapiens
ggcaaggcccgacctgaagcactggctccagccttagggaaggttttggccgtgggttttgttggcacgtaccattttgctgaaagacagagcaccttgaggacgttatccctaaaatgagagaggactgggattgaaaggctgactacagaaatggctgctgcccagacgccctcaaaagccaaggatcctcagagttggttataaaatatttaagggcgagaaaaggatcgcaggagccaggccctgagatgagcttggagtccctgtttcagcacatcatcttcaccgagcatcaggcggaggagagtcgccgtttgatgcgagaagtaaggtcggaaataaccagatgtcgtgaaaaaattaagaaagcaacggaggagctgaatgaagagaaaatcaagctggaatctaaggttcaacagttttttgaaaaatccttcttcttacagcttttgaaagctcatgaaaatgctttagaaaaacagtacagtgaaattacaaaccataggaatatgcttcttcaaacctttgaggctataaagaaacaaatgatagaggaggaagacaaatttattaaggaaattacagactttaataatgattatgaaataacaaagaaaagagagcttttgatgaaagaaaatgtcaagattgaaatatctgacttagaaaaccaagcaaacatgttgaaaagtgaaatgaagtcaatggaacatgatagtagccagttaaatgaacttcaaaaacaaaagagtgaattgatacaagaattatttactctccaaagaaaacttaaagtttttgaagatgaagagaatgaatccatttgtactaccaaatatctagaggcagaaaaaataaaaatcagtgaaaagcctcaaaatgatacagaatgcttaagttttatcattgctggactccacaagagaaagcctgtggggtccactgctacctttaatgaagaggaagaagaaggaggaagaggagaaggaggaggaggaggaagtggaggagaaggaggaggaagaaggaagaaggggagaagaagaaggaggagagaagaaggaggagaaaagaaggaggaggagaaggagaaggagaagaagaagaaggaaggagaaaaggaggaggaaagaagttgtccaaatctgtgtaaagcttacattgtattatgaaatcctcttgagttttgcattcaaagttaacatatctatttgccgttacttcaccttattcaaaatggtcatatggtggctttcgaatgaggcagacgtacagttctattctggcccggcctttcctgtgtggccttgggctggttacttaactcttatggatttcagttttctaattggtaacaaaataaataaaatgacacccattttgttgggctgtaacagctgcagcataattctgaagatatctacatgctcagtgaatcctgatcattttaattattgttgggcaaagacagtatggaatagataaagtaccttagcatagtattagttttttagtgttgctctttatatacaaaatgaacttattagttcatatactttgatctcgtgctttgaatcaccagaatttcatatgtgtggcttatttcctagacccatgatatacttggctgtggtggagg

SEQ ID NO: 460473 - DNA, 777 bp, Homo sapiens
ggcaaggcccgacctgaagcactggctccagccttagggaaggttttggccgtgggttttgttggcacgtaccattttgctgaaagacagagcaccttgaggacgttatccctaaaatgagagaggactgggattgaaaggctgactacagaaatggctgctgcccagacgccctcaaaagccaaggatcctcagagttggttataaaatatttaagggcgagaaaaggatcgcaggagccaggccctgagatgagcttggagtccctgtttcagcacatcatcttcaccgagcatcaggcggaggagagtcgccgtttgatgcgagaagtaaggtcggaaataaccagatgtcgtgaaaaaattaagaaagcaacggaggagctgaatgaagagaaaatcaagctggaatctaaggttcaacagttttttgaaaaatccttcttcttacagcttttgaaagctcatgaaaatgctttagaaaaacagtacagtgaaattacaaaccataggaatatgcttcttcaaacctttgaggctataaagaaacaaatgatagaggaggaagacaaatttattaaggaaattacagactttaataatgattatgaaataacaaagaaaagagagcttttgatgaaagaaaatgtcaagattgaaatatctgacttagaaaaccaagcaaacatgttgaaaagtggtatgaataaatatcacctcatttgtcttgcattaatgaaaataacttattttgaatgaatgaattttccaaaaattt

SEQ ID NO: 460474 - DNA, 1760 bp, Homo sapiens
tagtgtctgacggcagagtaaaggatgggtgtgatgagcctggagagactgacacggaggttcattagaaacatcttccgtgacagctctgacgcggcaccgatttctgagtggagcaaaccaaggcgctcggggcggcgagaaccgcgacacagcgcttcgcctggactggtaaacaaaccgccgcgcaggcgcaatggcaacaggacggtaacctgggtagccgccaatgggctttttcgtagagtgaaaagcggaaaagccaaacaaaacgctggttccaaggtgataaactggctgacttcctctatttttacttttttaaaaaattttgtttctgaagaagtagttgtgcggccttctgggcctcgcagagatcttcttcgtggaattcctcggccccagagaaatgccgctagcctcgcgcaaaagtttcaaaactttccgcctagtgagaggcggtccgatttggcccttggggagtgtccgtcgcgttgatctgatggattcacgtacacaacaccacattctatgagattttgcaggcaaaagtccacaagctcgatatatgggacacctgcaccggcattggatttggccccgcaacatcttaaaggaacaacctaatacataccccttgtctgcctgatccctggggaacatgctgtcctgtgatgctgaagcctgcagctggtgaactcatggtgaactcgtggcccacctttggattcagacaaatctcccagggagtattggccacctcccctggcagactcagtacccctggcccctgctgtggggttaccttgtcttggttgtggcaggcctactggctgttagttcagcatcatccttcaagagaacagaaaggcttagaataattgattgtcatatctgtgtctgaccatgctattgtggacttggcctgaacagccatagaaatgcaaggaatgaggtttgagggacttgggcagttgtctcaaaaagggagtcaaggcagaaatcccttaccctgagcactgctctcaacatggaggaagcaggctgtgagccaaggggaaggcagaggacagaaatgaatgtgtttccaggctttcctggtggtttatggcattctccaaactcctatgcaagggctattcctgaccaagaagatctaaagagaacgtctctgaaatcaagtccggatgaagatctctgtagtaaaacgctatgttactatggtgaccaattgatgtctcaagaaaaaagaaatctagaattatatcatgggttttttaaaaaatcgaacgtagaaacactcttccatcctagaacctagcaaggccagcctaagcatattttctttaaaagcacctacctagttctcaaaataaaatagattaaaaacttctaaaactatgtatataaattataatatcaaactgactggatttattttttaaaatgatattatacctaaaataagggaataggtatcttttgcaaattattttaggtttttaagggtaaaagaggagatttgctaataactttttttaactgctagaaatttctgaggtataaagatttcctttttttgatctgtgtagatttccttctggcctttgataataaaagatgactgatctgattcctataagctatggaaaaactaagaaaagttaccagttcccttcagggtttcattgcgcagtactttaagacgtaattgtgtcccctacaatattgaactttagtcttttagcttaagcatttga

SEQ ID NO: 460475 - DNA, 5044 bp, Homo sapiens
atcaaactagttgctatctgatgactgcctgtcacctgctgaaaagaaattgtcccacctagtgtgtctgtaatgagaggtggagcctttaagaagtgattgctttatgagagctatgcctcctgaatggattaatccacggattaatgagtactcacagaaggggaactggtggctttataagcagagaaagaaagacctgagccagcatattagcaagctcaactcccttgccatgcaaatatctgcactgactcagggctctgctgagagcctcaccaacaacaagaccctccccagatgcgacccctggaccatggtcttctcaaacatgcggtctctggaccttggacttagcccccataactgcgtagagagtagtaaagagaactgcaaagaacataagagcacagagagaaagtacagccactactttctggactgggctggaacatgcgaggcaaacttgctccttctccaggacttagacccagcctttgtagaggaggacatggccatggctactgaatatcacaaaggtgtctgtagttctctgatggcagaactggcaggaaatctgctctccagggtgccagaaaaagctactcatgggagcatatctcactggtggcactttactccaaaccactttactccaaaactacccaagaaagagtgccagaggaatctgctggcctctgagttctgtcctggagaaattgcctgttctgcaagaacacaagaaagccacatatgctgccagtgtggagcactggacaaggcatgcatttcactgaaggcaccagaaaacccccctggtgccaaggggagcacactagaacctggagagaaggtccagcaggctccaacggtcaggaacctaggtcaggacaggcacacctgctttcccgcccaaacttcgcattttccaagaccaccctggctctccatgcccccattctgggcctataaaaacccaagacccttgcaggcagatacacaagtggctggacgtcctaatgaacaacacatcaggggaagaagacacaagcgctggtcatccataggagcaccccagcagaaggacacgctgacaggcacccggaagccaccccgcgagggggaggagggagcctttgccttttcaactggagacatcgaccgggatcctggaaggtgagtgtgtatgaattgcgaaactgtctggtcttcctctcttctgaaactctgccacctctctctctttcctgtgagtaagagactctgtttcccttcagggagttttaaactgccctaaccggccgtcaaaacccccagactttaattataaaataagtaatgaacaattcttaatcagttataataacaatgataaattatgttatttatatattaagttacaaatataggctacaaacaatgagtgcatatttctgtaagcaaatatgctataggattttaaaataaattacctaatttaattattggataagttttattaactattattataactattccttaggtgaaggcatagaggctctgaaagttcaaattatttgctctactaaccaatatacattttcaattatgaattggaaaatgtatgtctaaggaactcagtactaaattttttttcatgtatcaagtgcatttttagtatataaggagaatatgcattatatgttggcaagaagatgttgggataaatcaggaattattttttatcgatcctggtctagatatactttatatgtattgttactttttttatcctgacaatgaagcctgtgaataagaaaaccattaaccgtcagagaaaaaagccattcacaggtatatagtcatctattttaattaagcatattatatttaattaaatatagctaatagaattttctaaattttaccttttgttttcagtttagagaccaccaagaaaacaatgaaataaaatttacagatttatgccaattatttgttagaaatgccacattggaaatgaaagccacaaatatcagtactaacatttatgcatgtcaatatctaagaagcatctgaactctcttttttatattttgcttgaagtgtcagagaataccttcaacaaagttgatggaaaaagttctctcgcgtattgattagacgtacataaataggaatctcatgattggagaatagaggatactaatgcgtaggctatctcccatcttcccactcaagttaatcacaacttttttctttagttaactcctcctttgtattcagaagtgagtttagtcgtctcctaaatcttttctcttgcctccttgatttgttcaaatacctttatgccatcataagaatattcacttcttcttcaaagctttttcttagttataatattacatgcatttttcctaatcaacctgaagatgacgaggatgaaaacctttctgatgatccacttccatttaatgaatagttcaaagtgttgcaatgtgtacaaaataagaggagtgtctgtgcctttgaaaggtgaatgtttgtagaatctcaaagtttagaacaaatattacctatgcaacaaaaatgacatctgctaagtaagcctacaaaatactactaaacaacaccaaacacatttcttcataataaaatgaaatttgactagaattgtaagtggtgttttgcttaataaaatctcaatgtcagaagttattacaaattctgtcttttgtgtttttcacttggaattatataggacatatttgagtcaccctgatattttccttgaattgtcttattttttatccaagtactaaaataaaaagaaatagagatttcatattaaatgttattatatggctgtttttagattgggatagatggaatttattcatattaaaagcaaatcatgtgtaattattttatgttagggaaaatgagtaagatctttgaaaaataaagctcacaaggcttaatttgctgcttctttttacatcctttctgtttaccaaagtgtcttcaatatatgagtgtttctgatgaaaatagacatatagatttaaaatcatttttaaagatcctaaaatataggttatataacttctaaaatactgtttgtgcttcctgaaaaaaattagattaatgtacctttaactctgagaatacaaatattaacagagcatttcagcatactatatctggtctacataaggagcaaaatgattttcactgacatccaactggttattcaacacatacaaatctgctgcctctagactctggtaaagtttccgttctataaatggtcattagggtgttatgtgaataaaggctttttaaaaaatggtggcctgaaattgtttttgtaaataaagattatttctcaacagagaaatccactatagttgaaataggtactctctctcttattggtgaaatttgtcaggtattttaatgtgaaaagaaaaataaaataatagaatactaattttatttgttcatgtaatagtacctgcttttggaatctggtcaacaagataagaatgccctaatcataaacaattgtacagagaagctgatatgcatttgtaagattgctgcttctattcactggcattttaaaaattgtgagaaaatattggtggtaatatgttataatcaagactttgagcaattatgtatgtaacttgaatatccaagacaatgtccccataattttgtaataagtgtgcatgcacaatatcaaacatatagttatgcatgtatatggatatgcatatacttttaaattttaactttgtaagtttaacgttagtactaaacctatcatttatatggcttttctaccagttggaaaatgagcttctcaaagacagattgtgttttatttacctttatgtttactggacctaccttctctttcatatagcagttactcaatgagtaatttttaggaaactgcatattcacaaaacggtaatatttattttttaaatattttaggacacagatttaaatgaacattgttcacaatttacctggcaaacattgaagtctgtccttcagttgccttttaaaacattaattttcatcttatgaataagtctttaatgtacttcacaattaattctgatctttactactacataactttaaatttatttcactaaataaatctttcatatattttaattccaaattatgggcttaagtatactgttgcttccttacattccacaacattcccatttaaatcccacattattaatcaagacatcaatttccttacaagttcttaaaaaaatggttttctaacaagtgagaacgtctacagtggttattgtctacatggtgaattgcaggagaagaagtttttaaagtgtggggactttacagaaacacttacatacttgggttgaacgctcacttacactatgaacagtgcagcaaaggctctgggtgttaatatatgacagtgcagcagcatcatttggggaaaagcagaaatgttattcttaaaggagaagtttatttggcctggcttaaggcaagatgatgatgtatactaatgagaatgaccaatcttgtgatcttttaataccactctatctgtatcctggagcaagttacaaaacatctcagaacattctgaacattatattcctgatctttagaaaagaaataatactacctgatattaataatacttatcttgtagtttgctgttagccttagaatcaaaacatgaagtcatttgtactttacaaaagccaaatctaaaaatagcattaatttctaatgtaatcattatcattattcattttggatttgtgtagtcttgtatatttcataaattatatcattaacttctgtcactttccacatggcaaatataaaatgtttcctcattttcaaaaagtcatgttttagttgtgtcttttttctatttcattttcttttaaagaaaaaagtaatgttacactgattcattttaattctctgtgaaacattatctgaaattgccttttcagggaaggttcagtctgtactttttttt

SEQ ID NO: 460476 - DNA, 2684 bp, Homo sapiens
tctaggaatctgataaccaaaagttctattcacctcaacctaatcaacctgaagatgacgaggatgaaaacctttctgatgatccacttccatttaatgaatagttcaaagtgttgcaatgtgtacaaaataagaggagtgtctgtgcctttgaaaggtgaatgtttgtagaatctcaaagtttagaacaaatattacctatgcaacaaaaatgacatctgctaagtaagcctacaaaatactactaaacaacaccaaacacatttcttcataataaaatgaaatttgactagaattgtaagtggtgttttgcttaataaaatctcaatgtcagaagttattacaaattctgtcttttgtgtttttcacttggaattatataggacatatttgagtcaccctgatattttccttgaattgtcttattttttatccaagtactaaaataaaaagaaatagagatttcatattaaatgttattatatggctgtttttagattgggatagatggaatttattcatattaaaagcaaatcatgtgtaattattttatgttagggaaaatgagtaagatctttgaaaaataaagctcacaaggcttaatttgctgcttctttttacatcctttctgtttaccaaagtgtcttcaatatatgagtgtttctgatgaaaatagacatatagatttaaaatcatttttaaagatcctaaaatataggttatataacttctaaaatactgtttgtgcttcctgaaaaaaattagattaatgtacctttaactctgagaatacaaatattaacagagcatttcagcatactatatctggtctacataaggagcaaaatgattttcactgacatccaactggttattcaacacatacaaatctgctgcctctagactctggtaaagtttccgttctataaatggtcattagggtgttatgtgaataaaggctttttaaaaaatggtggcctgaaattgtttttgtaaataaagattatttctcaacagagaaatccactatagttgaaataggtactctctctcttattggtgaaatttgtcaggtattttaatgtgaaaagaaaaataaaataatagaatactaattttatttgttcatgtaatagtacctgcttttggaatctggtcaacaagataagaatgccctaatcataaacaattgtacagagaagctgatatgcatttgtaagattgctgcttctattcactggcattttaaaaattgtgagaaaatattggtggtaatatgttataatcaagactttgagcaattatgtatgtaacttgaatatccaagacaatgtccccataattttgtaataagtgtgcatgcacaatatcaaacatatagttatgcatgtatatggatatgcatatacttttaaattttaactttgtaagtttaacgttagtactaaacctatcatttatatggcttttctaccagttggaaaatgagcttctcaaagacagattgtgttttatttacctttatgtttactggacctaccttctctttcatatagcagttactcaatgagtaatttttaggaaactgcatattcacaaaacggtaatatttattttttaaatattttaggacacagatttaaatgaacattgttcacaatttacctggcaaacattgaagtctgtccttcagttgccttttaaaacattaattttcatcttatgaataagtctttaatgtacttcacaattaattctgatctttactactacataactttaaatttatttcactaaataaatctttcatatattttaattccaaattatgggcttaagtatactgttgcttccttacattccacaacattcccatttaaatcccacattattaatcaagacatcaatttccttacaagttcttaaaaaaatggttttctaacaagtgagaacgtctacagtggttattgtctacatggtgaattgcaggagaagaagtttttaaagtgtggggactttacagaaacacttacatacttgggttgaacgctcacttacactatgaacagtgcagcaaaggctctgggtgttaatatatgacagtgcagcagcatcatttggggaaaagcagaaatgttattcttaaaggagaagtttatttggcctggcttaaggcaagatgatgatgtatactaatgagaatgaccaatcttgtgatcttttaataccactctatctgtatcctggagcaagttacaaaacatctcagaacattctgaacattatattcctgatctttagaaaagaaataatactacctgatattaataatacttatcttgtagtttgctgttagccttagaatcaaaacatgaagtcatttgtactttacaaaagccaaatctaaaaatagcattaatttctaatgtaatcattatcattattcattttggatttgtgtagtcttgtatatttcataaattatatcattaacttctgtcactttccacatggcaaatataaaatgtttcctcattttcaaaaagtcatgttttagttgtgtcttttttctatttcattttcttttaaagaaaaaagtaatgttacactgattcattttaattctctgtgaaacattatctgaaattgccttttcagggaaggttcagtctgtactttttttt

SEQ ID NO: 460477 - DNA, 6541 bp, Homo sapiens
  misc_feature (2)..(2): n is a, c, g, or t
  misc_feature (4)..(4): n is a, c, g, or t
  misc_feature (6)..(6): n is a, c, g, or t
  misc_feature (8)..(8): n is a, c, g, or t
  misc_feature (12)..(12): n is a, c, g, or t
  misc_feature (2009)..(2009): n is a, c, g, or t
gncntntnattnagtttcttaaatgacgaagaggccaggaagatccttcaggtgctggaaaggaatgaggagttacagagggccgagaaggacaggatcagcaaacttcagaagacaaagagggatatcagatggcttcagggagtgactggtgaatggtttgaagaaattcaaagaaaaaagttttgcaatgaaacagatgttagccaaatgttaaaacaaccacttacatacaggctaagtaaggagatggcaaaaaatgatccgatagaattacctacatcaagatctaaaaatgtaactaatcaaaaaaagccgacacctttttcttcccggatgagcttcagatcgtcatttgcttccctgttctcattcaggaaatctggaaaggagacttcaaagcttccatcactgggacagaaaggatgtgatggccatgcaggacctcctatgcctgtgaggggagctgctgtgcaggcaaaaatatacaattcacctctggaaaatcatctagttgacagtacatttgtcccaaagccagcagtcatgagggaggagagtggcatgcctccaccgtgggatgcttcactgctggagaatgagtttttccaagttttagatgacttggatagcaaattggctcaggaacagtctgcaagctcagtgaataccagaacacccctcaactatggatcaagaacacagttcggtcacttttattccagtggtaacagacatggtaatatcacagaaaggcacaaaaaacactataatgaaacttccaatatgtctatctatgacatcctaagaccaggaactcctagggaaggttttaaaaccttttctcctaggacaagcacaatttatgatatgtataggacaagggagcccagagtctttaaagaagattatgtgcaaaagaatacttttggcagtacttcgctgtgttttgacagcaggcaacggtcggccttaccagccacagggcatttcacagcaagaagcttacattttccagccacaactcagagcaagagtgggtttataccaccaaggcaccagcagagtccaaagagaactcctttatcatccatcatatggaacagatcagattcctctagagacagggagaaccaggaagagttcctgagggcaccatcaccaatggaaattgatcccgctgacaagtatgtgtatcccaggggttttcaggagaataagagatatgaatcgtaccattcacagaatgtttaccaacgtgttagtttaaatgctcccatggagaatgcaatgagtcccgacacttttgagaactcagagaacatgccattctaccatcaaagcaacacatttaccagatctttcttcagcaatacctttggacgaagcggagaacagaggagatttggacaaggtcctttttggggccaagagaaaggacattctttctggtctgactttcatcgaagcaggaaatcattcagttcttctgacagagactttgaaatgatttccatggaagcaaatagtgtatcagccattcatggccataatgtttcttctgaacactgggaatcattttcttctggttatggaacagatgtttccagaggccaagaagagccacatccttggcagtttgattttcagagatccacactggatagcatggtggtatcacatggtaatgagacccagttgactcctcattttggcacaccaaatgtttgctccatgactggttcaagctatcacgtcaaatctagtgagttggtaagtcaacaggacagttctcctgtagaagtacatataaacaaagaagcttcctcatttggaattgctcagactctagcatcctcattcaaaacttccttttcccagatttctgatgacagaaggaatcctcagagtcccaacttgcagaatcccacagtcactttgcagaaaatttttccaaataagcctgcctctcatccaatgagaagccatacagaagtcactgtgaccancagcaattcagttgactctctgcctcttgccaaaagccagcccaatatcttggtcacagaagtaaataatgagaaagacttaaatgaatctatttcagaagaagacaaacagctaagcaagatggaccagacaaacaaggcaggtgaaataccccaacctgtttcacagacagggatctcaaactctttacctgattttcaaaatcccttatcccaggactcagccaagagcaacgggtttggttttaatgcatctaccataataagttcaaaaaagtcacccagagtcttttccaggaaagatacctccaaaatgtatataccgcacacagataaatccaatgacattaaacaagataagaggtttactgaaaacagaaaacttggctcaacagcttcccttcctttcattcaggaacacagaacaccaccatctttccccaggacagaccaaggttgtcaccaggaattaactgtaaataatgaagatatttcaagaattattacaaataaccactggagctctgcactgactgatactcaaaatgcacaatactcaaaatgcaagttaactcctggccacaagacctcgtgtgattctttagatctgtcatcagctgcactaccagattcctcaccatcaaagaattcttcccttgatgctcctgtggttccatctactacagtgttctccaggagaagtccttcagacaaagatccatcgctaggagaaagagaagaaaaagacaatgctgggaagaaccaaaagaatcagtttattgtaagccactcagaaaaccaagagagaaatgatagtcctgtgcctacacatgatgaagtggttgatgtcaaatgccattcacactctccttttaggaatgaaagaggaaaaggaaaaataaggcatcatatatcctgtattgaaaagttaagcaaaacagaaagtatatcagtacccaccagtgatcacaggagcctcattgaagcaaatcaaagcaattccaaagtttctgaacttgacacaatttattgtaccttgccaagaaaatcaagcagttttctcatacatggcaggcagtcaggaagtaaaataatggctgcttcattgaggaatgggccacctcccttccaaatcaaaaataatgtggaagatgcaatggggaactatatgttaaacaaatttagtcccagttctcctgagtcagcgaatgaatgttccaaagtcctttcagactcagccctggaagcacctgaagccacagagagaatgacaaatgtaaaaagcagtggatctacttccgttagaaaaggaccacttccattcctcatcaacagggctatgtcatgtccctcaggggagccacatgcctcaactggaagagaaggaagaaaaaagccattgacctcaggcatggatgcttctgagctaacaccaagggcttgggagagaatcattagccctgtggaaagtgactcatctgttagagattgttctttaaccaaaagacaacaccaaaaggaaaacttccaagaatacactgagaaagagggtaaaatggctgcctccaggagaagtgtatttgctctttcaaatgaagaccctttacctttttgctcagacttgtcaggaaaagaacgtgggaaaacattacataaagttaagacgactagtacgttttctgtttctggtgatgaagataatgtaaaatgtctggaggtggtctcaatatattacactctaccgaggaaacccagcaaaaaattctgtaacctccttcaacagtatacacaaaatactaatttacttatagaatcacctcaagtggagactgaaacatttcctaacgctttagaaaaagacaaacagaattattctacacgagagcagtcaggaacaccttcatgtgaaaatctaaagatgtccgtcaactctgatcagacgctcaccactgaaaatatgactgccttccgattatcaaatagggggcccctagctcctacattacaggaaatggcttctgttgaggcagctgtttctcttcctgaagaggaatctaaagctagagagattttttcagataatttagctaaaacacctctaggtgattcagaaaacaagaaggaaagaggcaaaaagttgcaaagtgaaaccctgcatacttcattgatgcttcagagaaaaaatgtatccgaagaaaaatctgaaaattgtcaacaatccattaattcaagtaacagtggtccctctagtcttccagctctttcagaagttaatattggaaattcccaaactagaagaagttcttgggagtgtacagggagtggtagagccattccatttactggaagtggcaagtgtccccagaaagatcacacatccacagctgtaggtgatggctccagtggatcacagcctagggaaggcagaggggacattggaaccaactgccaaaaaatgactaataaaacactttctcactcagagagtcaagtctttgcccttactccagcattgcataaactacagcttggtgaggagactcagtcagatgaaccaaacttagagagtctgcagtctgaaccaagagaattacctcaaagaagtcaggaggcaaatatgacagagagcaggaaggctgaagatgaaatgcagaagtcagcttgggatcaaccttcacttcctgaaggaaacaaaaataaaaccaacttggatgacctagtaaagggggaaaatagatcttcagttaaacacagattggcagccatgtctaaagccagcagaaaattcccagctaaagatgtaagccccagaagacatgtagctactatcttcccccaaagtggaagcagatctggctttgaccatttatctcttggcacagtggagtgcaacccactgttccctgagcctactccaaaatctgcagagtccattggcgaaagcaggttgagtgagaacagaaagcatgtgaagaaatccgagaaccttctccccattactgtactacccaacagagaaccttctacacacgtcagcaaccagaagtctaacagcatttcacaacgacatcagaatgagtttaaaaacgtctcagaatcaccatcaaagcatgagaattctaaagacgtcacagcagctcagaatttagtaagagaatcaggagccccatcacccatcacattcaccagcctcagggaagcagaattctctgacaatcagaggaggctgagccctccttttccactggagcctgcacagaaatctagagtaagcagtccactggccagttttctgcagcaacaaaggagtgcttcatctctggagtgggaacctgagccacacctctatcgttcaaagagtttaaaaagcattaatgttcatggcgatctactacgaaaaagccatcctccaaaagtcagggagcgccatttttctgaaagcacttctattgacaatgccctgagtcgactgacccttgggaatgaattctctgtcaacaatgggtacagtcgaagattcagatctttttctgaactcccctcctgtgatggaaatgaaagttgggcttatcgcagcgggacaaaaacaggtcccaggtctgcaatatctatatacagacctatcgactatgggatctttgggaaagaacaacagttagctttcttagaaaatgtaaagaggtcacttacacaaggaagattatggaaaccaagttttcttaagaaccctggcttcctaaaagatgatttgaggaaccctcccaacccctcagagtcattaagctcaaattctcccagtagtcaggtgccagaagatggcttatctccaagtgaaccgcttaatatctatgaggatgacccagtggactcagattgtgacacagacacaaccacagatgatgaatactacctggatgaaaatgacaaagagtcagaactgtgaggctttttcaataaaatgctttacttttttcaccaaaagcttataatggaactaaggtgtacatgtgcatgtgcatggaaggataaaagatctagtctgggcagtgtctgctctgaaatgtcccacatctccttttttttcctccacaccctatatagacacttcctgaatgctagaacaatgaattcttgttttgagagagtctctgctattttctatctctgtaaatgttcttagcctgcctttccaccactcccacttaatccctgattcactgtctgatttgggctttctgctttacttccctcctaacatttttcatctttaattgtgatttacaaccctaatatcccaggcacatacaaaacttatgaattacccagcacaactgtgaaactctgtattgcttcttccggtccacaccctatactcatgacattaaataaaaggtagggatgataacagtggggtaaatattatcatcctgtttgactcatgaacatttaggaagtttaaggtggtgatcttctctttcaaacaaagataaaggaatttattttttaacctgagaaactgattgcaaaaagga

SEQ ID NO: 460478 - DNA, 4389 bp, Homo sapiens
  misc_feature (1952)..(1952): n is a, c, g, or t
  misc_feature (4371)..(4371): n is a, c, g, or t
aagcaattcttccacctcagcctctctagtagctgggactacagcaaacttcagaagacaaagagggatatcagatggcttcagggagtgactggtgaatggtttgaagaaattcaaagaaaaaagttttgcaatgaaacagatgttagccaaatgttaaaacaaccacttacatacaggctaagtaaggagatggcaaaaaatgatccgatagaattacctacatcaagatctaaaaatgtaactaatcaaaaaaagccgacacctttttcttcccggatgagcttcagatcgtcatttgcttccctgttctcattcaggaaatctggaaaggagacttcaaagcttccatcactgggacagaaaggatgtgatggccatgcaggacctcctatgcctgtgaggggagctgctgtgcaggcaaaaatatacaattcacctctggaaaatcatctagttgacagtacatttgtcccaaagccagcagtcatgagggaggagagtggcatgcctccaccgtgggatgcttcactgctggagaatgagtttttccaagttttagatgacttggatagcaaattggctcaggaacagtctgcaagctcagtgaataccagaacacccctcaactatggatcaagaacacagttcggtcacttttattccagtggtaacagacatggtaatatcacagaaaggcacaaaaaacactataatgaaacttccaatatgtctatctatgacatcctaagaccaggaactcctagggaaggttttaaaaccttttctcctaggacaagcacaatttatgatatgtataggacaagggagcccagagtctttaaagaagattatgtgcaaaagaatacttttggcagtacttcgctgtgttttgacagcaggcaacggtcggccttaccagccacagggcatttcacagcaagaagcttacattttccagccacaactcagagcaagagtgggtttataccaccaaggcaccagcagagtccaaagagaactcctttatcatccatcatatggaacagatcagattcctctagagacagggagaaccaggaagagttcctgagggcaccatcaccaatggaaattgatcccgctgacaagtatgtgtatcccaggggttttcaggagaataagagatatgaatcgtaccattcacagaatgtttaccaacgtgttagtttaaatgctcccatggagaatgcaatgagtcccgacacttttgagaactcagagaacatgccattctaccatcaaagcaacacatttaccagatctttcttcagcaatacctttggacgaagcggagaacagaggagatttggacaaggtcctttttggggccaagagaaaggacattctttctggtctgactttcatcgaagcaggaaatcattcagttcttctgacagagactttgaaatgatttccatggaagcaaatagtgtatcagccattcatggccataatgtttcttctgaacactgggaatcattttcttctggttatggaacagatgtttccagaggccaagaagagccacatccttggcagtttgattttcagagatccacactggatagcatggtggtatcacatggtaatgagacccagttgactcctcattttggcacaccaaatgtttgctccatgactggttcaagctatcacgtcaaatctagtgagttggtaagtcaacaggacagttctcctgtagaagtacatataaacaaagaagcttcctcatttggaattgctcagactctagcatcctcattcaaaacttccttttcccagatttctgatgacagaaggaatcctcagagtcccaacttgcagaatcccacagtcactttgcagaaaatttttccaaataagcctgcctctcatccaatgagaagccatacagaagtcactgtgaccancagcaattcagttgactctctgcctcttgccaaaagccagcccaatatcttggtcacagaagtaaataatgagaaagacttaaatgaatctatttcagaagaagacaaacagctaagcaagatggaccagacaaacaaggcaggtgaaataccccaacctgtttcacagacagggatctcaaactctttacctgattttcaaaatcccttatcccaggactcagccaagagcaacgggtttggttttaatgcatctaccataataagttcaaaaaagtcacccagagtcttttccaggaaagatacctccaaaatgtatataccgcacacagataaatccaatgacattaaacaagataagaggtttactgaaaacagaaaacttggctcaacagcttcccttcctttcattcaggaacacagaacaccaccatctttccccaggacagaccaaggttgtcaccaggaattaactgtaaataatgaagatatttcaagaattattacaaataaccactggagctctgcactgactgatactcaaaatgcacaatactcaaaatgcaagttaactcctggccacaagacctcgtgtgattctttagatctgtcatcagctgcactaccagattcctcaccatcaaagaattcttcccttgatgctcctgtggttccatctactacagtgttctccaggagaagtccttcagacaaagatccatcgctaggagaaagagaagaaaaagacaatgctgggaagaaccaaaagaatcagtttattgtaagccactcagaaaaccaagagagaaatgatagtcctgtgcctacacatgatgaagtggttgatgtcaaatgccattcacactctccttttaggaatgaaagaggaaaaggaaaaataaggcatcatatatcctgtattgaaaagttaagcaaaacagaaagtatatcagtacccaccagtgatcacaggagcctcattgaagcaaatcaaagcaattccaaagtttctgaacttgacacaatttattgtaccttgccaagaaaatcaagcagttttctcatacatggcaggcagtcaggaagtaaaataatggctgcttcattgaggaatgggccacctcccttccaaatcaaaaataatgtggaagatgcaatggggaactatatgttaaacaaatttagtcccagttctcctgagtcagcgaatgaatgttccaaagtcctttcagactcagccctggaagcacctgaagccacagagagaatgacaaatgtaaaaagcagtggatctacttccgttagaaaaggaccacttccattcctcatcaacagggctatgtcatgtccctcaggggagccacatgcctcaactggaagagaaggaagaaaaaagccattgacctcaggcatggatgcttctgagctaacaccaagggcttgggagagaatcattagccctgtggaaagtgactcatctgttagagattgttctttaaccaaaagacaacaccaaaaggaaaacttccaagaatacactgagaaagagggtaaaatggctgcctccaggagaagtgtatttgctctttcaaatgaagaccctttacctttttgctcagacttgtcaggaaaagaacgtgggaaaacattacataaagttaagacgactagtacgttttctgtttctggtgatgaagataatgtaaaatgtctggaggtggtctcaatatattacactctaccgaggaaacccagcaaaaaattctgtaacctccttcaacagtatacacaaaatactaatttacttatagaatcacctcaagtggagactgaaacatttcctaacgctttagaaaaagacaaacagaattattctacacgagagcagtcaggaacaccttcatgtgaaaatctaaagatgtccgtcaactctgatcagacgctcaccactgaaaatatgactgccttccgattatcaaatagggggcccctagctcctacattacaggaaatggcttctgttgaggcagctgtttctcttcctgaagaggaatctaaagctagagagattttttcagataatttagctaaaacacctctaggtgattcagaaaacaagaaggaaagaggcaaaaagttgcaaagtgaaaccctgcatacttcattgatgcttcagagaaaaaatgtatccgaagaaaaatctgaaaattgtcaacaatccattaattcaagtaacagtggtccctctagtcttccagctctttcagaagttaatattggaaattcccaaactagaagaagttcttgggagtgtacagggagtggtagagccattccatttactggaagtggcaagtgtccccagaaagatcacacatccacagctgtaggtgatggctccagtggatcaccaccagantcttccggatcctcgaca

SEQ ID NO: 460479 - DNA, 326 bp, Homo sapiens
tagcttgggtgagaggaggaacactctaggaactctgattcacagtacacatggaaagattccctactaatttgagttttctctatgcagcagaaccatcagaggcgcaggagagaggttgctctgactgccttaatccctgaggtcttcatgtgaggttgcctgccctgtttctagtctgcataagagggagaaagtgacacaagagcaaaggcttcattctttcaagtatatttacttggaagtaattgatgcaaaatttttacaatttttttttctagatccgatagaattacctacatcaagatctaaaaatgtaactaatc

SEQ ID NO: 460480 - DNA, 6047 bp, Homo sapiens
  misc_feature (1952)..(1952): n is a, c, g, or t
aagcaattcttccacctcagcctctctagtagctgggactacagcaaacttcagaagacaaagagggatatcagatggcttcagggagtgactggtgaatggtttgaagaaattcaaagaaaaaagttttgcaatgaaacagatgttagccaaatgttaaaacaaccacttacatacaggctaagtaaggagatggcaaaaaatgatccgatagaattacctacatcaagatctaaaaatgtaactaatcaaaaaaagccgacacctttttcttcccggatgagcttcagatcgtcatttgcttccctgttctcattcaggaaatctggaaaggagacttcaaagcttccatcactgggacagaaaggatgtgatggccatgcaggacctcctatgcctgtgaggggagctgctgtgcaggcaaaaatatacaattcacctctggaaaatcatctagttgacagtacatttgtcccaaagccagcagtcatgagggaggagagtggcatgcctccaccgtgggatgcttcactgctggagaatgagtttttccaagttttagatgacttggatagcaaattggctcaggaacagtctgcaagctcagtgaataccagaacacccctcaactatggatcaagaacacagttcggtcacttttattccagtggtaacagacatggtaatatcacagaaaggcacaaaaaacactataatgaaacttccaatatgtctatctatgacatcctaagaccaggaactcctagggaaggttttaaaaccttttctcctaggacaagcacaatttatgatatgtataggacaagggagcccagagtctttaaagaagattatgtgcaaaagaatacttttggcagtacttcgctgtgttttgacagcaggcaacggtcggccttaccagccacagggcatttcacagcaagaagcttacattttccagccacaactcagagcaagagtgggtttataccaccaaggcaccagcagagtccaaagagaactcctttatcatccatcatatggaacagatcagattcctctagagacagggagaaccaggaagagttcctgagggcaccatcaccaatggaaattgatcccgctgacaagtatgtgtatcccaggggttttcaggagaataagagatatgaatcgtaccattcacagaatgtttaccaacgtgttagtttaaatgctcccatggagaatgcaatgagtcccgacacttttgagaactcagagaacatgccattctaccatcaaagcaacacatttaccagatctttcttcagcaatacctttggacgaagcggagaacagaggagatttggacaaggtcctttttggggccaagagaaaggacattctttctggtctgactttcatcgaagcaggaaatcattcagttcttctgacagagactttgaaatgatttccatggaagcaaatagtgtatcagccattcatggccataatgtttcttctgaacactgggaatcattttcttctggttatggaacagatgtttccagaggccaagaagagccacatccttggcagtttgattttcagagatccacactggatagcatggtggtatcacatggtaatgagacccagttgactcctcattttggcacaccaaatgtttgctccatgactggttcaagctatcacgtcaaatctagtgagttggtaagtcaacaggacagttctcctgtagaagtacatataaacaaagaagcttcctcatttggaattgctcagactctagcatcctcattcaaaacttccttttcccagatttctgatgacagaaggaatcctcagagtcccaacttgcagaatcccacagtcactttgcagaaaatttttccaaataagcctgcctctcatccaatgagaagccatacagaagtcactgtgaccancagcaattcagttgactctctgcctcttgccaaaagccagcccaatatcttggtcacagaagtaaataatgagaaagacttaaatgaatctatttcagaagaagacaaacagctaagcaagatggaccagacaaacaaggcaggtgaaataccccaacctgtttcacagacagggatctcaaactctttacctgattttcaaaatcccttatcccaggactcagccaagagcaacgggtttggttttaatgcatctaccataataagttcaaaaaagtcacccagagtcttttccaggaaagatacctccaaaatgtatataccgcacacagataaatccaatgacattaaacaagataagaggtttactgaaaacagaaaacttggctcaacagcttcccttcctttcattcaggaacacagaacaccaccatctttccccaggacagaccaaggttgtcaccaggaattaactgtaaataatgaagatatttcaagaattattacaaataaccactggagctctgcactgactgatactcaaaatgcacaatactcaaaatgcaagttaactcctggccacaagacctcgtgtgattctttagatctgtcatcagctgcactaccagattcctcaccatcaaagaattcttcccttgatgctcctgtggttccatctactacagtgttctccaggagaagtccttcagacaaagatccatcgctaggagaaagagaagaaaaagacaatgctgggaagaaccaaaagaatcagtttattgtaagccactcagaaaaccaagagagaaatgatagtcctgtgcctacacatgatgaagtggttgatgtcaaatgccattcacactctccttttaggaatgaaagaggaaaaggaaaaataaggcatcatatatcctgtattgaaaagttaagcaaaacagaaagtatatcagtacccaccagtgatcacaggagcctcattgaagcaaatcaaagcaattccaaagtttctgaacttgacacaatttattgtaccttgccaagaaaatcaagcagttttctcatacatggcaggcagtcaggaagtaaaataatggctgcttcattgaggaatgggccacctcccttccaaatcaaaaataatgtggaagatgcaatggggaactatatgttaaacaaatttagtcccagttctcctgagtcagcgaatgaatgttccaaagtcctttcagactcagccctggaagcacctgaagccacagagagaatgacaaatgtaaaaagcagtggatctacttccgttagaaaaggaccacttccattcctcatcaacagggctatgtcatgtccctcaggggagccacatgcctcaactggaagagaaggaagaaaaaagccattgacctcaggcatggatgcttctgagctaacaccaagggcttgggagagaatcattagccctgtggaaagtgactcatctgttagagattgttctttaaccaaaagacaacaccaaaaggaaaacttccaagaatacactgagaaagagggtaaaatggctgcctccaggagaagtgtatttgctctttcaaatgaagaccctttacctttttgctcagacttgtcaggaaaagaacgtgggaaaacattacataaagttaagacgactagtacgttttctgtttctggtgatgaagataatgtaaaatgtctggaggtggtctcaatatattacactctaccgaggaaacccagcaaaaaattctgtaacctccttcaacagtatacacaaaatactaatttacttatagaatcacctcaagtggagactgaaacatttcctaacgctttagaaaaagacaaacagaattattctacacgagagcagtcaggaacaccttcatgtgaaaatctaaagatgtccgtcaactctgatcagacgctcaccactgaaaatatgactgccttccgattatcaaatagggggcccctagctcctacattacaggaaatggcttctgttgaggcagctgtttctcttcctgaagaggaatctaaagctagagagattttttcagataatttagctaaaacacctctaggtgattcagaaaacaagaaggaaagaggcaaaaagttgcaaagtgaaaccctgcatacttcattgatgcttcagagaaaaaatgtatccgaagaaaaatctgaaaattgtcaacaatccattaattcaagtaacagtggtccctctagtcttccagctctttcagaagttaatattggaaattcccaaactagaagaagttcttgggagtgtacagggagtggtagagccattccatttactggaagtggcaagtgtccccagaaagatcacacatccacagctgtaggtgatggctccagtggatcacagcctagggaaggcagaggggacattggaaccaactgccaaaaaatgactaataaaacactttctcactcagagagtcaagtctttgcccttactccagcattgcataaactacagcttggtgaggagactcagtcagatgaaccaaacttagagagtctgcagtctgaaccaagagaattacctcaaagaagtcaggaggcaaatatgacagagagcaggaaggctgaagatgaaatgcagaagtcagcttgggatcaaccttcacttcctgaaggaaacaaaaataaaaccaacttggatgacctagtaaagggggaaaatagatcttcagttaaacacagattggcagccatgtctaaagccagcagaaaattcccagctaaagatgtaagccccagaagacatgtagctactatcttcccccaaagtggaagcagatctggctttgaccatttatctcttggcacagtggagtgcaacccactgttccctgagcctactccaaaatctgcagagtccattggcgaaagcaggttgagtgagaacagaaagcatgtgaagaaatccgagaaccttctccccattactgtactacccaacagagaaccttctacacacgtcagcaaccagaagtctaacagcatttcacaacgacatcagaatgagtttaaaaacgtctcagaatcaccatcaaagcatgagaattctaaagacgtcacagcagctcagaatttagtaagagaatcaggagccccatcacccatcacattcaccagcctcagggaagcagaattctctgacaatcagaggaggctgagccctccttttccactggagcctgcacagaaatctagagtaagcagtccactggccagttttctgcagcaacaaaggagtgcttcatctctggagtgggaacctgagccacacctctatcgttcaaagagtttaaaaagcattaatgttcatggcgatctactacgaaaaagccatcctccaaaagtcagggagcgccatttttctgaaagcacttctattgacaatgccctgagtcgactgacccttgggaatgaattctctgtcaacaatgggtacagtcgaagattcagatctttttctgaactcccctcctgtgatggaaatgaaagttgggcttatcgcagcgggacaaaaacaggtcccaggtgccagaagatggcttatctccaagtgaaccgcttaatatctatgaggatgacccagtggactcagattgtgacacagacacaaccacagatgatgaatactacctggatgaaaatgacaaagagtcagaactctgaaattccaggaccaattctaaaaaccatgccacagaattggacctgccaagggggctgctgtctctgttatgaccaggaagatgctgaatcaagacatcaagtgggccgatatcctgaatcactaccttcatttggtccagaaattgctcctatagaaataaaaacactaaaattgtctaattttcaatgtcactaagttgacttagaagaatttccatgaggtactgttgagggagaaatgtaaaattccatttttgtaaagcattcaccaagaaacctgcatatgcatgtgtacacatggagggacacattggttattaatgttggttgttttgtagacaggtgttgggggagaggatg

SEQ ID NO: 460481 - DNA, 1719 bp, Homo sapiens
gagggtgaaaacaggtgatcctttcattcagctctaggaatccaagatggccttgcacacgcatacagaatgcaaatcggtcacacagcctgagaatgtctaccctccaatgtcaacccgcattgcaccaaggaagggacaaaagacaaactcacatggccatccccaaggaacccagagccctaggcctccacgaccactcttaaaagcttacctacagatacggcaacaagctgttatttatctttactttgggcgtcataagaaaaagtgtttagcttgggatgtaaatcacacaagctacgcaacgaaagatatgttctgctggtgcctcaggaatttaccaaatgttcagaacagtatattcataagagcccaaaagtgggaaaaatgcaaatgtctatcaaatggtgaatggatacaaaatatggtataccatacaatggaatgtcgttcaataataaagagtagcaaagtacaggaatacattaccatgcaaacgagtcgctaaaacactatgctaaatggaagaagccagatgcaatcctggatatgttgtattgtttcttttatgtgaaatgtccagagtagcagagtctacaaagaaggagaacaataaagttgtagagctcatcaacggaaggtatcggtgtaaagataaaaataaggatcaaagggaaaaatagaattgagaactagacacacatatggaccttcaattgctgtcttacgaaagtgtcaaggccacagtatagtgtaaaaaaataagttttgtatgtactcgtaaaatcaaaaaaattgtgttactaacttctttgcaatatttattataatgacctagaaacgaacctgcaatatctccaagatgtgcctgcaagcaaattgtttcttaaggctttttctacatagaagtgaaatccataagtaaagcaattaaacagattattaaagcaaaaaatgagctcaaaatcatcagatttttgagtcaaaggcatattttttaagcttgactatgcaggacagcaccgagacattcatgagggatctgaccccatgacctaaacacctcccaccaggccccacactggggatggcatttcaacgtgagatttgaaggggacaaacatagaagccacgattggcactacaattacctttattttatgaaagagaaactgagtcttagagatgaagaactttcaaggaccagccacgtagaagactgtggcacagggaaagaaagcagaaacttccattctaccacccatgcttgctgcaattttcttgtcaccatcattggctgcatccttccaatgagtgatattcaaatgacatttagcaggcagaaggaaaagccatgttttctgttgtgtttttgaatgctgacccggggttggcctccaggtgcagtgttgaggaaaccatgtactggtacatggcagctgaagttatgcatttttgcttctttgcaatttctgcatttccaggcaagagacaatgctgatgctacagcactggagcttagaattcacacttcattgataacatgcataactttttgaaatatcttctaagtaaacactttttaaaatattggggtagaaaactatatgcagctaggcatggtggctcacacctgtaacctaaacactttgagaggccaaggcgggaggattgcttgagactaggagttcaagaccagcttggggcaacatggtg

SEQ ID NO: 460482 - DNA, 1326 bp, Homo sapiens
aagccagacgacaaggagcaaagcaaagagatgaacaataaactggctgaggcgaaagagagcctggctcaacccgtcagtgattcaagtaagactcaaggtcctgtagccacagagccagacaaggatcaaggttctgtggtcccaggccttctgaaaggtcaaggtcctatggtgcaagagcctctgaagaagcaaggttctgtggtcccagggcctccaaaggatctaggtcccatgatcccattaccagtcaaggatcaagatcacacggtccctgagcctttaaagaatgaaagccctgttatctcagcaccagtcaaggaccaaggtccctcggtcccagttcctccaaagaatcaaagtcctatggttccagcaaaagttaaggatcaaggctctgtggtaccagagtctctaaaggatcaaggtcctaggattcctgagcctgtgaagaatcaagctcctatggtcccagcacctgtcaaggatgaaggtcccatggtctcagcatctgtcaaggatcaaggtcccatggtctcagcacctgtcaaggatcaaggtcccatagtcccagcacctgtcaagggtgaaggtcccatagtcccagcacctgtcaaggatgaaggtcccatggtctcagcacctatcaaggatcaagatcccatggtcccagagcatccgaaggatgaaagtgccatggccacagcacccataaagaatcaaggttccatggtctctgagcctgtaaagaatcaaggtttagtggtctcagggccagtcaaggatcaagatgttgtagtcccagagcatgcaaaggttcacgattctgcagttgtggcacctgtaaagaatcaaggtcctgtggtccccgagtccgtgaagaatcaagaccccattctcccagtactagttaaggatcaaggccccacagtcctacagcctccaaagaatcaaggtcgtatagtccctgaacctctgaagaatcaagttcctatagtcccagtgcctctgaaggatcaagatcctctggtgccagtaccagcaaaggaccaaggtcctgcagtccctgaacctctgaagactcaaggtcccagggaccctcagctacctactgtctcacctctaccccgagtcatgatcccaactgccccccatacggaatacattgagagctccccttgacactcaccccttgacacaccaatgaaggagctgacagtgagagtgctcccctcccaggggcagtgaagacacatatttaatctgcatgaaacatgtacagtagtcttgctggaatctaataaaaatggtccctctggctca

SEQ ID NO: 460483 - DNA, 1605 bp, Homo sapiens
aagccagacgacaaggagcaaagcaaagagatgaacaataaactggctgaggcgaaagagagcctggctcaacccgtcagtgattcaagtaagactcaaggtcctgtagccacagagccagacaaggatcaaggttctgtggtcccaggccttctgaaaggtcaaggtcctatggtgcaagagcctctgaagaagcaaggttctgtggtcccagggcctccaaaggatctaggtcccatgatcccattaccagtcaaggatcaagatcacacggtccctgagcctttaaagaatgaaagccctgttatctcagcaccagtcaaggaccaaggtccctcggtcccagttcctccaaagaatcaaagtcctatggttccagcaaaagttaaggatcaaggctctgtggtaccagagtctctaaaggatcaaggtcctaggattcctgagcctgtgaagaatcaagctcctatggtcccagcacctgtcaaggatgaaggtcccatggtctcagcatctgtcaaggatcaaggtcccatggtctcagcacctgtcaaggatcaaggtcccatagtcccagcacctgtcaagggtgaaggtcccatagtcccagcacctgtcaaggatgaaggtcccatggtctcagcacctatcaaggatcaagatcccatggtcccagagcatccgaaggatgaaagtgccatggccacagcacccataaagaatcaaggttccatggtctctgagcctgtaaagaatcaaggtttagtggtctcagggccagtcaaggatcaagatgttgtagtcccagagcatgcaaaggttcacgattctgcagttgtggcacctgtaaagaatcaaggtcctgtggtccccgagtccgtgaagaatcaagaccccattctcccagtactagttaaggatcaaggccccacagtcctacagcctccaaagaatcaaggtcgtatagtccctgaacctctgaagaatcaagttcctatagtcccagtgcctctgaaggatcaagatcctctggtgccagtaccagcaaaggaccaaggtcctgcagtccctgaacctctgaagactcaaggtcccagggaccctcagctacctactgtctcacctctaccccgagtcatgatcccaactgccccccatacggaatacattgagagctccccttgacactcaccccttgacacaccaatgaaggagctgacagtgagagtgctcccctcccaggggcagtgaagacacatatttaatctgcatgaaacatgtacagtagtcttgctggaatctaataaaaatggtccctctggctcaaaaaaaacaaaaacgaaacaagaaaaaacatagacgaatgaaaaaaaaaaaaaaagaggggggggaaaaatacccggggggagccaatttatcacaccccgttgtgttaacagggcctcatgggggggcgtatataaccagacggcgcgttaaaacggagggcggaaacctagcgcggagttggagaagccactgtgggggagacgtggcacaccacagatatcccggaataacattggtttatgtgtacccactattcgccggaaggtcgcgtttgat

SEQ ID NO: 460484 - DNA, 1482 bp, Homo sapiens
gtcaccccgtgctttaaaccatccgtgggctcctcgtggtgcagaagcttcttgttccctcggtgcaccatgctgcttctcacctccatgcctttacccttgctgtccacctgcctggaatgcccttctcctgcttctccacctggctaactcatccttcaagactctgctcaggggacagctccaggaagcctttcccgcacctcccaagctgggagcctggctcaacccgtcagtgattcaagtaagactcaaggtcctgtagccacagagccagacaaggatcaaggttctgtggtcccaggccttctgaaaggtcaaggtcctatggtgcaagagcctctgaagaagcaaggttctgtggtcccagggcctccaaaggatctaggtcccatgatcccattaccagtcaaggatcaagatcacacggtccctgagcctttaaagaatgaaagccctgttatctcagcaccagtcaaggaccaaggtccctcggtcccagttcctccaaagaatcaaagtcctatggttccagcaaaagttaaggatcaaggctctgtggtaccagagtctctaaaggatcaaggtcctaggattcctgagcctgtgaagaatcaagctcctatggtcccagcacctgtcaaggatgaaggtcccatggtctcagcatctgtcaaggatcaaggtcccatggtctcagcacctgtcaaggatcaaggtcccatagtcccagcacctgtcaagggtgaaggtcccatagtcccagcacctgtcaaggatgaaggtcccatggtctcagcacctatcaaggatcaagatcccatggtcccagagcatccgaaggatgaaagtgccatggccacagcacccataaagaatcaaggttccatggtctctgagcctgtaaagaatcaaggtttagtggtctcagggccagtcaaggatcaagatgttgtagtcccagagcatgcaaaggttcacgattctgcagttgtggcacctgtaaagaatcaaggtcctgtggtccccgagtccgtgaagaatcaagaccccattctcccagtactagttaaggatcaaggccccacagtcctacagcctccaaagaatcaaggtcgtatagtccctgaacctctgaagaatcaagttcctatagtcccagtgcctctgaaggatcaagatcctctggtgccagtaccagcaaaggaccaaggtcctgcagtccctgaacctctgaagactcaaggtcccagggaccctcagctacctactgtctcacctctaccccgagtcatgatcccaactgccccccatacggaatacattgagagctccccttgacactcaccccttgacacaccaatgaaggagctgacagtgagagtgctcccctcccaggggcagtgaagacacatatttaatctgcatgaaacatgtacagtagtcttgctggaatctaataaaaatggtccctctggctca

SEQ ID NO: 460485 - DNA, 1169 bp, Homo sapiens
aagccagacgacaaggagcaaagcaaagagatgaacaataaactggctgaggcgaaagagagcctggctcaacccgtcagtgattcaagtaagactcaaggtcctgtagccacagagccagacaaggatcaaggttctgtggtcccaggccttctgaaaggtcaaggtcctatggtgcaagagcctctgaagaagcaaggttctgtggtcccagggcctccaaaggatctaggtcccatgatcccattaccagtcaaggatcaagatcacacggtccctgagcctttaaagaatgaaagccctgttatctcagcaccagtcaaggaccaaggtccctcggtcccagttcctccaaagaatcaaagtcctatggttccagcaaaagttaaggatcaaggctctgtggtaccagagtctctaaaggatcaaggtcctaggattcctgagcctgtgaagaatcaagctcctatggtcccagcacctgtcaaggatgaaggtcccatggtctcagcatctgtcaaggatcaaggtcccatggtctcagcacctgtcaaggatcaaggtcccatagtcccagcacctgtcaagggtgaaggtcccatagtcccagcacctgtcaaggatgaaggtcccatggtctcagcacctatcaaggatcaagatcccatggtcccagagcatccgaaggatgaaagtgccatggccacagcacccataaagaatcaaggttccatggtctctgagcctgtaaagaatcaaggtttagtggtctcagggccagtcaaggatcaagatgttgtagtcccagagcatgcaaaggttcacgattctgcagttgtggcacctgtaaagaatcaaggtcctgtggtccccgagtccgtgaagaatcaagaccccattctcccagtactagttaaggatcaaggccccacagtcctacagcctccaaagaatcaaggtcgtatagtccctgaacctctgaagaatcaagttcctatagtcccagtgcctctgaaggatcaagatcctctggtgccagtaccagcaaaggaccaaggtcctgcagtccctgaacctctgaagactcaaggtcccagggaccctcagctacctactgtctcacctctaccccgagtcgtgggcagaaagggatccttagagtcgcctcg

SEQ ID NO: 460486 - DNA, 2075 bp, Homo sapiens
cctgcagcccgccatgcctgagcctcccacccactccatgggctcctgtgcagcccgagcctccccgacgagcactaccccctgctccacggcacccagtcccaacgaccacccaagggctgaggaatgcgagcgcacggcgcaggactggcaggcagctccacctgcagcctcggtgtgggatccactaggtgaagccagctgggctcctgagtctggtggggacctcaagatttgtaaacacaccaatcagcaccctgtgtttagctcaaggtttgtgaatgcaccaatcgacactctatctagctgctctggtgaggccttggagaacctgtgtgtggaaactctgtatctaactaatctgatggggacgtggagaacctttgcatctagctcagggattgtaaacgcaccaatcagtgccctgacaaaaacaggccactgggctctgccaatcagcaggatgtgggtggggccagataagagaataaaagcaggctgcccgagccagcattggcaacccactcgggtctccttcaacgctatggaagctttgctcttttgctctttgcaataaatcttgctactgttcactctttgggtccatgctgcttttatgagctgtaacactcacagggaaaatctgcagcttcactcccgaaccgagcgagaccacgagcccaccgggaggaaagaacaactccagacatgctgccttaagagctgtaacactcaccgcgaaggtctgccgtttcactcctgagccagtgagaccacgaacccaccagaagaaagaaactctgaacacatctgaacatcagaaggaacagactccagacgcgccaccttaagagctgtaacactcaccgcgagggtccgcggcttcattcttgaagtcagtgagaccaagaacccaccaattccggacacagaatttcatggagcctggagcccaggaaaagggtgaatccaatgcaggctgatttctggcttacatcacagtccagtctgattttctgcagattactttctacaagacgatttgggacctcagtttaccacctcccagcggaccgacgggtgcgtttgcaatagtttcaaagtaaccccttccacagacacaaattgttcattagttataaatagaacaacagtaactttacagtggaaaaagctggcggacatcattttagccacataatcaaagttaacgtcaacagtaaggagaaaatcaacaccacgtgtcttctgacaacaacgcgctgatgggagcccaacatcatttacaccataaatcaaatgtttatccgttggcgattccagccaaaaatagataacctgatccaatcatgagggaacttcagacaaacccaaactgaaggacattctacagaataactggtctgtactcataacaaagaatcaatgtcatgagggaccatgaaaggctgaggatgtcccacaggttgaaagtgacgaaaacaaacaaaaaacaaccagcaaccaactacgatgcacaaccttggattggagccttctcaaaattgctgaaaataacagtggaacaagtggtgaaatttgaatatgggctatatgttaggtattcattttatgtcaatgttaaattttccgacattgatatttgtaccaggaaatgtaaaagaaggcccaaatttagcgataaattatgcctgccactcactctctccaatgattcagaagatagtacggatgatgaacagatgacagagacatggtaggtagatcaatagatggatggatagatagaaaatatgaaataagaaactcctggacacgaaccgtacagaccaagttcatcactcctgtgagggagaaccttgaattcccataagaaaaactgaatgtgcaggaagcgtatctcattcagttcacaaaccatgatgggttctgtgttcaccctggctaactatctacttctacctctcctctcctcctctcctctcctctcctctcctctcctctcctctcctctcctctcctctcctctcctctcctctcccctcgtctccccttccttgtctgctctctttttc

SEQ ID NO: 460487 - DNA, 1445 bp, Homo sapiens
gaggttaaaggtctaaaatagatgtctaatactctccacgttcagaaagaagagtcctacaaattattgctgatgtgcactaatgaaagtcaatcttgtagtgattataactgcaggtcagaactaggatttcatggggataatgtaacgttaactgtacggcataagcatgtaactcacattccaatggaagcagaagaggttgagcccacaatcaaactgtcactgaattctaaaccaaaactgaagtatggacttcttctcattagggtcacgttgccaggactatacaatgaaatgcctggccgtgagagtccagcaattttctttgctctcagagttcctgtttggaaaagaaatctgagaacttcatggtggtgtcccattgggtgggatggagtgggcatcaggatgagtctctccggaggggatgggaatctcaaatgccagccgctgaatgatgagtgggtgctcaaaccggaatctggatttgtgaaggtggatcgtaggctgggaaaaaaggtcatattttctcactccaactctgataagctgataggtttagcacaggtgtttgggaagacaacaacccagggctgttctgtttctgactcaagatattggagcaagctatgcctctccatggagatgaggaagcctgcagcccccgaaggtcacggatgctgttggagccacgaggaagagccatcagcccagggagaccctgagggtcagggcatctccatggatgaactccgtgtactgctggactcatccaacccttcgtggacatcactttgtagtgaaaatcccttttgttgttgaagaaagcctgagttgggtgatttattactcataaagtatgttaataccttgatgctaatattctcatgagagaattatactctagtcttatgatagcactaaaagtaacttaaaggccccacgcttctccagataaaaccaacacttgtgaaacccttgctttgccgtttactatctatgttcctggacaaactattaaatgtgccgagtctacacctccacctcagtttaggatcaataatctatatcttttctttttcagtttcaatacataaaaataagtgccatgagtagttcttgtaactgaataggcacttaaaagtgaaattaggctcttcatttctcctgctttcttatcgtacatctttatgatactttaatttgagctacaacccctgagatcttcttgagagttaatcactgctgagagacaatacagagacaggacaatagacagatcgcatgtgacgacagagttctgacccacaacctctgcagcaattgctccccaacaatggggacttagtgaataactgctacctgccctatttatgcccccaactcaggaacagcaggtcaatccaatatgcttctctaatacccacatagttctcattctt

SEQ ID NO: 460488 - DNA, 1387 bp, Homo sapiens
agcagtaataggatgctggtgaatgctgagatttcacttgaatccttcagtcataaatttaaagtaagatcagtaaacaaagttatgcacttctcttcagctctgtgtcgctgcttcagtatagacataaagatctcaaaaagccagttttcatcagagttaggattttctagcccaggtgaatccagtgatgccatccaggagccaaggactagagccaaaaaccttaaaaattacttggtatcctattgtgctgctgctgagctggcactcacactacaagatgcagttattgccactcttctctctcctttccacaggcagaggaggctcaccgcatgtctaccaccgcacaggcccatggaaagtattgacgggctttcgtcagtgttcacttaagccccaagagctcttcagttagcttgtgcatacagactctctttccacgcggccactgccaggggatgaggaagagatggtgtcaacaattcaagactgtctctcttgctctcttcagtgtatctttcagtaacatgaagttataatcagcctaagcttacgcaggtccaggattattaatgtcactgtcttccatctccacatcttgtcccactggaaggtcttcaggagcaagaacacgcatggagctgtcatcccctatgataacaatgccttctgctggaatagctcctgaaagacctgcatgaggctgtttcacaattacttttttttataagtagaaggagtcagtacactccaaaataataataaaatatagtattgtgtatatcaaaacctgtaatgtagttgtttataattgttatcaagtattatgtactgagtgttattgacttttatctttattgaaattaataacttttaaagtcaactacttctaagcattctattcaaatataaagcttgtttaacagatatagtaccaaataattaattttcaaataactaatttgcttttatgaaagtgatggcttacattattaatgtaatttatgtgtataaataatttaatgccaaattatgttttatagtatgtgtagattacattttcaagtaccttacattacttgcaaaatatagaatattgtgaaatcacaaaatttgcaaataaacatactgaaagtaatagtaaatggtagcaataggcatatattatgtagtgttatagtgagaaggttagagggaagtatttagaaagatttattcttcactagtaagtctacagaaatgtttagcaacagtgtaaaatatatggataataattgttattgaaacaaatatggaattgcaataacattttcaaaatgcatttgtcatgacattagttaatagtatttattgtacctgtaagataactaggttcagggag

SEQ ID NO: 460489 - DNA, 858 bp, Homo sapiens
gatccctaatgggagttaaggatggcaagcgcctggccctgcaaagcctcaactctctacttggctccgctagacccatcaatcttctctccatggcctgggacccctccaaccctggacgtcgagagagactcggcagctgtgagaaccttctttctcaagtaaggtttttttccaaaattatatcaggtttccttctaccccagcttgtcagtgggggactcttttgcctaacatggttgaggaatgtcttagaaactggacagaaatcagtctgcaaatcaccctgtgtcacagccctggaaagcaggactgagaaccagaaaacttcagtggaagtcattggtcccagtggccaaagcaccaaactgaagaagaaagtgaagagtccaaggacagataaagctctggccaaggccttattcttggtaggtgtccacatgaactctgaaggaggaagccacgatgtcagctgtctgttccctttgtcatcactgctagacagtgggtgtctgcgctgggctatttgctgatttatttgttcaatgctggtctcccacactagaccatgagcaggaaggagaggcagcatgcaactgtgctcgttgtctacacagggcctagcactgggcctgggccagggcaggcacctgggagattgctgcaagagagaaggtcacctatctccccaggtagcctctctcaccctgacaatgtatcttcacaggtaagggacaaagacaagactagaaatcatccctctgcccacctcaagacaaatgcagatctgacttcttcttcctctactctatgtttactttatcttatgtaaaatacaagatttactgagcaggagcc

SEQ ID NO: 460490 - DNA, 1946 bp, Homo sapiens
agcctacatctttctcccgtgctatgctttctgccctcgaacatcggactccaagttcttcagttttgggactcggactggctctcctttctcctctgcttgcagacatcctgttgtgggaacttgtgatcatggtgtccaagcccttacataaccgtaggtgggaccgagccactactacctgggacagcaagaaggtggaaagactgaggatgggaattctcttagaggatgcaacctcaggacttcccgtttctatatatgtgaatgagaatttcttccgccacagaatattcaagacacaaggaattggagcaaataccgattcaggaattggacagctgtggtttgcaggctttttggagggaatgcaaggagaaggcttttatagggtgaaaaagggaatcaagggtgtggataagacagtggtaggagatgaagttgtaaaaacggcatatggaacacgtgagattgaaagaattgtgtgcaatagtcttggtgagaatgatgaagatctgaagcagtactttagcagtgaggatggacagaaggtatttcaaaacctgcttttgtttttcccgacccagcccatctgccaagcagcctatcagaatgactttggacaagtgtggcggtgggtgaaagaagacagcagctatgccaacgttcaagatggctttaatggagacacgcccctgatctgtgcttgcaggcgagggcatgtgagaatcgtttccttccttttaagaagaaatgctaatgtcaacctcaaaaaccaggtatcaaagacaaagcagaatgaggctcttgtacgaatgctacttgatgctggcgtcgaagttaatgctacagattgtggaatgggatccagagctaaacctgtcttgatagccaaagtactagaaatagttgtctatcaatggtttgcagactatttttctgcttagttgtatactacaaagtgtgaaaaggatttgccaatgaagccacatgctatggtctgtggagggcccgacttatgagctgaagttttggccctttgtgtttcagtatggctgtaccgcattacattatgcctgtgaaatgaaaaaccagtctcttatccctctgctcttggaagcccgtgcagaccccacaataaagaataagcatggtgagagctcactggatattgcacggagattaaaattttcccagattgaattaatgctaaggaaagcattgtaatccttgtgaccacaccgatggagatacagaaaaagttaacgactggattctatcttcattttagacttttggtctgtgggccatttaacctggatgccaccattttatggggataatgatgcttaccatggttaatgttttggaagagctttttatttatagcattgtttactcagtcaagttcaccatggccgtaatccttctaagggaaacactaaagttgttgtagtctccacttcagtcagaaactgatgtttcagctaggcacagtggtacatgcctgtaatcccagctacttgggaggctgaggtgggaggatcacttgaactcaggagtttgagagcagccagggcaacacagcgagaccctgtctcaaaaaaaaaaaaaaaaaaaaaaagccctggtgttccaaactcagtctttcctgaagaagaggatctgagttatcttctgaaacagcgttctcccttcccagttgtatcactcttataaaaagactgtccagtctatgtcatgccctaggagacaaactgttcctcccagccccctttgagtattgagcagaagaatcaaattattaaatacgtatgtttgtacagaatggtatttgtgtatgtgtgtgggcttagagattcacaagtaaatattcctttggtgaaggaatttcaataaaaacatctatcaagtgtcagcggtgagtgtgtttacaccacagaaat

SEQ ID NO: 460491 - DNA, 369 bp, Homo sapiens
aaaaaaaaaaaaaaaaaaaaaaaaaaaaaaaaaaaaaaaaaaaaaaagccctggtgttccaaactcagtctttcctgaagaagaggatctgagttatcttctgaaacagcgttctcccttcccagttgtatcactcttataaaaagactgtccagtctatgtcatgccctaggagacaaactgttcctcccagccccctttgagtattgagcagaagaatcaaattattaaatacgtatgtttgtacagaatggtatttgtgtatgtgtgtgggcttagagattcacaagtaaatattcctttggtgaaggaatttcaataaaaacatctatcaagtgtcagcggtgagtgtgtttacaccacagaaat

SEQ ID NO: 460492 - DNA, 1379 bp, Homo sapiens
tgctgcctgagctgctggaaaagcactgacaggtgtttgctagaaaagcactcctggagcttgccaccagcttggacttctagggactttcctctcagccaggaaggattttgatattcatcagaaatacctccagaagattcaaggagctgtagaggtgaagtaagcctgtgaaggaccagcatgggaatcctatactctgagcccatctgccaagcagcctatcagaatgactttggacaagtgtggcggtgggtgaaagaagacagcagctatgccaacgttcaagatggctttaatggagacacgcccctgatctgtgcttgcaggcgagggcatgtgagaatcgtttccttccttttaagaagaaatgctaatgtcaacctcaaaaaccagaaagagagaacctgcttgcattatgctgtgaagaaaaaatttaccttcattgattatctactaattatcctcttaatgcctgttctgcttattgggtatttcctcatggtatcaaagacaaagcagaatgaggctcttgtacgaatgctacttgatgctggcgtcgaagttaatgctacagattgtcatggtgagagctcactggatattgcacggagattaaaattttcccagattgaattaatgctaaggaaagcattgtaatccttgtgaccacaccgatggagatacagaaaaagttaacgactggattctatcttcattttagacttttggtctgtgggccatttaacctggatgccaccattttatggggataatgatgcttaccatggttaatgttttggaagagctttttatttatagcattgtttactcagtcaagttcaccatggccgtaatccttctaagggaaacactaaagttgttgtagtctccacttcagtcagaaactgatgtttcagctaggcacagtggtacatgcctgtaatcccagctacttgggaggctgaggtgggaggatcacttgaactcaggagtttgagagcagccagggcaacacagcgagaccctgtctcaaaaaaaaaaaaaaaaaaaaaaagccctggtgttccaaactcagtctttcctgaagaagaggatctgagttatcttctgaaacagcgttctcccttcccagttgtatcactcttataaaaagactgtccagtctatgtcatgccctaggagacaaactgttcctcccagccccctttgagtattgagcagaagaatcaaattattaaatacgtatgtttgtacagaatggtatttgtgtatgtgtgtgggcttagagattcacaagtaaatattcctttggtgaaggaatttcaataaaaacatctatcaagtgtcagcggtgagtgtgtttacaccacagaaat

SEQ ID NO: 460493 - DNA, 1478 bp, Homo sapiens
tgctgcctgagctgctggaaaagcactgacaggtgtttgctagaaaagcactcctggagcttgccaccagcttggacttctagggactttcctctcagccaggaaggattttgatattcatcagaaatacctccagaagattcaaggagctgtagaggtgaagtaagcctgtgaaggaccagcatgggaatcctatactctgagcccatctgccaagcagcctatcagaatgactttggacaagtgtggcggtgggtgaaagaagacagcagctatgccaacgttcaagatggctttaatggagacacgcccctgatctgtgcttgcaggcgagggcatgtgagaatcgtttccttccttttaagaagaaatgctaatgtcaacctcaaaaaccagaaagagagaacctgcttgcattatgctgtgaagaaaaaatttaccttcattgattatctactaattatcctcttaatgcctgttctgcttattgggtatttcctcatggtatcaaagacaaagcagaatgaggctcttgtacgaatgctacttgatgctggcgtcgaagttaatgctacagattgttatggctgtaccgcattacattatgcctgtgaaatgaaaaaccagtctcttatccctctgctcttggaagcccgtgcagaccccacaataaagaataagcatggtgagagctcactggatattgcacggagattaaaattttcccagattgaattaatgctaaggaaagcattgtaatccttgtgaccacaccgatggagatacagaaaaagttaacgactggattctatcttcattttagacttttggtctgtgggccatttaacctggatgccaccattttatggggataatgatgcttaccatggttaatgttttggaagagctttttatttatagcattgtttactcagtcaagttcaccatggccgtaatccttctaagggaaacactaaagttgttgtagtctccacttcagtcagaaactgatgtttcagctaggcacagtggtacatgcctgtaatcccagctacttgggaggctgaggtgggaggatcacttgaactcaggagtttgagagcagccagggcaacacagcgagaccctgtctcaaaaaaaaaaaaaaaaaaaaaaagccctggtgttccaaactcagtctttcctgaagaagaggatctgagttatcttctgaaacagcgttctcccttcccagttgtatcactcttataaaaagactgtccagtctatgtcatgccctaggagacaaactgttcctcccagccccctttgagtattgagcagaagaatcaaattattaaatacgtatgtttgtacagaatggtatttgtgtatgtgtgtgggcttagagattcacaagtaaatattcctttggtgaaggaatttcaataaaaacatctatcaagtgtcagcggtgagtgtgtttacaccacagaaat

SEQ ID NO: 460494 - DNA, 3639 bp, Homo sapiens
caaacaacaggacacagcgaaggtaaaacggatgtctaggggagtggctaaaccatcactgtacactcaagagtctagcacagtgcctggcacacagtaaacagcaagtgaatgacaagcagttggcagtggccggagctccgtcgctggggcgtggagagggccgccccggcccgcagttcccgccctgacactgggataacttcccccgcggctgcccagcgccgccctgaccagaccctctgtaccccgacttctgtccggccagaagccacagccgcacgcagcgcctcgccccgtgacgtcactcggggcgggacttccggccgccgaagtttaacagtccaggcgggagccggaagcccagcgcggagccggccgcggcccctgttgtgttgctgcggagagtgaggttccggaggccctgaggtcagcgggcccccgcccgccgcgtccgcgcaccctcccgatcctaagacccgctccgtccccctcagagggcggggcggcggtccttgggctttgcgcgcccggagcggttgctgggcgggggcgcggcggcgcgctgggctgggaagtgtccggggaggcgcgggccggggtcgcgcacctcccggagccttgtggggtgtgctgcctccgaaaagtttgcctcgtctccacaagtctgtctccttttttgtcaacctcaagtacttttcttttggcaggtacttggatgcattttacaggcgcagtcatgcaggaaaacctcagatttgcttcatcaggagatgatattaaaatatgggatgcttcatctatgacattggtggataaattcaacccacacacatcaccacatggaatcagctcaatatgttggagcagcaataataactttttagtaacagcatcttccagtggcgacaaaatagttgtctcaagttgcaaatgtaaacctgttccacttttagagcttgctgaagggcaaaagcagacatgtgtcaatttaaattctacatctatgtatttggtaagcggaggcctaaataacactgttaatatttgggatttaaaatcaaaaagagttcatcgatctcttaaggatcataaagatcaagtaacttgtgtaacatacaattggaatgattgctacattgcttctggatctcttagtggtgaaattattttacacagtgtaaccactaatttatctagtactccttttggccatggtagtaaccagtctgttcggcacttgaagtactccttgtttaagaaatcactactgggcagtgtttcggataatggaatagtaactctctgggatgtcaatagtcagagtccataccataactttgacagtgtacacaaagctccagcgtcaggcatctgtttttctcctgtcaatgaattgctctttgtaaccataggcttggataaaagaatcatcctctatgacacttcaagtaagaaagaagcacctgccacgtccattgccacagttctaccacaacctatgacatcagctatggggaaaggaacagttgctgttcaagaaaaagcaggtttgcctcgaagcataaacacagacactttatctaaggaaacagacagtggaaaaaatcaggatttctccagctttgatgatactgggaaaagtagtttaggtgacatgttctcacctatcagagatgcaaagttggtcacatctggtgctgaaagtggaaatctaaatacctctccatcatctaaccaaacaagaaattctgagaaatttgaaaagccagagaatgaaattgaagcccagttgatatgtgaacccccaatcaatggatcctcaactccaaatccaaagatagcatcttctgtcactgctggagttgccagttcactctcagaaaaaatagccgacagcattggaaataaccggcaaaatgcaccattgacttccattcaaattcgttttattcagaacatgatacaggaaacgttggatgactttagcagacccagggatctgagtgctggagcaactctgaaatcgctgtgcatttctgccctgctgccagctttcggggtggctggagcttgtttttcactatctaacctgttcctggctttctgtgcctcaggagaagtgtgtctgtcccactttcagccctgcagagctgctgcagcacgtttggtgaagacgtacagtcagtgcctcttggttttgctgccctgtgctgcatgtctgcacctaggagtggcctcctctcttcaagaccttggctcttacagccttggctaccttggtaggcccaaactcttaatactcccccacccagcgagactatctcaacctccaggccactgcttcagctcggtttcttctccacactgtggaatcagcacatactctagaaggaaaaacagagaaaaagatatgaaaaagcatttcaaggaagaggaatggtatatgaacacaggaaagatattcaacttcacaattaatcagagaactaaaaatgcaatgagataccgtgtcacaccgagtaaatgggaaaatataaaaaatctggtaatactaagtcttgatgatatagagcaagaagaactctgttatactggtgacatccattgataactacctttggaaaacaatttgcatgattttgtaaaagtatacacttgagttacagttggttatatcatcaatggacattggcacatgtgggtttggagataatacatgattgtttataacaacgttggaatagtaaaaacttgaaaacagtcaaaatattaacaggaaaatagatacaccagtacaaactaatgatatacagatatataaaacatgaatcttcaaaacaatattgaattatttcttaaatataagctatatggtacccttttttgtaatgctcaaaaacatgcacaatgaaaacattgactacagattatatgttatacaaatgtattaaaaaagcaaaagcatttctttgtccaacaaaattcaggagagtaatgacttctttcttgggctttttcccaagagttaagtgatagaatcagacaggaacacacaggaagcttctattatttggtaatgttctagttcataagttgtgtggtgggtgactgagtgtttcttttgttattatacttaataatttttacatattcttttgtaggcatgaattaattgtattttattgagtaagccatgctatatccacccaaattgccactttatactgaaagtacattttttcaatagctaaactgataataataaaatgatctttctaacctagtgaattttctgtatttcattgtaagataagtttgtgtcttaatgacaatttctatataaaggaatatagtatcggagagttcaggggttaaacagcctgggtttacatcctagctccatcatttactggttgtgtgactttgaacaagttatatctactctggttaagttatttcttttgtaaaatggacctgtaataattgcatctacttgtgaagatattttaaacgagttcttacatttaaagtaaaggaaacagtgcctagcacatagtgaataaatgctcagtgcattggtatttttattattatagtaattattaacattcagtaatttggcaaatgaaaaagttt

SEQ ID NO: 460495 - DNA, 1202 bp, Homo sapiens
caaacaacaggacacagcgaaggtaaaacggatgtctaggggagtggctaaaccatcactgtacactcaagagtctagcacagtgcctggcacacagtaaacagcaagtgaatgacaagcagttggcagtggccggagctccgtcgctggggcgtggagagggccgccccggcccgcagttcccgccctgacactgggataacttcccccgcggctgcccagcgccgccctgaccagaccctctgtaccccgacttctgtccggccagaagccacagccgcacgcagcgcctcgccccgtgacgtcactcggggcgggacttccggccgccgaagtttaacagtccaggcgggagccggaagcccagcgcggagccggccgcggcccctgttgtgttgctgcggagaggtacttggatgcattttacaggttagcctcacttgagctgttgtcctgcaagtaaagtgtatttttggtgattgaaagttggagaactttcatttcagctgagtggtgtagttgaattggttcctgtagccgctgtccctaaacccaggccgacgttaccgccttgtgtcctgactgctagctttcgacgggaccgtctttgagggactcatgtaaagtctctcccttaatgctcagttcttagaagaccgaggcgcagtcatgcaggaaaacctcagatttgcttcatcaggagatgatattaaaatatgggatgcttcatctatgacattggtggataaattcaacccacacacatcaccacatggaatcagctcaatatgttggagcagcaataataactttttagtaacagcatcttccagtggcgacaaaatagttgtctcaagttgcaaatgtaaacctgttccacttttagagcttgctgaagggcaaaagcagacatgtgtcaatttaaattctacatctatgtatttggtaagcggaggcctaaataacactgttaatatttgggatttaaaatcaaaaagagttcatcgatctcttaaggatcataaagatcaagtaacttgtgtaacatacaattggaatgattgctacattgcttctggatctcttagtggtgaaattattttacacagtgtaaccactaatttatctagtactccttttggccatggtagtaaccaggcgtcctcatcccgtttgcacctaaacactacaatcaagcttat

SEQ ID NO: 460496 - DNA, 3330 bp, Homo sapiens
caaacaacaggacacagcgaaggtaaaacggatgtctaggggagtggctaaaccatcactgtacactcaagagtctagcacagtgcctggcacacagtaaacagcaagtgaatgacaagcagttggcagtggccggagctccgtcgctggggcgtggagagggccgccccggcccgcagttcccgccctgacactgggataacttcccccgcggctgcccagcgccgccctgaccagaccctctgtaccccgacttctgtccggccagaagccacagccgcacgcagcgcctcgccccgtgacgtcactcggggcgggacttccggccgccgaagtttaacagtccaggcgggagccggaagcccagcgcggagccggccgcggcccctgttgtgttgctgcggagaggtacttggatgcattttacaggttagcctcacttgagctgttgtcctgcaagtaaagtgtatttttggtgattgaaagttggagaactttcatttcagctgagtggtgtagttgaattggttcctgtagccgctgtccctaaacccaggccgacgttaccgccttgtgtcctgactgctagctttcgacgggaccgtctttgagggactcatgtaaagtctctcccttaatgctcagttcttagaagaccgagcaaaagcagacatgtgtcaatttaaattctacatctatgtatttggtaagcggaggcctaaataacactgttaatatttgggatttaaaatcaaaaagagttcatcgatctcttaaggatcataaagatcaagtaacttgtgtaacatacaattggaatgattgctacattgcttctggatctcttagtggtgaaattattttacacagtgtaaccactaatttatctagtactccttttggccatggtagtaaccagtctgttcggcacttgaagtactccttgtttaagaaatcactactgggcagtgtttcggataatggaatagtaactctctgggatgtcaatagtcagagtccataccataactttgacagtgtacacaaagctccagcgtcaggcatctgtttttctcctgtcaatgaattgctctttgtaaccataggcttggataaaagaatcatcctctatgacacttcaagtaagaaagaagcacctgccacgtccattgccacagttctaccacaacctatgacatcagctatggggaaaggaacagttgctgttcaagaaaaagcaggtttgcctcgaagcataaacacagacactttatctaaggaaacagacagtggaaaaaatcaggatttctccagctttgatgatactgggaaaagtagtttaggtgacatgttctcacctatcagagatgcaaagttggtcacatctggtgctgaaagtggaaatctaaatacctctccatcatctaaccaaacaagaaattctgagaaatttgaaaagccagagaatgaaattgaagcccagttgatatgtgaacccccaatcaatggatcctcaactccaaatccaaagatagcatcttctgtcactgctggagttgccagttcactctcagaaaaaatagccgacagcattggaaataaccggcaaaatgcaccattgacttccattcaaattcgttttattcagaacatgatacaggaaacgttggatgactttagcagacccagggatctgagtgctggagcaactctgaaatcgctgtgcatttctgccctgctgccagctttcggggtggctggagcttgtttttcactatctaacctgttcctggctttctgtgcctcaggagaagtgtgtctgtcccactttcagccctgcagagctgctgcagcacgtttggtgaagacgtacagtcagtgcctcttggttttgctgccctgtgctgcatgtctgcacctaggagtggcctcctctcttcaagaccttggctcttacagccttggctaccttggtaggcccaaactcttaatactcccccacccagcgagactatctcaacctccaggccactgcttcagctcggtttcttctccacactgtggaatcagcacatactctagaaggaaaaacagagaaaaagatatgaaaaagcatttcaaggaagaggaatggtatatgaacacaggaaagatattcaacttcacaattaatcagagaactaaaaatgcaatgagataccgtgtcacaccgagtaaatgggaaaatataaaaaatctggtaatactaagtcttgatgatatagagcaagaagaactctgttatactggtgacatccattgataactacctttggaaaacaatttgcatgattttgtaaaagtatacacttgagttacagttggttatatcatcaatggacattggcacatgtgggtttggagataatacatgattgtttataacaacgttggaatagtaaaaacttgaaaacagtcaaaatattaacaggaaaatagatacaccagtacaaactaatgatatacagatatataaaacatgaatcttcaaaacaatattgaattatttcttaaatataagctatatggtacccttttttgtaatgctcaaaaacatgcacaatgaaaacattgactacagattatatgttatacaaatgtattaaaaaagcaaaagcatttctttgtccaacaaaattcaggagagtaatgacttctttcttgggctttttcccaagagttaagtgatagaatcagacaggaacacacaggaagcttctattatttggtaatgttctagttcataagttgtgtggtgggtgactgagtgtttcttttgttattatacttaataatttttacatattcttttgtaggcatgaattaattgtattttattgagtaagccatgctatatccacccaaattgccactttatactgaaagtacattttttcaatagctaaactgataataataaaatgatctttctaacctagtgaattttctgtatttcattgtaagataagtttgtgtcttaatgacaatttctatataaaggaatatagtatcggagagttcaggggttaaacagcctgggtttacatcctagctccatcatttactggttgtgtgactttgaacaagttatatctactctggttaagttatttcttttgtaaaatggacctgtaataattgcatctacttgtgaagatattttaaacgagttcttacatttaaagtaaaggaaacagtgcctagcacatagtgaataaatgctcagtgcattggtatttttattattatagtaattattaacattcagtaatttggcaaatgaaaaagttt

SEQ ID NO: 460497 - DNA, 3316 bp, Homo sapiens
caaacaacaggacacagcgaaggtaaaacggatgtctaggggagtggctaaaccatcactgtacactcaagagtctagcacagtgcctggcacacagtaaacagcaagtgaatgacaagcagttggcagtggccggagctccgtcgctggggcgtggagagggccgccccggcccgcagttcccgccctgacactgggataacttcccccgcggctgcccagcgccgccctgaccagaccctctgtaccccgacttctgtccggccagaagccacagccgcacgcagcgcctcgccccgtgacgtcactcggggcgggacttccggccgccgaagtttaacagtccaggcgggagccggaagcccagcgcggagccggccgcggcccctgttgtgttgctgcggagaggcgcagtcatgcaggaaaacctcagatttgcttcatcaggagatgatattaaaatatgggatgcttcatctatgacattggtggataaattcaacccacacacatcaccacatggaatcagctcaatatgttggagcagcaataataactttttagtaacagcatcttccagtggcgacaaaatagttgtctcaagttgcaaatgtaaacctgttccacttttagagcttgctgaagggcaaaagcagacatgtgtcaatttaaattctacatctatgtatttggtaagcggaggcctaaataacactgttaatatttgggatttaaaatcaaaaagagttcatcgatctcttaaggatcataaagatcaagtaacttgtgtaacatacaattggaatgattgctacattgcttctggatctcttagtggtgaaattattttacacagtgtaaccactaatttatctagtactccttttggccatggtagtaaccagtctgttcggcacttgaagtactccttgtttaagaaatcactactgggcagtgtttcggataatggaatagtaactctctgggatgtcaatagtcagagtccataccataactttgacagtgtacacaaagctccagcgtcaggcatctgtttttctcctgtcaatgaattgctctttgtaaccataggcttggataaaagaatcatcctctatgacacttcaagtaagaaagaagcacctgccacgtccattgccacagttctaccacaacctatgacatcagctatggggaaaggaacagttgctgttcaagaaaaagcaggtttgcctcgaagcataaacacagacactttatctaaggaaacagacagtggaaaaaatcaggatttctccagctttgatgatactgggaaaagtagtttaggtgacatgttctcacctatcagagatgcaaagttggtcacatctggtgctgaaagtggaaatctaaatacctctccatcatctaaccaaacaagaaattctgagaaatttgaaaagccagagaatgaaattgaagcccagttgatatgtgaacccccaatcaatggatcctcaactccaaatccaaagatagcatcttctgtcactgctggagttgccagttcactctcagaaaaaatagccgacagcattggaaataaccggcaaaatgcaccattgacttccattcaaattcgttttattcagaacatgatacaggaaacgttggatgactttagcagacccagggatctgagtgctggagcaactctgaaatcgctgtgcatttctgccctgctgccagctttcggggtggctggagcttgtttttcactatctaacctgttcctggctttctgtgcctcaggagaagtgtgtctgtcccactttcagccctgcagagctgctgcagcacgtttggtgaagacgtacagtcagtgcctcttggttttgctgccctgtgctgcatgtctgcacctaggagtggcctcctctcttcaagaccttggctcttacagccttggctaccttggtaggcccaaactcttaatactcccccacccagcgagactatctcaacctccaggccactgcttcagctcggtttcttctccacactgtggaatcagcacatactctagaaggaaaaacagagaaaaagatatgaaaaagcatttcaaggaagaggaatggtatatgaacacaggaaagatattcaacttcacaattaatcagagaactaaaaatgcaatgagataccgtgtcacaccgagtaaatgggaaaatataaaaaatctggtaatactaagtcttgatgatatagagcaagaagaactctgttatactggtgacatccattgataactacctttggaaaacaatttgcatgattttgtaaaagtatacacttgagttacagttggttatatcatcaatggacattggcacatgtgggtttggagataatacatgattgtttataacaacgttggaatagtaaaaacttgaaaacagtcaaaatattaacaggaaaatagatacaccagtacaaactaatgatatacagatatataaaacatgaatcttcaaaacaatattgaattatttcttaaatataagctatatggtacccttttttgtaatgctcaaaaacatgcacaatgaaaacattgactacagattatatgttatacaaatgtattaaaaaagcaaaagcatttctttgtccaacaaaattcaggagagtaatgacttctttcttgggctttttcccaagagttaagtgatagaatcagacaggaacacacaggaagcttctattatttggtaatgttctagttcataagttgtgtggtgggtgactgagtgtttcttttgttattatacttaataatttttacatattcttttgtaggcatgaattaattgtattttattgagtaagccatgctatatccacccaaattgccactttatactgaaagtacattttttcaatagctaaactgataataataaaatgatctttctaacctagtgaattttctgtatttcattgtaagataagtttgtgtcttaatgacaatttctatataaaggaatatagtatcggagagttcaggggttaaacagcctgggtttacatcctagctccatcatttactggttgtgtgactttgaacaagttatatctactctggttaagttatttcttttgtaaaatggacctgtaataattgcatctacttgtgaagatattttaaacgagttcttacatttaaagtaaaggaaacagtgcctagcacatagtgaataaatgctcagtgcattggtatttttattattatagtaattattaacattcagtaatttggcaaatgaaaaagttt

SEQ ID NO: 460498 - DNA, 3569 bp, Homo sapiens
caaacaacaggacacagcgaaggtaaaacggatgtctaggggagtggctaaaccatcactgtacactcaagagtctagcacagtgcctggcacacagtaaacagcaagtgaatgacaagcagttggcagtggccggagctccgtcgctggggcgtggagagggccgccccggcccgcagttcccgccctgacactgggataacttcccccgcggctgcccagcgccgccctgaccagaccctctgtaccccgacttctgtccggccagaagccacagccgcacgcagcgcctcgccccgtgacgtcactcggggcgggacttccggccgccgaagtttaacagtccaggcgggagccggaagcccagcgcggagccggccgcggcccctgttgtgttgctgcggagaggtacttggatgcattttacaggttagcctcacttgagctgttgtcctgcaagtaaagtgtatttttggtgattgaaagttggagaactttcatttcagctgagtggtgtagttgaattggttcctgtagccgctgtccctaaacccaggccgacgttaccgccttgtgtcctgactgctagctttcgacgggaccgtctttgagggactcatgtaaagtctctcccttaatgctcagttcttagaagaccgaggcgcagtcatgcaggaaaacctcagatttgcttcatcaggagatgatattaaaatatgggatgcttcatctatgacattggtggataaattcaacccacacacatcaccacatggaatcagctcaatatgttggagcagcaataataactttttagtaacagcatcttccagtggcgacaaaatagttgtctcaagttgcaaatgtaaacctgttccacttttagagcttgctgaagggcaaaagcagacatgtgtcaatttaaattctacatctatgtatttggtaagcggaggcctaaataacactgttaatatttgggatttaaaatcaaaaagagttcatcgatctcttaaggatcataaagatcaagtaacttgtgtaacatacaattggaatgattgctacattgcttctggatctcttagtggtgaaattattttacacagtgtaaccactaatttatctagtactccttttggccatggtagtaaccagtctgttcggcacttgaagtactccttgtttaagaaatcactactgggcagtgtttcggataatggaatagtaactctctgggatgtcaatagtcagagtccataccataactttgacagtgtacacaaagctccagcgtcaggcatctgtttttctcctgtcaatgaattgctctttgtaaccataggcttggataaaagaatcatcctctatgacacttcaagtaagaaagaagcacctgccacgtccattgccacagttctaccacaacctatgacatcagctatggggaaaggaacagttgctgttcaagaaaaagcaggtttgcctcgaagcataaacacagacactttatctaaggaaacagacagtggaaaaaatcaggatttctccagctttgatgatactgggaaaagtagtttaggtgacatgttctcacctatcagagatgcaaagttggtcacatctggtgctgaaagtggaaatctaaatacctctccatcatctaaccaaacaagaaattctgagaaatttgaaaagccagagaatgaaattgaagcccagttgatatgtgaacccccaatcaatggatcctcaactccaaatccaaagatagcatcttctgtcactgctggagttgccagttcactctcagaaaaaatagccgacagcattggaaataaccggcaaaatgcaccattgacttccattcaaattcgttttattcagaacatgatacaggaaacgttggatgactttagcagacccagggatctgagtgctggagcaactctgaaatcgctgtgcatttctgccctgctgccagctttcggggtggctggagcttgtttttcactatctaacctgttcctggctttctgtgcctcaggagaagtgtgtctgtcccactttcagccctgcagagctgctgcagcacgtttggtgaagacgtacagtcagtgcctcttggttttgctgccctgtgctgcatgtctgcacctaggagtggcctcctctcttcaagaccttggctcttacagccttggctaccttggtaggcccaaactcttaatactcccccacccagcgagactatctcaacctccaggccactgcttcagctcggtttcttctccacactgtggaatcagcacatactctagaaggaaaaacagagaaaaagatatgaaaaagcatttcaaggaagaggaatggtatatgaacacaggaaagatattcaacttcacaattaatcagagaactaaaaatgcaatgagataccgtgtcacaccgagtaaatgggaaaatataaaaaatctggtaatactaagtcttgatgatatagagcaagaagaactctgttatactggtgacatccattgataactacctttggaaaacaatttgcatgattttgtaaaagtatacacttgagttacagttggttatatcatcaatggacattggcacatgtgggtttggagataatacatgattgtttataacaacgttggaatagtaaaaacttgaaaacagtcaaaatattaacaggaaaatagatacaccagtacaaactaatgatatacagatatataaaacatgaatcttcaaaacaatattgaattatttcttaaatataagctatatggtacccttttttgtaatgctcaaaaacatgcacaatgaaaacattgactacagattatatgttatacaaatgtattaaaaaagcaaaagcatttctttgtccaacaaaattcaggagagtaatgacttctttcttgggctttttcccaagagttaagtgatagaatcagacaggaacacacaggaagcttctattatttggtaatgttctagttcataagttgtgtggtgggtgactgagtgtttcttttgttattatacttaataatttttacatattcttttgtaggcatgaattaattgtattttattgagtaagccatgctatatccacccaaattgccactttatactgaaagtacattttttcaatagctaaactgataataataaaatgatctttctaacctagtgaattttctgtatttcattgtaagataagtttgtgtcttaatgacaatttctatataaaggaatatagtatcggagagttcaggggttaaacagcctgggtttacatcctagctccatcatttactggttgtgtgactttgaacaagttatatctactctggttaagttatttcttttgtaaaatggacctgtaataattgcatctacttgtgaagatattttaaacgagttcttacatttaaagtaaaggaaacagtgcctagcacatagtgaataaatgctcagtgcattggtatttttattattatagtaattattaacattcagtaatttggcaaatgaaaaagttt

SEQ ID NO: 460499 - DNA, 3491 bp, Homo sapiens
caaacaacaggacacagcgaaggtaaaacggatgtctaggggagtggctaaaccatcactgtacactcaagagtctagcacagtgcctggcacacagtaaacagcaagtgaatgacaagcagttggcagtggccggagctccgtcgctggggcgtggagagggccgccccggcccgcagttcccgccctgacactgggataacttcccccgcggctgcccagcgccgccctgaccagaccctctgtaccccgacttctgtccggccagaagccacagccgcacgcagcgcctcgccccgtgacgtcactcggggcgggacttccggccgccgaagtttaacagtccaggcgggagccggaagcccagcgcggagccggccgcggcccctgttgtgttgctgcggagagttggagaactttcatttcagctgagtggtgtagttgaattggttcctgtagccgctgtccctaaacccaggccgacgttaccgccttgtgtcctgactgctagctttcgacgggaccgtctttgagggactcatgtaaagtctctcccttaatgctcagttcttagaagaccgaggcgcagtcatgcaggaaaacctcagatttgcttcatcaggagatgatattaaaatatgggatgcttcatctatgacattggtggataaattcaacccacacacatcaccacatggaatcagctcaatatgttggagcagcaataataactttttagtaacagcatcttccagtggcgacaaaatagttgtctcaagttgcaaatgtaaacctgttccacttttagagcttgctgaagggcaaaagcagacatgtgtcaatttaaattctacatctatgtatttggtaagcggaggcctaaataacactgttaatatttgggatttaaaatcaaaaagagttcatcgatctcttaaggatcataaagatcaagtaacttgtgtaacatacaattggaatgattgctacattgcttctggatctcttagtggtgaaattattttacacagtgtaaccactaatttatctagtactccttttggccatggtagtaaccagtctgttcggcacttgaagtactccttgtttaagaaatcactactgggcagtgtttcggataatggaatagtaactctctgggatgtcaatagtcagagtccataccataactttgacagtgtacacaaagctccagcgtcaggcatctgtttttctcctgtcaatgaattgctctttgtaaccataggcttggataaaagaatcatcctctatgacacttcaagtaagaaagaagcacctgccacgtccattgccacagttctaccacaacctatgacatcagctatggggaaaggaacagttgctgttcaagaaaaagcaggtttgcctcgaagcataaacacagacactttatctaaggaaacagacagtggaaaaaatcaggatttctccagctttgatgatactgggaaaagtagtttaggtgacatgttctcacctatcagagatgcaaagttggtcacatctggtgctgaaagtggaaatctaaatacctctccatcatctaaccaaacaagaaattctgagaaatttgaaaagccagagaatgaaattgaagcccagttgatatgtgaacccccaatcaatggatcctcaactccaaatccaaagatagcatcttctgtcactgctggagttgccagttcactctcagaaaaaatagccgacagcattggaaataaccggcaaaatgcaccattgacttccattcaaattcgttttattcagaacatgatacaggaaacgttggatgactttagcagacccagggatctgagtgctggagcaactctgaaatcgctgtgcatttctgccctgctgccagctttcggggtggctggagcttgtttttcactatctaacctgttcctggctttctgtgcctcaggagaagtgtgtctgtcccactttcagccctgcagagctgctgcagcacgtttggtgaagacgtacagtcagtgcctcttggttttgctgccctgtgctgcatgtctgcacctaggagtggcctcctctcttcaagaccttggctcttacagccttggctaccttggtaggcccaaactcttaatactcccccacccagcgagactatctcaacctccaggccactgcttcagctcggtttcttctccacactgtggaatcagcacatactctagaaggaaaaacagagaaaaagatatgaaaaagcatttcaaggaagaggaatggtatatgaacacaggaaagatattcaacttcacaattaatcagagaactaaaaatgcaatgagataccgtgtcacaccgagtaaatgggaaaatataaaaaatctggtaatactaagtcttgatgatatagagcaagaagaactctgttatactggtgacatccattgataactacctttggaaaacaatttgcatgattttgtaaaagtatacacttgagttacagttggttatatcatcaatggacattggcacatgtgggtttggagataatacatgattgtttataacaacgttggaatagtaaaaacttgaaaacagtcaaaatattaacaggaaaatagatacaccagtacaaactaatgatatacagatatataaaacatgaatcttcaaaacaatattgaattatttcttaaatataagctatatggtacccttttttgtaatgctcaaaaacatgcacaatgaaaacattgactacagattatatgttatacaaatgtattaaaaaagcaaaagcatttctttgtccaacaaaattcaggagagtaatgacttctttcttgggctttttcccaagagttaagtgatagaatcagacaggaacacacaggaagcttctattatttggtaatgttctagttcataagttgtgtggtgggtgactgagtgtttcttttgttattatacttaataatttttacatattcttttgtaggcatgaattaattgtattttattgagtaagccatgctatatccacccaaattgccactttatactgaaagtacattttttcaatagctaaactgataataataaaatgatctttctaacctagtgaattttctgtatttcattgtaagataagtttgtgtcttaatgacaatttctatataaaggaatatagtatcggagagttcaggggttaaacagcctgggtttacatcctagctccatcatttactggttgtgtgactttgaacaagttatatctactctggttaagttatttcttttgtaaaatggacctgtaataattgcatctacttgtgaagatattttaaacgagttcttacatttaaagtaaaggaaacagtgcctagcacatagtgaataaatgctcagtgcattggtatttttattattatagtaattattaacattcagtaatttggcaaatgaaaaagttt

SEQ ID NO: 460500 - DNA, 2897 bp, Homo sapiens
ttgaaagctactctgtaagctatactcattgcttgtcttcttagtgtgttagcttttataatcgcaattcttataatagtctagtgctatagatgttcatggattgtttgatgctccataactcctcatttagataactttttagtaacagcatcttccagtggcgacaaaatagttgtctcaagttgcaaatgtaaacctgttccacttttagagcttgctgaagggcaaaagcagacatgtgtcaatttaaattctacatctatgtatttggtaagcggaggcctaaataacactgttaatatttgggatttaaaatcaaaaagagttcatcgatctcttaaggatcataaagatcaagtaacttgtgtaacatacaattggaatgattgctacattgcttctggatctcttagtggtgaaattattttacacagtgtaaccactaatttatctagtactccttttggccatggtagtaaccagtctgttcggcacttgaagtactccttgtttaagaaatcactactgggcagtgtttcggataatggaatagtaactctctgggatgtcaatagtcagagtccataccataactttgacagtgtacacaaagctccagcgtcaggcatctgtttttctcctgtcaatgaattgctctttgtaaccataggcttggataaaagaatcatcctctatgacacttcaagtaagaaagaagcacctgccacgtccattgccacagttctaccacaacctatgacatcagctatggggaaaggaacagttgctgttcaagaaaaagcaggtttgcctcgaagcataaacacagacactttatctaaggaaacagacagtggaaaaaatcaggatttctccagctttgatgatactgggaaaagtagtttaggtgacatgttctcacctatcagagatgcaaagttggtcacatctggtgctgaaagtggaaatctaaatacctctccatcatctaaccaaacaagaaattctgagaaatttgaaaagccagagaatgaaattgaagcccagttgatatgtgaacccccaatcaatggatcctcaactccaaatccaaagatagcatcttctgtcactgctggagttgccagttcactctcagaaaaaatagccgacagcattggaaataaccggcaaaatgcaccattgacttccattcaaattcgttttattcagaacatgatacaggaaacgttggatgactttagcagacccagggatctgagtgctggagcaactctgaaatcgctgtgcatttctgccctgctgccagctttcggggtggctggagcttgtttttcactatctaacctgttcctggctttctgtgcctcaggagaagtgtgtctgtcccactttcagccctgcagagctgctgcagcacgtttggtgaagacgtacagtcagtgcctcttggttttgctgccctgtgctgcatgtctgcacctaggagtggcctcctctcttcaagaccttggctcttacagccttggctaccttggtaggcccaaactcttaatactcccccacccagcgagactatctcaacctccaggccactgcttcagctcggtttcttctccacactgtggaatcagcacatactctagaaggaaaaacagagaaaaagatatgaaaaagcatttcaaggaagaggaatggtatatgaacacaggaaagatattcaacttcacaattaatcagagaactaaaaatgcaatgagataccgtgtcacaccgagtaaatgggaaaatataaaaaatctggtaatactaagtcttgatgatatagagcaagaagaactctgttatactggtgacatccattgataactacctttggaaaacaatttgcatgattttgtaaaagtatacacttgagttacagttggttatatcatcaatggacattggcacatgtgggtttggagataatacatgattgtttataacaacgttggaatagtaaaaacttgaaaacagtcaaaatattaacaggaaaatagatacaccagtacaaactaatgatatacagatatataaaacatgaatcttcaaaacaatattgaattatttcttaaatataagctatatggtacccttttttgtaatgctcaaaaacatgcacaatgaaaacattgactacagattatatgttatacaaatgtattaaaaaagcaaaagcatttctttgtccaacaaaattcaggagagtaatgacttctttcttgggctttttcccaagagttaagtgatagaatcagacaggaacacacaggaagcttctattatttggtaatgttctagttcataagttgtgtggtgggtgactgagtgtttcttttgttattatacttaataatttttacatattcttttgtaggcatgaattaattgtattttattgagtaagccatgctatatccacccaaattgccactttatactgaaagtacattttttcaatagctaaactgataataataaaatgatctttctaacctagtgaattttctgtatttcattgtaagataagtttgtgtcttaatgacaatttctatataaaggaatatagtatcggagagttcaggggttaaacagcctgggtttacatcctagctccatcatttactggttgtgtgactttgaacaagttatatctactctggttaagttatttcttttgtaaaatggacctgtaataattgcatctacttgtgaagatattttaaacgagttcttacatttaaagtaaaggaaacagtgcctagcacatagtgaataaatgctcagtgcattggtatttttattattatagtaattattaacattcagtaatttggcaaatgaaaaagttt

SEQ ID NO: 460501 - DNA, 1441 bp, Homo sapiens
ggcggccgggcagaggccaagtgggcaccggatagcgccagccccgcccagagagcgaaatcatggagccttccaagaccttcatgagaaacctgccaatcacaccaggctatagcggctttgtgccattcctcagctgccaaggaatgtccaaggaggatgacatgaaccactgtgtgaaaaccttccaggagaaaacacagcgctataaagaacagctgcgggaattgtgctgcgcagtggccactgccccgaaactgaaacctgtcaactccgaggagacggtcctgcaggccctgcaccagtacaatctgcagtaccaccccctgatcctggaatgcaaatatgtaaagaaacctctccaggagcccccgatccctggctgggcaggctacctgccgagagccaaggtcactgaatttggctgtggcacgagatacactgtcatggccaaaaactgctacaaggacttcctggagatcacggagagggccaagaaggcacatctgaaaccatatgaagagtgaggagaaatgtctctttccttcctactaccgttttaaaaaggggatgaaatgtttgcagtggcctttctgcttagctgggccagctccctgcaactcacacggacggttcctctcctagatggaagctgccctgcccttggaaggcccctgagagaggaccccaaaactccgctgacatgtggctgtgctcagaggccaagtataccatgcagtgggaagatgtatctagagccactgtcctccgcaaagtatgcagaaggctagaagcgcagagtctcccaaggaggtgaactttaagtggggcttccaaaacctgccattctcatgttggaatcacgcccagtgagcaataaagaaatttagtaacaagaaatttttaactgccgcctgcatcctgagtggttgacggttgcatgtcattaatgataaagaccgttttttgtcatgtgggaataaagaggctgcttctccgcatgctaaagtttcttgtgcgggttttctccaggttatgttgaccatgagctagggttcctaacccccgagatggcctctggttccttaagcatattacctttccccaaacaatccaaagtttcccttggttccaggtctagagtgagcaacccaggcttttcataccctgcattaaagttaaaatctaatttagatgaaaatggatgcatagaaattaaacgtgcgtgcgtggctttcgtcgttaagttgtgggccccgtaacgagagctttaccaaatttattcccttggcttgaaaataaaaatgctttttgaaatttgattttgttgtgttacaaattgttttagctttgtgaatagtacaaaccccatttctgatctacctcaaacaaaaatagagcattaaagtgtttaagattcaatcaaaggcttgctgtgagc

SEQ ID NO: 460502 - DNA, 1001 bp, Homo sapiens
ggcggccgggcagaggccaagtgggcaccggatagcgccagccccgcccagagagcgaaatcatggagccttccaagaccttcatgagaaacctgccaatcacaccaggctatagcggctttgtgccattcctcagctgccaaggaatgtccaaggaggatgacatgaaccactgtgtgaaaaccttccaggagaaaacacagcgctataaagaacagctgcgggaattgtgctgcgcagtggccactgccccgaaactgaaacctgtcaactccgaggagacggtcctgcaggccctgcaccagtacaatctgcagtaccaccccctgatcctggaatgcaaatatgtaaagaaacctctccaggagcccccgatccctggctgggcaggctacctgccgagagccaaggtcactgaatttggctgtggcacgagatacactgtcatggccaaaaactgctacaaggacttcctggagatcacggagagggccaagaaggcacatctgaaaccatatgaagagtgagtctggcttgggtccgtaccccaggcacaaggtcaaagggagaagtgcaaacccaggatgggggtttaccagatgtccccatcccagcactaggactatttgtgtgtgatttgtcttagagaaggtgcctcatttgtagtttcagggcttccccagtaggcaggtgccctctgctcccaacctgtgctcagcattccccagcagctctacctgtggtctttgctggtttgcagggaggggatgggagtaaaaaccagcagggctaccatcctggcagtggcttaaggcccaagggtgctgagtggcctcagctttctcttctgcgaaatgaggagggtgatctttacctttagaataaattgtaaagaaataacataccatgttcatatatttactcatatttatgtattgtattttattctatttattattattctattcttaataaaaggtccataactttgtgacttctat

SEQ ID NO: 460503 - DNA, 1417 bp, Homo sapiens
ggcggccgggcagaggccaagtgggcaccggatagcgccagccccgcccagagagcgaaatcatggagccttccaagaccttcatgagaaacctgccaatcacaccaggctatagcggctttgtgccattcctcagctgccaaggaatgtccaaggaggatgacatgaaccactgtgtgaaaaccttccaggagaaaacacagcgctataaagaacagctgcgggaattgtgctgcgcagtggccactgccccgaaactgaaacctgtcaactccgaggagacggtcctgcaggccctgcaccagtacaatctgcagtaccaccccctgatcctggaatgcaaatatgtaaagaaacctctccaggagcccccgatccctggctgggcaggctacctgccgagagccaaggtcactgaatttggctgtggcacgagatacactgtcatggccaaaaactgctacaaggacttcctggagatcacggagagggccaagaaggcacatctgaaaccatatgaagaaatatatggagttagctccacaaaaacttctgctccgtctccaaaagttttgcagcatgaagagctgctgccaaaatatcccgatttttctattccagatggaagctgccctgcccttggaaggcccctgagagaggaccccaaaactccgctgacatgtggctgtgctcagaggccaagtataccatgcagtgggaagatgtatctagagccactgtcctccgcaaagtatgcagaaggctagaagcgcagagtctcccaaggaggtgaactttaagtggggcttccaaaacctgccattctcatgttggaatcacgcccagtgagcaataaagaaatttagtaacaagaaatttttaactgccgcctgcatcctgagtggttgacggttgcatgtcattaatgataaagaccgttttttgtcatgtgggaataaagaggctgcttctccgcatgctaaagtttcttgtgcgggttttctccaggttatgttgaccatgagctagggttcctaacccccgagatggcctctggttccttaagcatattacctttccccaaacaatccaaagtttcccttggttccaggtctagagtgagcaacccaggcttttcataccctgcattaaagttaaaatctaatttagatgaaaatggatgcatagaaattaaacgtgcgtgcgtggctttcgtcgttaagttgtgggccccgtaacgagagctttaccaaatttattcccttggcttgaaaataaaaatgctttttgaaatttgattttgttgtgttacaaattgttttagctttgtgaatagtacaaaccccatttctgatctacctcaaacaaaaatagagcattaaagtgtttaagattcaatcaaaggcttgctgtgagc

SEQ ID NO: 460504 - DNA, 1524 bp, Homo sapiens
ctctctggtttctcttcttataatcgtagcgagtgcacggagtgtgtgactgtgccctccgatggatggcatcctctctggggttggtttttgccttgtgttctcagctgctgggacacccatgcccctgaactggatggaattagcagtttctggtgacacagacgtcaacatgactaacaatgtccatgctctcagcaacacatttatcttcaactgcttgaatttaacagtaaaacaatcagaaaacatgagtaaaaatcaaaaggcaaaaaataaggaatgtaacttctcactgagagattatttggggatggagagggttgcctctccaaggggccaagcgaatgaagagggcacaccaagagcatcatttactggaaagggggctgctggagaaaagagcaccaatatctcacttgcctattggaagtctgcttatgcagtctctcaaactggggcctggctggcatcagagagagggaataatatgagctctgatttagaagggacattgattaacttaaccaaaatgaacttcaccagaaaaccaaaagatctctgcctcgcatacatcaatgtgtgggaaagggagtttcaagagaatgtctctgcaaatattgcctgcagaaataaatgagttatgtctgagccccaccaaattaataaactggtttcacaagtaatctttgaccagttactcaatatcactgagcttcaaaactgggttacctcatttaaaacactgaggtgctagtaccacacctttatacatttattatgtaatctctatgactgcatatcatatggctgatgttcttcagacacaatatatgattagagactggcagttctattatatggcactgcagaaagttagagcccttcatcaagtaaaaacctttaagaagtcaaagcaaggtcactaacactcaagggaaattgtgtttttcacaaaattgccttacaagtgagggagggaatgggaaaatatgtttttaaatcttttacttcttcacgttaaatcattctatttacacagttagataaagatataaatttagagtttttagatctttggggatgaaggttcatttgtggaatagccccttctctgtggcattgatatggcatgccaattttgtcatataatgaggttccacacaagcatggttctgtttctcagcattctgactgtttctgcacctatgccacactgaataaccaaagctcaagagttaagtcatctggtttaacagttctggaggctgggaagtgcaagaccaagatatgaacagattcattatctggtacagataccctgcatatttttggcctcatatgaagaaagaaatgtttttgaaagtttacgtgtgtgcatttatcatcataaatacatttaattcattgtaaagacatagcaagataatcagctgtctgataattataaggtgttgattagaaaataggtacttactttaaataaaattgttatattaaactatctggctttacctgcccttt

SEQ ID NO: 460505 - DNA, 523 bp, Homo sapiens
agccacaggtcagcctggggaaaaagcaggaagaaaaactggcaatacgagggcccaacccaaaagttattcctgaagagaaacaacggttcatttgtggaatagccccttctctgtggcattgatatggcatgccaattttgtcatataatgaggttccacacaagcatggttctgtttctcagcattctgactgtttctgcacctatgccacactgaataaccaaagctcaagagttaagtcatctggtttaacagttctggaggctgggaagtgcaagaccaagatatgaacagattcattatctggtacagataccctgcatatttttggcctcatatgaagaaagaaatgtttttgaaagtttacgtgtgtgcatttatcatcataaatacatttaattcattgtaaagacatagcaagataatcagctgtctgataattataaggtgttgattagaaaataggtacttactttaaataaaattgttatattaaactatctggctttacctgcccttt

SEQ ID NO: 460506 - DNA, 422 bp, Homo sapiens
aaaattcttaaagtacttgaaaatccaagactattttcattttgtaactattttcaaatgtatttaacatttaggttcaaagccaggagcagtggcaaagcacctgttgtcccagctacttgagaggctggagctggaagatcacttaaggccaagagttcaagaccagcccggatgacatagagagattcccatcttttttaaaaaagtacagataccctgcatatttttggcctcatatgaagaaagaaatgtttttgaaagtttacgtgtgtgcatttatcatcataaatacatttaattcattgtaaagacatagcaagataatcagctgtctgataattataaggtgttgattagaaaataggtacttactttaaataaaattgttatattaaactatctggctttacctgcccttt

SEQ ID NO: 460507 - DNA, 1091 bp, Homo sapiens
acagcagccacttgggcacacatgaatccctgggagctttggatagccaggcttcccagcaaaacagtgatgatctgcaggccccacttccgtgacacttcacaggacccgctgacttggaactccagtaagccactggtagcagcattgcacctctctgagggagctcccagagtaaggggtggctgccatcttagctgtttctcagttttagctatcgttgccttcggtgctctagggagtccgaggagaccagggaatgaagcgctccccagcacagtgcagcagttctacagagaagcagccagactgatttttcgtgcaagtcctttatgctgtttctctttactgggcagaatctccaaaccgaggacgacaaccacccccatagatgtgttcaggcaagcaaataggattacatatgcatatgattagttgttcattcatttattaatttattcactcaatcacctgtataccaaatatgtattaagtatctgttatgtgccaggaacctgttccaggttcagagaatacagtgaataaacagactgaaccctgctctcaatgaacatcttcatgttacttgatatgagttcattccttgaactagaacatcaataagatgctggagtttaatcaaccacagcagactgtgaggtggaagccacttggtgattgtgagccagcaccaagatcgaaggcatttggatccctggtgatcacagacccagcatgtcatctctgcaaaggtctttgagcaggagcccaaggaaggaaaaataaggacacacatttttggctggattagtaacatctttcctttgtcttcatccaccagtgttcttgcttcccagaaagtgtggaatattggccttccttttcagattcatgtgaaagcttggagaaaagaacacagactaaaaggaatataaatccaaaagaatgagtgaaatgggaatacacaaggcatgagcaataagactgttctctcagaaacaatgagaataactgctctacatcttacaaaccagaaacttacacgttgtatctcattaaattttattttgaatattgagaacattcagtgc

SEQ ID NO: 460508 - DNA, 776 bp, Homo sapiens
agcggcggtttgcttcttgatccccgacatgctggctggctgcggcggagcccgggtcccgggagcagagaccgaaggacgcagggacggcggcggcggcggcggcagcagcagcagcagcagcagcagcagcggctgccggactcccgggaaggagatgctcgtgtcaaagagaagagctacaagactgtttctgcccccaaggtgctccagtccattggagaagcaaacacataactgagaatgactcaccttgtgatggctgctatgatgaggttcatacctggtgctacaggacacagagaggcataataatgtggtcacactaatgcaagaagtagattcccatggtcttgggcactctgcccctgtggctttgcagggtacagcctcccttctgtctgatttcacaggccggcattgaatgtctgtgacttttccaggtggagtcttgctctgtcacccaggttggagtgcagtggcacgatcttggctcactgcaacctccacctccttggttcaagtgattctactgcctcagcctcccaagtagctgggattacaggcatgcaccaccaggcctggctaatttttgtatttttagtagagatggggtttcaccatgttggccaggctgctcttgaactcctgacctcaggtgatctgcctgcctctgcctcccaaagtattgggattacaggcgtgagccactgtggccaggccgaactacctttttcatattacataagatacagtcttagatctgactgttcatt

SEQ ID NO: 460509 - DNA, 993 bp, Homo sapiens
ctaagtcaagacaataaagctaatgcacatagcacttaatactcttctgagtaccttacatatattaactaatttaaccttcataacaactatgaagcagatggctggtaaagtattgttgctgggtgtgtctgtgagggtgttatcagcagagattgacagtcgagttggtggactggaagaggaagacccaccctcaatgcccaccagaggcaatttgcctcttactcctgtccataaggcctaccagaggcaatttgccttcagccagcaaggccagcaatgtcttgctcacagagattttgatcacttttcccttccacaagatatcacactagttcattgcatcagtgacactatgctaattggacccaatgctcgtgtcaaagagaagagctacaagactgtttctgcccccaaggtgctccagtccattggagaagcaaacacataactgagaatgactcaccttgtgatggctgctatgatgaggttcatacctggtgctacaggacacagagaggcataataatgtggtcacactaatgcaagaagtagattcccatggtcttgggcactctgcccctgtggctttgcagggtacagcctcccttctgtctgatttcacaggccggcattgaatgtctgtgacttttccaggtggagtcttgctctgtcacccaggttggagtgcagtggcacgatcttggctcactgcaacctccacctccttggttcaagtgattctactgcctcagcctcccaagtagctgggattacaggcatgcaccaccaggcctggctaatttttgtatttttagtagagatggggtttcaccatgttggccaggctgctcttgaactcctgacctcaggtgatctgcctgcctctgcctcccaaagtattgggattacaggcgtgagccactgtggccaggccgaactacctttttcatattacataagatacagtcttagatctgactgttcatt

SEQ ID NO: 460510 - DNA, 709 bp, Homo sapiens
cctgtgtaggacactcaccatgaatgcagctttcaggactggaagttgctctggctggaactctctggagccccaaagcagggtccctgacagaaactgcatctccaggggacctaaccactgttagaacttggggccacgggggctggctgctcgacaggactcctccactccgtttgtgtttccttttctttcttgcagaagagccgtcctctggcagatatgtgaaagaactgcctatgaggagcgagaggctacttcgcacacctcgcagctcaggactccaccaggcacttggtaattctgccttatccttcactttttgcttgagcagcgccgaaaggagggaaatttggacatggacacatagggaagacagccatgtggagacagaggcagaggtggacctgctgccgcaaaaccacagggcgccaagtactgtgggccactgagaaaactaaaggagaggaaggattcttccctggagctttggagagggtaatgaactgtaacctcactggacgtgtaaacagactgtgacctacctactcttgtgccaatcatggagtttcagccaatcacaggcggccggctgttcaaaccatgtttaaataaggcaaacgcagagctgtaagcaatctaggtgtttctgcacctctcgtccattttctgtaagtcctttttctgttcataaatcttcttccatcac

SEQ ID NO: 460511 - DNA, 1233 bp, Homo sapiens
gacattacaacaaaatttaagtgattttcttaaaaattagttgtaatatgggatatgaaaccatacgaatgaatattttatacactttgaactgcgttggctatctttactttttaaaatttgtgtacacttatggatactttttaaaatttgtatacatttatgagtacaagtataattttgttatatattgcatagtgatgaagtcaaggcatttggtgtacacatcactgaatgaagagcaagcgaaagcaagatcctggaagatactggcaagtggccggatcacagaatccaggttagaaaggggggaaaaaaaggtcaagagaggtctgacaaatcaggagaaaatgaatggaataacgaaatggaagaatctttctaaagaacataatctcaaattccctgctgctcactttttgtaaaaattaagaaatattcaccaaaaaaaaaaaagtcaggagaatatgaagccactcattttacttctagaagtttttcttacagaaaatcaatcaaggagagagaattgtgtattaatttaattgtttggcctttagaatcatgttccttagagggcatcggtgcgacggcttcaccattctgcacatccacctgagttttaaaacacggtttctactaaacatctggtatcttgtatacaggggatgaatgtggtcttgtttccttctttagctgctggaaaccttagagcaaaaaataaggccacttttgtaactgtgtctgactcagcagcataacttttccgttgtcttccatgtgctatcctgtttttatttttcctttcccttgattgctctctatacatacatttttgagaagttgtttttctttatttttcaaactaattcattcaatactctcctccaggtagagtttataattgtttgtagttgagaaaattggactagaatgaagccttgtggaatccaagaagaattcgttattctttagctgctttcatctccaactgtgttaggcatcctcctaagatggtccccaagatggcagacccctggaatcatctgtacaatttcctctcttttcacaggcttttatgagttgatttttcagcgaaccttcaaggggctaaggggaacattacccttggccactatactgccaacaacctatgagcctggaagaggatcccaagtctcagatgaaaccaggacctcagccaacaccttgatttcagcctcatgagatcct

SEQ ID NO: 460512 - DNA, 1366 bp, Homo sapiens
gacattacaacaaaatttaagtgattttcttaaaaattagttgtaatatgggatatgaaaccatacgaatgaatattttatacactttgaactgcgttggctatctttactttttaaaatttgtgtacacttatggatactttttaaaatttgtatacatttatgagtacaagtataattttgttatatattgcatagtgatgaagtcaaggcatttggtgtacacatcactgaatgaagagcaagcgaaagcaagatcctggaagatactggcaagtggccggatcacagaatccaggttagaaaggggggaaaaaaaggtcaagagaggtctgacaaatcaggagaaaatgaatggaataacgaaatggaagaatctttctaaagaacataatctcaaattccctgctgctcactttttgtaaaaattaagaaatattcaccaaaaaaaaaaaagtcaggagaatatgaagccactcattttacttctagaagtttttcttacagaaaatcaatcaaggagagagaattgtgtattaatttaattgtttggcctttagaatcatgttccttagagggcatcggtgcgacggcttcaccattctgcacatccacctgagttttaaaacacggtttctactaaacatctggtatcttgtatacaggggatgaatgtggtcttgtttccttctttagctgctggaaaccttagagcaaaaaataaggccacttttgtaactgtgtctgactcagcagcataacttttccgttgtcttccatgtgctatcctgtttttatttttcctttcccttgattgctctctatacatacatttttgagaagttgtttttctttatttttcaaactaattcattcaatactctcctccaggtagagtttataattgtttgtagttgagaaaattggactagaatgaagccttgtggaatccaagaagaattcgttattctttagctgctttcatctccaactgtgttaggcatcctcctaagatggtccccaagatggcagacccctggaatcatctgtacaatttcctctcttttcacaggtaagggattttataaacataataagatttctttcctgtaattgggttacattgaataacaaaggtgaagggattacacagatgtaatgaaggtccctactcacttggctctgagttaatcaaaagggagattatcctaagtgggcctgacctaatcaggtgagctcttgataagagggtgctggccttccctgagagattcaaagcagcacaaatgctctcctgttggatttgtagaaacataatgctatgctgtgaaaagggccacttagggctgcagtcctccagctataa

SEQ ID NO: 460513 - DNA, 1177 bp, Homo sapiens
ggagattcccatggatggtatgaacaccagggaaataaactggatccagatgaccaacatcaggaaactacataatgggaagcccctgcaggctccctcaaagaagcctcattatagatctagcttttggatactgtcacacagaggttatcaaaatccagttaatgaggactgcatccttacccagtcaagtaagaaaataatcgcccttttctctgtacttgggatagagaaaaaaaggctttccatcatccctcctctgtctttggtggttaaggttctattacctgaaaaattgtgtagccaaagcgccaataaccagcttgtaaaaggagataatgacttgaaacagagcagtaacagaggtggtggtgagaagcagtcagcttctgaatgtagaataaagagccattaaatccatttagcttatcattgactgaagtactgtttttataattatttgtgatatatactttcatagtaaaatgtttgaaaatatagacttagttattaccaggaacagatgaccagttgcaagaactgtcactattttaacattctccatcagctgtggccatgttggatttctggcacctgagcattcacatccatctgtttatagggcattatgcccactcatgaggtttattccagtttcaaaaagtcatgtgtaaaccaagattggaaatatatattccttgagaaatagagacacagacacacaagggagagtgccatatgaaaatggaggcagaatggagtgatgcatctacaagccaaggaacaccaaaaattgccagcaactactagaagctagaagaggcaagaaaggactttctagagcctttggaaagcatgattctgccacatcttgattttggacttccagcctctagaactgtgagagagtaagtttccattgttttaaaccacccaatttgtattaatttgttatagaagccctgggaaacaaataaactactttagatcagttaggaaggcttcttgaactatatgacatttaaacagagacataaatgatgagactgtcccagccaagttaaaaatatcactgggaatcaaactcactggtgttattccagctcagtggtaaatgttctactggtattttaaataattctaaaataaagtcattatttttctttgcactccaaag

SEQ ID NO: 460514 - DNA, 3325 bp, Homo sapiens
  misc_feature (2)..(2): n is a, c, g, or t
  misc_feature (6)..(6): n is a, c, g, or t
  misc_feature (9)..(9): n is a, c, g, or t
  misc_feature (11)..(11): n is a, c, g, or t
  misc_feature (13)..(15): n is a, c, g, or t
  misc_feature (482)..(482): n is a, c, g, or t
  misc_feature (485)..(485): n is a, c, g, or t
  misc_feature (490)..(491): n is a, c, g, or t
antggnaancntnnngaaagaagccattttgggatgtctggatttcagctgcttgcagatgggggagttggtggagaatgggttggagagattaggagttgttgggtggaatcacccacaggagagacactgctgtgcaagccacaccaatattttcaccaaattgagcttctggatgccaagatcccttgggctccagaggtggtgatgctgctgtgggctgccactctaggcaaggagtacatcccaccatcagaggaagaagaagatggaaagaagaagtttgacaaagagagtgaaaaatattactctatccttgaaaagcatttaaatttgtccgcaaagaaaaaggagtctcatttacaagaggcagatacacaaattgaccgagaacatcagaacttctatgaagcatcattagaatatgtctttaaaattcaagaggtccaagaaaaaaagaagtttgaatttgttgaaccgangtntcaannaggtatcaccattttaggactctaccgaataggaggagtgaactccaaagttcaaaaactcatgaataccacattttctcctaaatcccctcctgatattgatattgatattgaactgtgggacaataagacgataacaagtgggctgaaaaactacctcaggtgccttgcagaaccactgatgacttacaagttgcacaaagattttatcattgctgttagtgactcctatagcagcagcccagacagcacacctatggggagcattgagtcactctcttctcattcctctgaacaaaatagcactacaaagtcagcttcctgccagcccagggagaaatctggagggattccttggattgcaaccccatcatcttccaatggacagaaaagccttggtctgtggacaactagtcctgaatcaagttccagagaagatgcaaccaagacagatgcagaatcagactgccagagtgttgcttcagtcactagcccaggagacgtttccccacccatagacctagtcaagaaagagccttatgggctttcaggactgaaaagagcttctgcttcttctctcagatccatctctgcagctgaaggaaacaagagctacagtggatctattcaaagcttaacttctgtaggttccaaggagacacccaaagcttcaccaaacccagacctgcctccgaaaatgtgcaggagattaagactagacactgcctcaagcaatggctatcagcggcctggctcagtagtggcagcaaaagctcaactgtttgaaaatgttggttcacctaaaccagtttcttctgggcgccaagccaaagccatgtactcctgtaaagcagagcacagtcatgagctttccttcccacaaggagcaatattttctaatgtgtacccatcagtggaaccaggatggttaaaggcaacttatgaaggcaaaacaggactagttccagaaaattatgttgtcttcctctaatactatttagtggatggcagtatcttcatggtatccatggtaacgaataaatgctatgattttatctgacacagatacacggggatcagcccactaagtgaaaacagtcaatttctatcaagttcttcaccagcagactatgtagctccttattaatggaaaaaaagatttaaattgttggccattcttttttggttggtttcttattttaaaatatcttacttgtgaaaaatgtgtttttggataatatgtaactctccacaatgtcgcttccgtagcaattgtagagtttcaaatactgtgttaaatactgtatcccagaaatttggaaaccagaaatctgctatatggattttgagatctgtcctttactgcctggcattctctgaggatctctgaaattgttacttaaaaatgtaatttaaattgttcatttattgttttttttttcttagaaatatactgcttttatatatgattgttttgctggtcctaaacatttcaaggatgtaagtctttgttttaatataactttatttgttttccaagtagatgataatattcaaaagcaataatgtatatgatatctataaaggaagcaaaattaagtcatacactgattccactgtaaacaatctgtccagaattccagacaccttcagcaaactttttctgtaaaggcctgatagcaaatatttttgtggtgggttgaatttggcttatgggttatagtttgctgacacctagtttagagggtgtgtaaaactatcttcataactttgagatttttataaaattttacatgaaaatatactgataaattatatgcacatattttctaccagtagcattatagtggcatcatagaagaatatttaccaatgatggggaaactgtaaaactacagtatcaaggcatacaacttaaattccacttggaagattgtaaagtgtcaaagtattttaatgataatttaatttgggcttttgaaatgttcttctacaaatgaaaaagatgtttaaaaacgttacaagggaagctatgccttctgaagtctatccttagttgaaacagaaaataaacacaaaggtacaagatccttaaattattttgaaccacagaggttgaaattgttttgtgatcttcagcagaaataaaatctgtacatgattttcttttatgccttttagtttacagtctttattagcaatttcagtgaatttgtagagcatagtaataggtatttactgtccacttatatatatcagcatctggtcatgcacgaaccattaattctatatttctatttcaataattctaatatattatttctataaatgtaatatctgtatgtggcaaagagcctttcttctcaagatcctgaaaagctggttacctgccctttgagtgccacagtcctgaactgcttgttcttgacatcttgcatattacttcagagttccccactgtgcagactctcaggtattaactgtaaaaaactctttacatgccattattatctgtaatctctatctcttctactttaaattaatgtttctagaattaataggttaaatacacatacacacacacaactatgcctcagaaaagttaggcttttacaaataaaaagaataagattagaattaacaagtagagagaataacggtaggcagagtcagaatcaggaataaatatcagtgaatcaaaagaatgaaaaatattatgtaataaaaattagcaatgtaatgtaaacgtttgataaaagagtatctttttcttttatctcttactgttgacctctgtgcactgtaataaggtgtgttgctggatcttcttggtc

SEQ ID NO: 460515 - DNA, 3271 bp, Homo sapiens
  misc_feature (2)..(2): n is a, c, g, or t
  misc_feature (6)..(6): n is a, c, g, or t
  misc_feature (9)..(9): n is a, c, g, or t
  misc_feature (11)..(11): n is a, c, g, or t
  misc_feature (13)..(15): n is a, c, g, or t
  misc_feature (482)..(482): n is a, c, g, or t
  misc_feature (485)..(485): n is a, c, g, or t
  misc_feature (490)..(491): n is a, c, g, or t
antggnaancntnnngaaagaagccattttgggatgtctggatttcagctgcttgcagatgggggagttggtggagaatgggttggagagattaggagttgttgggtggaatcacccacaggagagacactgctgtgcaagccacaccaatattttcaccaaattgagcttctggatgccaagatcccttgggctccagaggtggtgatgctgctgtgggctgccactctaggcaaggagtacatcccaccatcagaggaagaagaagatggaaagaagaagtttgacaaagagagtgaaaaatattactctatccttgaaaagcatttaaatttgtccgcaaagaaaaaggagtctcatttacaagaggcagatacacaaattgaccgagaacatcagaacttctatgaagcatcattagaatatgtctttaaaattcaagaggtccaagaaaaaaagaagtttgaatttgttgaaccgangtntcaannaggtatcaccattttaggactctaccgaataggaggagtgaactccaaagttcaaaaactcatgaataccacattttctcctaaatcccctcctgatattgatattgatattgaactgtgggacaataagacgataacaagtgggctgaaaaactacctcaggtgccttgcagaaccactgatgacttacaagttgcacaaagattttatcattgctgttagtgactcctatagcagcagcccagacagcacacctatggggagcattgagtcactctcttctcattcctctgaacaaaatagcactacaaagtcagcttcctgccagcccagggagaaatctggagggattccttggattgcaaccccatcatcttccaatggacagaaaagccttggtctgtggacaactagtcctgaatcaagttccagagaagatgcaaccaagacagatgcagaatcagactgccagagtgttgcttcagtcactagcccaggagacgtttccccacccatagacctagtcaagaaagagccttatgggctttcaggactgaaaagagcttctgcttcttctctcagatccatctctgcagctgaaggaaacaagagctacagtggatctattcaaagcttaacttctgtaggttccaaggagacacccaaagcttcaccaaacccagacctgcctccgaaaatgtgcaggagattaagactagacactgcctcaagcaatggctatcagcggcctggctcagtagtggcagcaaaagctcaactgtttgaaaatgttggttcacctaaaccagtttcttctgggcgccaagccaaagccatgtactcctgtaaagcagagcacagtcatgagctttccttcccacaaggagcaatattttctaatgtgtacccatcagtggaaccaggatggttaaaggcaacttatgaaggcaaaacaggactagttccagaaaattatgttgtcttcctctaatactatttagtggatggcagtatcttcatggtatccatggtaacgaataaatgctatgattttatctgacacagatacacggggatcagcccactaagtgaaaacagtcaatttctatcaagttcttcaccagcagactatgtagctccttattaatggaaaaaaagatttaaattgttggccattcttttttggttggtttcttattttaaaatatcttacttgtgaaaaatgtgtttttggataatatgtaactctccacaatgtcgcttccgtagcaattgtagagtttcaaatactgtgttaaatactgtatcccagaaatttggaaaccagaaatctgctatatggattttgagatctgtcctttactgcctggcattctctgaggatctctgaaattgttacttaaaaatgtaatttaaattgttcatttattgttttttttttcttagaaatatactgcttttatatatgattgttttgctggtcctaaacatttcaaggatgtaagtctttgttttaatataactttatttgttttccaagtagatgataatattcaaaagcaataatgtatatgatatctataaaggaagcaaaattaagtcatacactgattccactgtaaacaatctgtccagaattccagacaccttcagcaaactttttctgtaaaggcctgatagcaaatatttttgtggtgggttgaatttggcttatgggttatagtttgctgacacctagtttagagggtgtgtaaaactatcttcataactttgagatttttataaaattttacatgaaaatatactgataaattatatgcacatattttctaccagtagcattatagtggcatcatagaagaatatttaccaatgatggggaaactgtaaaactacagtatcaaggcatacaacttaaattccacttggaagattgtaaagtgtcaaagtattttaatgataatttaatttgggcttttgaaatgttcttctacaaatgaaaaagatgtttaaaaacgttacaagggaagctatgccttctgaagtctatccttagttgaaacagaaaataaacacaaaggtacaagatccttaaattattttgaaccacagaggttgaaattgttttgtgatcttcagcagaaatatttcagtgaatttgtagagcatagtaataggtatttactgtccacttatatatatcagcatctggtcatgcacgaaccattaattctatatttctatttcaataattctaatatattatttctataaatgtaatatctgtatgtggcaaagagcctttcttctcaagatcctgaaaagctggttacctgccctttgagtgccacagtcctgaactgcttgttcttgacatcttgcatattacttcagagttccccactgtgcagactctcaggtattaactgtaaaaaactctttacatgccattattatctgtaatctctatctcttctactttaaattaatgtttctagaattaataggttaaatacacatacacacacacaactatgcctcagaaaagttaggcttttacaaataaaaagaataagattagaattaacaagtagagagaataacggtaggcagagtcagaatcaggaataaatatcagtgaatcaaaagaatgaaaaatattatgtaataaaaattagcaatgtaatgtaaacgtttgataaaagagtatctttttcttttatctcttactgttgacctctgtgcactgtaataaggtgtgttgctggatcttcttggtc

SEQ ID NO: 460516 - DNA, 3268 bp, Homo sapiens
  misc_feature (2)..(2): n is a, c, g, or t
  misc_feature (6)..(6): n is a, c, g, or t
  misc_feature (9)..(9): n is a, c, g, or t
  misc_feature (11)..(11): n is a, c, g, or t
  misc_feature (13)..(15): n is a, c, g, or t
  misc_feature (482)..(482): n is a, c, g, or t
  misc_feature (485)..(485): n is a, c, g, or t
  misc_feature (490)..(491): n is a, c, g, or t
antggnaancntnnngaaagaagccattttgggatgtctggatttcagctgcttgcagatgggggagttggtggagaatgggttggagagattaggagttgttgggtggaatcacccacaggagagacactgctgtgcaagccacaccaatattttcaccaaattgagcttctggatgccaagatcccttgggctccagaggtggtgatgctgctgtgggctgccactctaggcaaggagtacatcccaccatcagaggaagaagaagatggaaagaagaagtttgacaaagagagtgaaaaatattactctatccttgaaaagcatttaaatttgtccgcaaagaaaaaggagtctcatttacaagaggcagatacacaaattgaccgagaacatcagaacttctatgaagcatcattagaatatgtctttaaaattcaagaggtccaagaaaaaaagaagtttgaatttgttgaaccgangtntcaannaggtatcaccattttaggactctaccgaataggaggagtgaactccaaagttcaaaaactcatgaataccacattttctcctaaatcccctcctgatattgatattgatattgaactgtgggacaataagacgataacaagtgggctgaaaaactacctcaggtgccttgcagaaccactgatgacttacaagttgcacaaagattttatcattgctgttagtgactcctatagcagcagcccagacagcacacctatggggagcattgagtcactctcttctcattcctctgaacaaaatagcactacaaagtcagcttcctgccagcccagggagaaatctggagggattccttggattgcaaccccatcatcttccaatggacagaaaagccttggtctgtggacaactagtcctgaatcaagttccagagaagatgcaaccaagacagatgcagaatcagactgccagagtgttgcttcagtcactagcccaggagacgtttccccacccatagacctagtcaagaaagagccttatgggctttcaggactgaaaagagcttctgcttcttctctcagatccatctctgcagctgaaggaaacaagagctacagtggatctattcaaagcttaacttctgtaggttccaaggagacacccaaagcttcaccaaacccagacctgcctccgaaaatgtgcaggagattaagactagacactgcctcaagcaatggctatcagcggcctggctcagtagtggcagcaaaagctcaactgtttgaaaatgttggttcacctaaaccagtttcttctgggcgccaagccaaagccatgtactcctgtaaagcagagcacagtcatgagctttccttcccacaaggagcaatattttctaatgtgtacccatcagtggaaccaggatggttaaaggcaacttatgaaggcaaaacaggactagttccagaaaattatgttgtcttcctctaatactatttagtggatggcagtatcttcatggtatccatggtaacgaataaatgctatgattttatctgacacagatacacggggatcagcccactaagtgaaaacagtcaatttctatcaagttcttcaccagcagactatgtagctccttattaatggaaaaaaagatttaaattgttggccattcttttttggttggtttcttattttaaaatatcttacttgtgaaaaatgtgtttttggataatatgtaactctccacaatgtcgcttccgtagcaattgtagagtttcaaatactgtgttaaatactgtatcccagaaatttggaaaccagaaatctgctatatggattttgagatctgtcctttactgcctggcattctctgaggatctctgaaattgttacttaaaaatgtaatttaaattgttcatttattgttttttttttcttagaaatatactgcttttatatatgattgttttgctggtcctaaacatttcaaggatgtaagtctttgttttaatataactttatttgttttccaagtagatgataatattcaccactgtaaacaatctgtccagaattccagacaccttcagcaaactttttctgtaaaggcctgatagcaaatatttttgtggtgggttgaatttggcttatgggttatagtttgctgacacctagtttagagggtgtgtaaaactatcttcataactttgagatttttataaaattttacatgaaaatatactgataaattatatgcacatattttctaccagtagcattatagtggcatcatagaagaatatttaccaatgatggggaaactgtaaaactacagtatcaaggcatacaacttaaattccacttggaagattgtaaagtgtcaaagtattttaatgataatttaatttgggcttttgaaatgttcttctacaaatgaaaaagatgtttaaaaacgttacaagggaagctatgccttctgaagtctatccttagttgaaacagaaaataaacacaaaggtacaagatccttaaattattttgaaccacagaggttgaaattgttttgtgatcttcagcagaaataaaatctgtacatgattttcttttatgccttttagtttacagtctttattagcaatttcagtgaatttgtagagcatagtaataggtatttactgtccacttatatatatcagcatctggtcatgcacgaaccattaattctatatttctatttcaataattctaatatattatttctataaatgtaatatctgtatgtggcaaagagcctttcttctcaagatcctgaaaagctggttacctgccctttgagtgccacagtcctgaactgcttgttcttgacatcttgcatattacttcagagttccccactgtgcagactctcaggtattaactgtaaaaaactctttacatgccattattatctgtaatctctatctcttctactttaaattaatgtttctagaattaataggttaaatacacatacacacacacaactatgcctcagaaaagttaggcttttacaaataaaaagaataagattagaattaacaagtagagagaataacggtaggcagagtcagaatcaggaataaatatcagtgaatcaaaagaatgaaaaatattatgtaataaaaattagcaatgtaatgtaaacgtttgataaaagagtatctttttcttttatctcttactgttgacctctgtgcactgtaataaggtgtgttgctggatcttcttggtc

SEQ ID NO: 460517 - DNA, 790 bp, Homo sapiens
tccccctcacgatgctccccctcacaaagtccccctcacgacgccttcctcactacgtgccctcctcacgtcgcgcctccctcacgacacatccccctcatgacgcggccccctcacaatgcgcccccctcacgacgtccctctcctgaccccccctcaccacgcctccactgacaacgtccttctcacgacgcccccctcacgacgtccccgtcaccacgctcccccctcacgacgtccccctcaggacacccctctcacgacgtccccctcacgacgtccccctcacactaccgcccctcttggcagcttgaccttcaaccctccagggtttctttttgacctttgctttccttccaaactttcccgcctctggaataaaagagtcgcagaacagagaaaggcttcagggatgggctgttttgcagatgccacacaccacgtgttcccagctctaagaggcctgtttgtccccattttaccacctctggattcaggacacgcctggctgcattgtctccttgtctgcatagaaacttgtgggacagaagccgctggcagacgttggtggggaccctcacaacgcccccaattcaggcccctgaggccacaggaaaggatgtggcacaaggaggccaaccatgcagtcctgcttggagcggtgactgggaagacagacgtaccctgaagaagcacagaggaatcgagaccaattgtttttgccttattttcctagttaagtatacaaaggagtgatatcaataaaaacctatgtctaaataagtaaaaa

SEQ ID NO: 460518 - DNA, 1446 bp, Homo sapiens
cagggctgggcatggcagctcacacctgtaatcccagtgcttcgggaggctaggagtggagcttctaggaaaggtggtctgcagcaggcatccctgagctgggcccccaggcactgtcggggtgacgcttcttacctggaccaccatctgtgtccgctgcactgcacttcccctcctccagcaccgtcatctaagggtgaggccagccaggggccaggaagaaagaggcctccaggggtcctcagaagtatcttcgtccccaaggcggctccttccaggctggccgcggcatctgtatcaccagcctgcgcactagtgtctgtgatgagacgccatagcacaggcactggggtccagcacatggagtctcagatgggcttcctgcctgggttgaagggtcgttctctgctagggacagccatcggctccttctcaaagcctccaagagatgtgtctgtcggcgtctcagccacgcatccctgtctcagggacttgcctgagcacagggccgggcctggtgtctgcagctctgacagcacccaggggatgcggattgggccacactttgaggaggactggactgtgacgtgcctttcacagaggaaggaaggacaggcaggagtcgaggcaaggagtcgagacaaggcgagcctgttgccagcgagtcacagagttgtgcagggtctgccgcagagctcccagtgcactccaaccctgccaccggaccagctaggccagacccccagggagccgagcaccccagctttacagttttcccaggtggttctgagtcactgagccacaggcaagcctggagccaggaacagctatggaggatccagatgcagatgcactgaagcccacacctgccccccagtccagcccagtgagtgtgcatgtgtgtgcatgtgtgcacctgtgtgcgtgtatgtgtacctgtgtctctatgtacatctatgagtgtgtgcatgcatgtgtatgtgtacatgtatgagtgcgtgcatgcattcctgtgtctgccagtgtgtgtacatgtatttgtgcgtgtgtgcatgtatgtgttcacatctgtgtgtgcacatgtgtgtgcctgtgtgtgcatgtctgtgcctgtgtatgcacttatgtgtgcctgtgtgtgcatctacctgggtgtgcacgtacatgtgcctgtgtgtgcatctacctgggtgtgcacgtacgtgtgcctgtgtgtgcatctgagtgagcacagatgtgtgcgcatctacctgggtgtgcatgtatgtgtgcctgtgtgcaggcacctagttgccaaacagatcacgccgactcactagtgatatgtcaacaataaaactggattgtcatctttgtagagcagtagttctcaaagtcagttcttcatcagaaatctaggggccaggcctccaggcagctgtgacacagccaacggccaagagctgc

SEQ ID NO: 460519 - DNA, 1025 bp, Homo sapiens
ggattttggagatcatagatttcggatcgcggattgggggttggatctcggattgggggttggatcggggatttgggagccggtggttgggggtctgagaagtcaccaccatgaagttgttcggcttcgggagccgcaggggccagacggtcctgggctccatacaccacgtctacacgggttccgggtaccgaatccgggactccgaactgcagaagatccacaaggcggctgtcaggggcgacgccacggaggtggagcgctgtctggcgcgcagaagcggagacctggacgcccttggcaagcagcaaagaactgctctacatttggcctgtgccagcggccatgtgaaagtggtcactctcctggttagcagaaaatgccagattgatatctgtgacaaagaaaatagaacgcctttgatacaggctgtccattgccaggaagaggcttgtgccgttattctgctggaacatggcgccaatccaaaccttaaggatatctaccgcaacactgctctccattatgccacgtatagtgagagcacctcactggcagaaaaactgctttcccatgatgcagatattgaagcactggacaagaaatatgcaggtcacttggaaattagaacagcccttatgcttgctgtgcactatgactcaccgggtattgtcaacatccttcttaaacaaaatattaatgtctttactcaagacgtgtggacaagatgcagaagattacactatttctcgctgtttgacaaagctgaagatttgaagattggagacttctgtggagccctgcagaagtggaatctggaagtgggagcccataggaagacagatacttagatagtacttagggaaatagagggggaagctggatataaactggcagttaaaaaattgtaaagaaatcaacttgctcattttcattgtgtatttttgctcccaagcattttccatgaactgtgtgtggattcattgcctgcattagatgacgaagtcttgagtgttgctgctaag

SEQ ID NO: 460520 - DNA, 676 bp, Homo sapiens
gaggcctctgcagctgtgcagaactctggccaaggcggaggaggcagagagggccagcgcggtgagcaccgccgtgcagtgggtcaacagcaccatcacgcacgagctccaggggatggcaccctctgaccaggcagaggtggatcacctactcaggatattcttcgcaagtaaagtacaagaagataaggggagaaaagaattggaaaagagcctggaatactcaacagtgcctacacctctacctccagtaccaccaccaccaccccctccacctcctaccaaaaaaaaggggcaaaagccagggaggaaggatactattacagagaaacctattgcgcctgcagagcctgttgagcctgtactcagtggcagtatggccataggggccgtgtcactagctgttgccaaagcctgtgccatgctgcttaataaacctctgtacttaaatatcgctctactgaagcacaatcaggaacagccaacaacgctatctatgcctttgctgatggtatcgctggtcagctgtgggaagtcatcatctgggaagctaaatttaatgaaagaagtgatttgtataccccatcctgaattaacaaccaaacaagtaccttacattatcttaaattaccttttctaaaaaaaaaaaaaatatatatatatatatatatactcc

SEQ ID NO: 460521 - DNA, 758 bp, Homo sapiens
aagattccacgtataaatgagatcatggccagggcaggcaggacctcgggcctcagtcaaagccgtgccagtcgctgtgctccgagtagtattccagcttggcacccatgcatttgacaccgtccagcagcatgcatgtgccatggcgtcagcccatgatgcaggcttgcaccttccgcgcacgcagaaagctgctgtccctctcctggatgaccatgaccaccgagtcctgcaacttctcatcaaagtggacgtggctttgggagccctctgcatcgtggcctgtcacaaagaccaagccactcatgcccagcagcctcccatgctccggggacaacagcaggagccttgcagggtgcagcccggggcggacagggcagggacgaccgctgaggcggtggcagggtctcaacgctgagcacaaggaagggagcaaggctcctcttttaatttggttttcagtcagttggaactcagtccttagtttaggactggagcttgggaaaagagaagtgaagaagaggaagattttcaattactactgggcttgcttcagactggatccaaggctcactgcctttgcagcaaggagcaggaattgcctagtcacgtcatgcagtcatgtccccaggaaaaacatgaacaatcacagcttttcctttctgggcctctcctctttgttttgtttgtttgtgtttgtttgtttttttagagacagggtatcatcgctgttgcccaggctggagtgcagaggtgcc

SEQ ID NO: 460522 - DNA, 1300 bp, Homo sapiens
tctctctccctgagaatttttgctaatttagtaaccaggggaaatgattgcaatatctcctagtgatctggtggcagggggagcatctggtttggacagcattgaaaggcgggaatcagtgcctcctcctagtgatagtgcctcaattgagcagggcttattccgagctcagtatgcaacatcccgacagggcaaatctaggtattgctctcaagtcactatccaacatcccgatgggttgaatggcatgccaaacacagcaataagcaatataaaaaagccaggccgccccggggatggtgttcgcagcgattcaaagggtggcactgggttggacgttttggttacgagccagcctattcccacattgtgccctttgcacccaacagtgcgtgtgaggaacgaactgctgtttgagcctcccctgagattgtgcgtagcctccgtgtaaatgtaatagcctccatggcttaattggctatcaagcgaattttcacagatgaaagcaatgttaggttaggggacgacggtgcagccacccagcctttaccagcagcgtgctgcagacgaaggcagtcaaggtgtggaggtgatcatgcaggtgcagctcagttgccgtgatgctccttgagtcaatgagctctttggtctgctcttctgctcaagcagaaaatgatctgcgcttcacccttgagaagctgacaagaaccacaggcttcttcgggcaggtggtggaacatgggtgtatcctgcaggttctcacagtatctccctttgctcaggctctagcctgattttctggctcataaggccaaagggagccggaaaggtccccacggcaggactcatggtggagagagaatggtctggaggattcaggcctctgcacactgtgtctgggtccctccttaaagaatgataaagacaagcaaagagcttgaagcagcctggagtccagccagaaacctttaactgagctttaaaggagatggtcacaacacttttcagaatactggcaaaggcctcctgtggccaggtttgtcctgggatgagcaaaatttaatgttaacctgctgtatctttgcttttaatatatctgcttgcccaccacaatgacgttatggttaatttcaccaatttggtaacctgcctcatgggaagtacgaaagtaagcaagggccaggtgtggtgactcacgcctgtaatcccagtactttgggtggctgaggcaggtggattgcttgagcccaggagttcaagaccaacctgggcaccatgacaaaaccccgtctctaaaaaa

SEQ ID NO: 460523 - DNA, 700 bp, Homo sapiens
gatcacaccctggattcttctcttccaggtgcagctcagttgccgtgatgctccttgagtcaatgagctctttggtctgctcttctgctcaagcagaaaatgatctgcgcttcacccttgagaagctgacaagaaccacaggcttcttcgggcaggtggtggaacatgggtgtatcctgcaggctctagcctgattttctggctcataaggccaaagggagccggaaaggtccccacggcaggactcatggtggagagagaatggtctggaggattcaggcctctgcacactgtgtctgggtccctccttaaagaatgataaagacaagcaaagagcttgaagcagcctggagtccagccagaaacctttaactgagctttaaaggagatggtcacaacacttttcagaatactggcaaaggcctcctgtggccaggtttgtcctgggatgagcaaaatttaatgttaacctgctgtatctttgcttttaatatatctgcttgcccaccacaatgacgttatggttaatttcaccaatttggtaacctgcctcatgggaagtacgaaagtaagcaagggccaggtgtggtgactcacgcctgtaatcccagtactttgggtggctgaggcaggtggattgcttgagcccaggagttcaagaccaacctgggcaccatgacaaaaccccgtctctaaaaaa

SEQ ID NO: 460524 - DNA, 1314 bp, Homo sapiens
cgcctcatgttctccctcatagaagcatcttcttgaaacccatctcaattctctcctcttgacaacatgtgttgcaactactacggcaactcctgtggctatggctccagctatggctgtggctatggctctggttatggctatggctatggctccagctatggctgtggctatggaactggctacagctgtggctatggctgtggctatggctctggttatggctgtggctatggctccagctatggctgtggctatggaactggctacagctgtggctatggctctggctacagctgtggctatggctctggctctggctgtggctatggaactggcttcggctgtgggtatggctgtggttatggaactggctatggctgtggatgtggctctggctctggctactgtttatgtaagtacactgtgaaatctgcatggcaaacatcattgccttatgatacatttctcaaattttcagaacatatccctgttgtttagcagcacgtgaatgtatttgatttattgtcttgatgtccctttgctttccccatgtgttaccatcaactgcctaatgaaacagcctgggattgtgtaatgactaacttagtgctttgagtttaattctttttcagccactgtggtatgttgattactatattaataatgtgtctcctttatgtgtttttaaatagttacttggtcatgaactatttataagctttggaaacatgatttcatttattctgcaggataacttcaggaagtgggtattaattctcactgtataagtgaagacattaagcaccagagtttaagtagcttgatccactgaaagagattcaactgtgtggaacctatgccgcggagaattgctttctgccattgttattgtccagcagttgccgaatagctctgacctgagcaaagcagtgaaacgcggtgctgttgagtgggttgccactgcacctttttcaactactctagtcttgtggagaaaacaccccttctaaattttttcttcattgaatactctccctcagctccagggtaccatatagagttttcttgtattttagagttactgttttatcaaagtgtaccagtcttttgtattacatttctcctgtctaaatcaactgtgtggtttctactcattatggatatagattgacacaaactcaataaatatttttgaatgaataactccacagtccaagttattttaatcactatacaaaatctccagagtttcttccatatttctgaacatggtaactatgtatcaagagacaaaccacaaatttaaagaag

SEQ ID NO: 460525 - DNA, 527 bp, Homo sapiens
tgtttttttaatgatagttaagtaatttagcgcccctagatccactgaaagagattcaactgtgtggaacctatgccgcggagaattgctttctgccattgttattgtccagcagttgccgaatagctctgacctgagcaaagcagtgaaacgcggtgctgttgagtgggttgccactgcacctttttcaactactctagtcttgtggagaaaacaccccttctaaattttttcttcattgaatactctccctcagctccagggtaccatatagagttttcttgtattttagagttactgttttatcaaagtgtaccagtcttttgtattacatttctcctgtctaaatcaactgtgtggtttctactcattatggatatagattgacacaaactcaataaatatttttgaatgaataactccacagtccaagttattttaatcactatacaaaatctccagagtttcttccatatttctgaacatggtaactatgtatcaagagacaaaccacaaatttaaagaag

SEQ ID NO: 460526 - DNA, 656 bp, Homo sapiens
gctattctcatgatagtgaataagtctcaggagatctgatgggtttatcaggggtttccacttttgcttcttcctcattttctcttgctgctgccatgtaagaagtgcctttcaccttccgccacgattctcaggcctccccagccatgtggaactgtaagtctaattaagcctctttttcttcccagtctctggtatgcttttatcagcagcatgaaaacgaattaatgcacttggtaacatgccaattacttgaccaagggaaggtgaggcaccttgctttaaaagtgaatgccaaagagaatagcagctcctcagtgaaataatgaagctgtgttagctgatgggagaaaaggttgctgaggagaccacaggaacagatgtctgcagaagtgtttctgtttcttgtcatcagcctcattgctgtaatggctccccaaggctgccagagtttacatttatttaaatagaatcaacatgtttctgtttcatagcatctttggtaaaattatactatgtaaaatgaggattacagtcttctcaccaaaagtaagatctctgccttgtctttctggcccatctggagaaaaggagcttgcgctccgccgaagagctttggttgcctcacctttctttctctttaaaagctccgttct

SEQ ID NO: 460527 - DNA, 675 bp, Homo sapiens
gctattctcatgatagtgaataagtctcaggagatctgatgggtttatcaggggtttccacttttgcttcttcctcattttctcttgctgctgccatgtaagaagtgcctttcaccttccgccacgattctcaggcctccccagccatgtggaactctctgccctcatcatgagaccatgcccaggctagtctgctggaaggaagtcagaggcacacggaagagagccacattcagccaaggccattctagaccagttgttccctgtcacttcactaattggccacagcacaaggtacacggatggagctggaagccattatcctcagcaaactaatgtaggaacagaaaaccaaatattgcatgttcttacttataagtgggagctgaacaacgagaacacatggacacagggagggaaacaacacacactggggcctgtccagcagtaaggttgaggcagggaaagcattaggaaaaatagctatgcatgctgggctgaatactgggtgatggattgataggtgcagcaaaccaccatggcatatgtttacctttgtaagaaaccagcacatcctgcacatgtaccctggaacttaaaataaaaattaaaatgttttttaaaaaagtcaaaacacaaaacaaaacaacaaaacaacacaacaacaaacagggg

SEQ ID NO: 460528 - DNA, 731 bp, Homo sapiens
gctattctcatgatagtgaataagtctcaggagatctgatgggtttatcaggggtttccacttttgcttcttcctcattttctcttgctgctgccatgtaagaagtgcctttcaccttccgccacgattctcaggcctccccagccatgtggaactctctgccctcatcatgagaccatgcccaggctagtctgctggaaggaagtcagaggcacacggaagagagccacattcagccaaggccattctagaccagttgttccctgtcacttcactaattggccacagcacaaggttttgttgaagattgaatgagtgtgtaaagtgcccaacagaaagtctggcacatggtacacggatggagctggaagccattatcctcagcaaactaatgtaggaacagaaaaccaaatattgcatgttcttacttataagtgggagctgaacaacgagaacacatggacacagggagggaaacaacacacactggggcctgtccagcagtaaggttgaggcagggaaagcattaggaaaaatagctatgcatgctgggctgaatactgggtgatggattgataggtgcagcaaaccaccatggcatatgtttacctttgtaagaaaccagcacatcctgcacatgtaccctggaacttaaaataaaaattaaaatgttttttaaaaaagtcaaaacacaaaacaaaacaacaaaacaacacaacaacaaacagggg

SEQ ID NO: 460529 - DNA, 916 bp, Homo sapiens
aggctctgctgggtatgcacaccatggcatcctgggaaagagcatggcggtgttgtccctaccctgggctgacagcacggtggtatatttggaaggcaactggatggggccttctcacccactcctatccaggttacaggtgtgtcctggtgtggaggttgcaatcccttgggcatcatggtaagttggaaaagatatgtaagcaaatgactaaagtgtgtatggaacttggcactggggaagtgacagtcaaaagtcagttaaatctcagctgtgacttcagctggcatagtgactttgatcaatgcctgcaaattctctgggctctggtttctttatttctctgccctcatcatgagaccatgcccaggctagtctgctggaaggaagtcagaggcacacggaagagagccacattcagccaaggccattctagaccagttgttccctgtcacttcactaattggccacagcacaaggttttgttgaagattgaatgagtgtgtaaagtgcccaacagaaagtctggcacatggtacacggatggagctggaagccattatcctcagcaaactaatgtaggaacagaaaaccaaatattgcatgttcttacttataagtgggagctgaacaacgagaacacatggacacagggagggaaacaacacacactggggcctgtccagcagtaaggttgaggcagggaaagcattaggaaaaatagctatgcatgctgggctgaatactgggtgatggattgataggtgcagcaaaccaccatggcatatgtttacctttgtaagaaaccagcacatcctgcacatgtaccctggaacttaaaataaaaattaaaatgttttttaaaaaagtcaaaacacaaaacaaaacaacaaaacaacacaacaacaaacagggg

SEQ ID NO: 460530 - DNA, 3095 bp, Homo sapiens
ttttttgttttgttttgttttgttttgtttcttttttttttttttctttttgacatggagtcttgctcctgtcgcacacgctggtggagtgcgatggtcttatcgttccttgtcgtggagggccgccctcttcactgtaggatgcttagcagcatacctggccctgacccactagataccagcagcaatgtcccagttgagaccatcaaaaaaagtctacagacattgccagatgttccctggggaaacacagaagggaggatcatgtgcaatgaggatggtggtgagaatgaccccctcctggctcaggtgcaggacccaatgtctctgaaacacaaaaagcaaagggacagcagagggacacagccacatgagacaagagcagcagctaggaggaaaggctgtctctctgggatgagagagaagactgatgaacagggtgcccacttacccacttatgatgctgctgtcattacctataatgcagtatctgtgagcatgcagcttgtatgagaaagttctgatcttgacagttcacgtaacattcaatcaattataccattgctctatctctaaagttttctttttctccttttctcagtgtcttaccaagaatgaaaggcaacctatgtaaaaactatgggctttctagtataaataaaaactactcatctccagaaaataaacaatgactgctaagatgattgaaaaaagaaaggagaagaaagtagcttgtaaaagcgtgtgaaatgcattcacgttggaatctcctacaggcacttcaggtcaaagactaccgatgtccagatcataatgcgaggacagtttgagcccagtgctctctgactgaggtagaacccccgggaaggtgaagagggcagccgtctgcgaaacagcccagcatttaagaatgggcagcacctggccaggtgcatttgagaactaggaatgtggcaacaataacatttatttatttggatgaagagaagaagatgtattggattccctgaaacaatcattgacctgcctgaatcccaactgttgcactgactccactaattcaccaatccacttgagctgggaggagagcccatgcacagaagtttatggataaacagacctgaacgtctagcatgatgtcaaatttatatggccacagaactacaaaaggaaataactataacctcactgaccacagtgctgctgacacttggacaacatgggtttgagcttcatgggtccacttagacaataattttttcactaactatattggaaatgtttttggaaatttataacagtttgaaaaatattgtagaccaacatgtagcctagaaatattaaaacattaagaagcaagtatggcatgaatacatagaatatatgtagatactattctattttatcatttactactataaatatatgcaaatctattaaatgaggttaacatttatcaaagcatgtggtcacaaactcttatagtttgtacatggcaccatttacagacaaggaaatagaagccaatgtaaaaatgcagtattaagtcataaccgcataaaagtaactgtggcacatactgcactaccatgataatttcacaggcacctcccactgctattgtggtgagcccacgtgttgtgagcttccgcataaagccctgcaattctgatcattgccacgtgggcagtttgtgtctctagttagttgtgtactgtagtaaaaagtgatctcgcagttcttgcataatttccgtgtttagtgcgatatggtaaacattgaatagcaccatgaaacccacacgaagggccactggtgatgttggaaggctcccaagaagcagagaaaattcatgacattacaaaatcagtcaaatttcttcatatgcactgtagattgaggtctgcagctggggtttcccattgttttaagataaatgaatcagcctaaagatcattgtaaaaaaagaaaaagatattggagaggctataactgcagctatgccagcaacagcagtagttacatttctgaagagacaaaatttgtcagtgggttttcaagagctcaagggtaacaccctaacccccacgttgttcaagggtcaactgtattgcagtcaaaaacagaaatttaaaaaaaaaattccttcaaaaaaataaaattgtattacacacttgctaatccaattttgacacacaattttcttcaccatcaatataagatatgctatgccaggtttccttatttgtaataattcatgtattacttatagtttgctttagatatggtggttctttgtctaagaaacataaaactttctattcatattttaccttttctccctttttgcaaatatgtatgataccttattcttgtggtagaatgttacacatagaaataaaagatttagttagcaacagcaaacctgaaaatggattaatgaaatatttaagacagggcaagcaagtccatttccgaatgatgggtgtttgcatttatccagtggagctgctgttcatggagacacagcagcatcccccgagaaggctgatagccctggcttcccttcccttcaggggcaggagaaagctgagcctctggtgctgtgtttgacaacacagacacagcttggaggtcttgcgggcttggttccagacccctgcagtaaagtaaatattaaataaagcaagttttacacaggtatttgggtttcccagtgcatgtaaaagttaggcttacactatactatagtctattaactgtgcattggcatgatgtctaaaaaatgtacatagttaactaaaaatattttattgctaaaaatggtaacaatcagtagtgaattttttccagatgttttcaatttactttgcccagacccatcagaggaatcattatctgtggcagttttaaccatatcacaagtatttcttaagtagtaaaacttaaaagtcaacattactctttgatccatgggctgcagaatgggtgttgtgtttgcagacatgaaacagtattaatcttcttgcacatctccatcagacctcttgggtcaccagtggtactgttaaggaccactaatatttttaaaagaa

SEQ ID NO: 460531 - DNA, 1389 bp, Homo sapiens
ccctcctcgaccgccccgcccgtcagtcctgaaaacctggcgagaggcgcgtactgtcctaggggaattcccctgcaaacagaagggagcccgccctgcgcgtcctggagtgggtgcggcaggagcgcttccaggcactgcgtccccaggtgaggggcggagccggggcgcggttcgcggcagtggccaggcctttgtttccttgggttggggtgacccctggtggtcatccagagcgcaacaagggctactccctggtccagaattcagtcctttccaggggagaaatggagaatgatggagggtggcccaggcggtgctgattggagtagacagccatcctcccgaggttggcactgagggtgatagagacctacctgcctggccaagctactccgccctgcctaagcatccccttccagagctccaggctggtggggttttattaagggaggcggtgctccttacacaggcctcttcctgctccccgtaaccctgtcgctggaggtgtctgtgggaaaggccaccgacatctacgctgtcaatggcacggagatcctgctgccctgcaccttctccagctgctttggcttcgaggacctccacttccggtggacctacaacagcagtgacgcattcaagattctcatagaggggactgtgaagaatgagaagtctgaccccaaggtgacgttgaaagacgatgaccgcatcactctggtaggctctactaaggagaagatgaacaacatttccattgtgctgagggacctggagttcagcgacacgggcaaatacacctgccatgtgaagaaccccaaggagaataatctccagcaccacgccaccatcttcctccaagtcgttgatagactggaagaagtggacaacacagtgacactcatcatcctggctgtcgtgggcggggtcatcgggctcctcatcctcatcctgctgatcaagaaactcatcatcttcatcctgaagaagactcgggagaagaagaaggagtgtctcgtgagctcctcggggaatgacaacacggagaacggcttgcctggctccaaggcagaggagaaaccaccttcaaaagtacgcagaatcagtttcggcagatgtccctgccagctctgcttcctccagccctcagctatagagactgtgcgctgcacttctgccctgaatggattcaccacccgggttccccacgcagccactttcctgtcttcaggaatcactgacctgtgctgcctgatgccctgtgtctgaaagccatttcgtgcattttccccccagcgttttagttgtttcagatgggaaagtaattgcattttttgttactgcattcttgtcagaagaaattcatgaaaatttatgttcactgaaaaa

SEQ ID NO: 460532 - DNA, 195 bp, Homo sapiens
ccggagagaacaggactatgcccggggctggggacggaggcaaagccccggcgagatggctgggcactgggcttttgggcctcttcctgctccccgtaaccctgtcgctggaggtgtctgtgggaaaggccaccgacatctacgctgtcgggctagtcggggactgtcgggctagtcgggggggtaccgagctcg

SEQ ID NO: 460533 - DNA, 3425 bp, Homo sapiens
  misc_feature (1)..(2): n is a, c, g, or t
  misc_feature (10)..(10): n is a, c, g, or t
  misc_feature (12)..(13): n is a, c, g, or t
nngttgcttntnnagccaagatgttagagagaggttctccacatagttattacgtgaccccaaatgatgtcacagctggaaatggaaaagaagatataaactaccagagacaaattttcagccccaactcagcaaaagcaagtgatgaggctagacttccactcttttcaggctataccaaggtgaccaactcacccaaaaatatggtgtcagagaaactgaatgtagacagccttgcaccctcagtgtcagtgaaggacatcgatgaagctggaaaccatcattctcagcaaactaacacagaaacggaaaaccaaacagtgcatgttctcactcataagtgggatttgaacaatgagaacacgtggacacagggaggggaacatcacacaccggggcctgtctggggggtgggtctaggggagggacagcattaggagaaatacctaatgtagatgacgggttgatgggtgcagcaaaccacaatggcatgtgtatacctatgtaacaaacctgcatgttctgcacatgtatcccagaacttaaagtataatttaaaaaaaagttgtcatattttttctagtaattgcatcattttgagtttccaacttatctatattatcaccaacacttgttattgcctatttttttattatagctattcttgtaggtgtgaagtggtagctcattgtgctttaaatttgaatttctctcaagtctaatagtgtcaacaatcataccatgagtttattggcaattcatatatcttctttgttgaatttttttggtgaaatgggttgtcttcttattatcaagtaataagatatatttttatattctagatacaaaatttatttttatttccttgtatcacatattatttatataaattatctcctaatctgtgacttgtgttttcattttaatggtgtcctttgaagtacaaaaggttttaatatctgtcattttattatttgttttgatatatttaacataataaagaaatttatataacaaagtgaggaatatttagcatatattcatcaaatataaaaagttgactaagttttcacatagttaaattaaaaagaaaataaataggccaatcaaatgatgactacaatgcatgcactaacaattagaataaatcacattgcaaatggtgagtcaacataaaaatatatattaaaaaattaatattcaaataaatttaaattttaaagtaatattttactttgcttcttaaatcagcaaaattgaaaaaaataataagaatgacccttgaagtagtgaagaaagggtctgttgataggacctgttttctctgttctggaccaacttgacacaatttgtcctgttggttgtcccacagaaagccaattattgagagaatgagtattgccagagaagaaggctttattcgggtgctccagttgagaagatgggagattaggttactaaacaattaattcaattaattttattcagttacatagctgtgaatgtgttatggcctgaatatttgtgtcttcctcaaatttatatactgaaattcaaatccccaaggcaatagtaccaggagaattcaacatttttgttgaaggaatgaaaatacattgagacatacttttcatattcaaataaccgacattgacattcttcattccttaaatataatcttcgcaggcaagagaactgagccagggctgtgtggttaagatagttggacagtctttgcattataaatcatgaaatgattggagtatagaccccaatggtgtttatatgtactccaagatatattttacatctatttatttatttatctatttacattgatatatatatctgtatatagagaaacatatagatatatatagccatataactttatatttatagacatatctgatacattttatatattaatctcaatactattattataattacagcagtatattgagtctttacaatgtttaatatatattatatattggaacatttttcattaaagatactccttactttcaaattaaaaaaaaaaagattaaacttagcaaaatagatgatataaaatggtcttgtttctatgaaaattgttaaaccatgttttatttgacatttggaatgattttgcaatccatgtgtttatttagcatcaattatcataacttcctaagaaattcaacaattcttttatgccaaatataaatcataaagggaaaagggcaaatatctcttcatttctttctttgcaactgatatttgatgatagattagtggccacacctactcacaacctatttttaagtggtgtagaactgattatgctgttgaatatatgagtagtatgtcatttttattattaaatgtcatatttaagtgggaaaaaatatgaaattttaaagatgtgaagatttctttaaattctccatatttgctgagccttttttttccctgtatattcacagtaacacacagaactctagctcattcaactctacggattagctttatacattttgcacacgtgaatctggacttaatttttctggaatcagaactaatctatggtgaaatatggatattgaaatgcaaacaaaatcaacactgccaagaagcctccccaacaatctgctatttacataagttaacccatattgtggactattgactcttggcagtagacaagttggctacctaatttgtgcagtcactgaattttttaatatctggaaagtttctattccttaaaatattatgtacttttacatataatttttttctgggtagtgactaaatgtatatgctggaatgagacaaatgtatattttacatacaaataactaaagtgtgtctatttgaagcaaattataagtgatgtaagaaaataagagtttgatattaatttctagtttttctacaccagtctaagaaatttatggaagcccttagttggtgcaggaaagtgtttccactctggattatgttttttcctacatattcccatgttcttttccatctacactctaagagtctttgtttcttacgaagtcctattgctacacaaaaatttttcctcattttaactgatgaagtaattgaagtgtgcttcatgtactatactggtatagcttaccccctgcatgacgccttcctgtgccaacatcctgggttacttgaatttttggcttcagaaaactttgtttgggttctcaatctgtaggtattatgccatttataaatcagcaaataatttacagagggaagtgacactaaatgtcagctttaccttagtgcatttactcatttcttcaagatcatggtgccctaaattctggctgccttagtagttccctgatacttaaaaaaaaattgtttttgttttgtttcttttggctgtattttgcagattttgtttc

SEQ ID NO: 460534 - DNA, 1624 bp, Homo sapiens
gtcgacgcggccggtccataaatgccatgagacggctgcaggagcggatggggcggcttcggagtggccgagggctggatggggccgtggacatgggggcccggggggctgccgcatgtgacctggtccagcgctttgtgcgtgaggcccagagccagggtgcacaggtgttccaggctggtgatgtgccttcggaacgcccattctatcccccaaccttggtctccaacctgcccccagcctccccatgtgcccaggtggaggtgccgtggcctgtggtcgtggcctcccccttccgcacagccaaggaggcactgttggtggccaacgggacgccccgcgggggcagcgccagtgtgtggagcgagaggctggggcaggcgctggagctgggctatgggctccaggtgggcactgtctggatcaacgcccacggcctcagagacccttcggtgcccacaggcggctgcaaggagagtgggtgttcctggcacgggggcccagacgggctgtatgagtatctgcggccctcagggacccctgcccggctgtcctgcctctccaagaacctgaactatgacacctttggcctcgctgtgccctcaaccctgccggctgggcctgaaatagggcccagcccagcacccccctatgggctcttcgttgggggccgtttccaggctcctggggcccgaagctccaggcccatccgggattcgtctggcaatctccatggctacgtggctgagggtggagccaaggacatccgaggtgctgtggaggccgctcaccaggctttccctggctgggcgggccagtccccaggagcccgggcagccctgctgtgggccctggcggctgcactggagcgccggaagtctaccctggcctcgaggctggagaggcagggagcggagctcaaggctgcggaggcggaggtggagctgagcgcaagacgacttcgggcgtggggggcccgggtgcaggcccaaggccacaccctgcaggtagccgggctgagaggccctgtgctgcgcctgcgggagccgctgggtgtgctggctgtggtgtgtccggacgagtggcccctgcttgccttcgtgtccctgctggctcccgccctggcctacggcaacactgtggtcatggtgcccagtgcggcctgtcctctgctggccctggaggtctgccaggacatggccaccgtgttcccagcaggcctggccaacgtggtgacaggagaccgggaccatctgacccgctgcctggccttgcaccaagacgtccaggccatgtggtatttcggatcagcccagggttcccagtttgtcgagtgggcctcggcaggaaacctcaaaccggtgtgggcgagcaggggctgcccgcgggcctgggaccaggaggccgagggggcaggcccagagctggggctgcgagtggcgcggaccaaggccctgtggctgcctatgggggactgatgcctgagcgccacctactgcattttggacacctcacaccaaggggagatgcaccccacagacacctgggactttccccttctggttcctgtgtctcccaataaactctctgaccaaccctagctgtgcttctgcgagaagaaagg

SEQ ID NO: 460535 - DNA, 1661 bp, Homo sapiens
tacgagtgagaacattcagtgtttggttttctgaaggatcagcatggagctagaagccacgaatatagttgttagggctgttctcctgtttccaaggaccacaggccagccccttagcacaaggaggagagctcctatagaaggcattcttccaagctcatctgttctccttcagttggataaggataaaaaatttgaatattccccttctaaagtgcacttgattggccacagcttgggagcacacctggctggggaagctgggtcaaggataccaggccttggaagaataactgggttggacccagctgggccatttttccacaacactccaaaggaagtcaggctagacccctcggatgccaactttgttgacgttattcatacaaatgcagctcgcatcctctttgagcttggtgttggaaccattgatgcttgtggtcatcttgacttttacccaaatggagggaagcacatgccaggatgtgaagacttaattacacctttactgaaatttaacttcaatgcttacaaaaaagaaatggcttccttctttgactgtaaccatgcccgaagttatcaattttatgctgaaagcattcttaatcctgatgcatttattgcttatccttgtagatcctacacatcttttaaagcaggaaattgcttcttttgttccaaagaaggttgcccaacaatgggtcattttgctgatagatttcacttcaaaaatatgaagactaatggatcacattattttttaaacacagggtccctttccccatttgcccgttggaggcacaaattgtctgttaaactcagtggaagcgaagtcactcaaggaactgtctttcttcgtgtaggcggggcaattgggaaaactggggagtttgccattgtcagtggaaaacttgagccaggcatgacttacacaaaattaatcgatgcagatgttaacgttggaaacattacaagtgttcagttcatctggaaaaaacatttgtttgaagattctcagaataagttgggagcagaaatggtgataaatacatctgggaaatatggatataaatctaccttctgtagccaagacattatgggacctaatattctccagaacctgaaaccatgctaatctcagatacagtcttgatggatttctttagtaggagcaatgaagaaaagtgtctccttccacctggcatccagaccaaatttgacccttgtaaatgacttagtcatttacaagggtcttactcagagtcaagtacgggtttgctttttttctgtgtagaatgttcatctaactgcaccttaaaaacacactgaaccctgggacaaaagataattactatgatctgtaggaatctggatatcattgacaaaatagagctgttttggaattttcctgaataagaggaggtgatgcaaatgtatgttgagtgtataaactcactggacaaaagtaagcctctggcttgctgagtttttgaagtatattttcaggtataataatcattgttctaaaattatataaaactatttgttatgttgttaaatcttgctgagacaaattatgactatagtgcatgatatatagtagattataaccttgtgggttgatgtgtctatctagtaataataaaaactaatgagatggc

SEQ ID NO: 460536 - DNA, 1780 bp, Homo sapiens
tacgagtgagaacattcagtgtttggttttctgaaggatcagcatggagctagaagccacgaatatagttgttagggctgttctcctgtttccaaggaccacaggccagccccttagcacaaggaggagagctcctatagaaggcattcttccaagctcatctgttctccttcagttggataaggataaaaaatttgaatattccccttctaaagtgcacttgattggccacagcttgggagcacacctggctggggaagctgggtcaaggataccaggccttggaagaataactgggttggacccagctgggccatttttccacaacactccaaaggaagtcaggctagacccctcggatgccaactttgttgacgttattcatacaaatgcagctcgcatcctctttgagcttggtgttggaaccattgatgcttgtggtcatcttgacttttacccaaatggagggaagcacatgccaggatgtgaagacttaattacacctttactgaaatttaacttcaatgcttacaaaaaagaaatggcttccttctttgactgtaaccatgcccgaagttatcaattttatgctgaaagcattcttaatcctgatgcatttattgcttatccttgtagatcctacacatcttttaaagcaggaaattgcttcttttgttccaaagaaggttgcccaacaatgggtcattttgctgatagatttcacttcaaaaatatgaagactaatggatcacattattttttaaacacagggtccctttccccatttgcccgttggaggcacaaattgtctgttaaactcagtggaagcgaagtcactcaaggaactgtctttcttcgtgtaggcggggcaattgggaaaactggggagtttgccattgtcagtggaaaacttgagccaggcatgacttacacaaaattaatcgatgcagatgttaacgttggaaacattacaagtgttcagttcatctggaaaaaacatttgtttgaagattctcagaataagttgggagcagaaatggtgataaatacatctgggaaatatggatataaatctaccttctgtagccaagacattatgggacctaatattctccagaacctgaaaccatgctaatctcagatacagtcttgatggatttctttagtaggagcaatgaagaaaagtgtctccttccacctggcatccagaccaaatttgacccttgtaaatgacttagtcatttacaagggtcttactcagagtcaagtacgggtttgctttttttctgtgtagaatgttcatctaactgcaccttaaaaacacactgaaccctgggacaaaagataattactatgatctgtaggaatctggatatcattgacaaaatagagctgttttggaattttcctgaataagaggaggtgatgcaaatgtatgttgagtgtataaactcactggacaaaagtaagcctctggcttgctgagtttttgaagtatattttcaggtataataatcattgttctaaaattatataaaactatttgttatgttgttaaatcttgctgagacaaattatgactatagtgcatgatatatagtagattataaccttgtgggttgatgtgtctatctagtaataataaaaactaatgagatggcactagtatttccaaggtgttccttggtgttcagggtgtgcacaagagagattttggagcttatctgttatgtgttcatcagttagcaatgggacctgaagttcaacaacccagggtata

SEQ ID NO: 460537 - DNA, 1583 bp, Homo sapiens
gagattgaacgagatcatgtgtgtaaatgagatatgtacgccacaaactaaacaactctgcggagaaaacttgcccatctccttagacattcacagccacgctgcagggtcggtgttctgttcccacttccacagaccaaaaagttatactgtgatacaacttctggttctgcaacttcatgtcacaaagcgcagtgagctggcccagtcggtgataggagtgttcctgcaagccattccctatcctggaagtacgtgcatggcctgtgaaccatataaatacattccaccaatcccaagccagagtcagatccccccaaaatgttcaccagacccaccgagaagccagagcagaaaaggagagaaatgtgacaatgagcttcagctctgtcgaatccggactacatggaacctctctgggttggcttctcaaccgatttcagagttgtgagctgagaaagaacagcaggagagaggccacagttattcaggggactcctgccttgctgggggcttccgcagcccctgaccaaccatcctggtgtcactgctgagacagcagcctgaacaagggcaatgggaccccagagactgcatctgtacaggcggagccccagggctttagaccctttgctccagtgatcttagagccataatattatcatccaaaatgatgagagagtaagtggcaagcatacctagacatcttctgagcccagcagacagaattttggtttaaggagaacctgggtagtataatgacacataatatttttttatatataggcatcacagtctatgaattgtactgattcatctcatctcaagaagatggtattttagatgtatgtgtatatatttgaagccaaaactgtttattttgtgtaattttttgtgcctattagtttctgaatatctgtgcataaaagcttctgtttctctgcctgcacacatttgtgggtacacactatacacctatgtggggtaggaggggggaatgggcatatttgtttgcatttaccttgtgtttggtcctaggaagggatcttggtgatcattccagcccagctctttcacctcaatggtgaagaaactgaggtccagaaaggcaaggtgacttgtcacaggtaacacagctggctatggagacagaggtgacacaagaacctaggatttctgatttgtagatgagaactctttctataatattaaaatcaattataaattttggggagggaagcagggagatccttgttttttcctcccccaactgataagtaagtactaagaaggtcaatcttgaattagctatataataccaaaagttaagtttttcacacagacctggttcagtattgattccttttatgaaaaccctgtttatactcaagttgtcaaagaattccagagggcatatgaagccattgttaaaataattttatgcctttgtttttgaagaaaagtatccaaaatatataagcttattgtttgagttaaacaataaaaacatctgctgtttctcaggatggctctagtcttaatataacatggcaaaataataccccctaaatatccatgattaa

SEQ ID NO: 460538 - DNA, 2011 bp, Homo sapiens
cctcctcctgcctgcagacagcatgagcccggcagcaggccaccgtgggcagtctctctagccgagggcaggctgccttgttcctgtgatggagcagggaaagagctccgtccattctgggcagagcaggtgggtgtcccacgaagtcatgaagccacaggctgccatccgggcccctcggtggcggggaggtctgttggacggcgaagtggtctcctgagggggctccaacacggagccttgccagagctggcagaggacagaaacgcgtccccgccccccagctgaatctgagccgctcgccgagggcaggggcgggcgcggcctgagccgcagtcagggcccagcacaggctgtgcacatggcgtcccctggtggcacagagcgggcctcatgagcggcgccccgggagtttgcagctctaagcctgccgccgcctttccctgcttttgtgggctcttagtgccagatgaggaaggagtggtcattaatgttgtacaacagcctaatatgcatcatcccatttggcctcatgacagcctccataaggaggtatcacacgtgtgctacagatggagaaccagactcgagtgtgcttgtcggaggggatggtgacctgaccctgctggtggcagccctgggtttggacctgggcctgaccctctctctgctgccctgcagggaccccaccccaggcctgaccctctctctgctgccccacaggcccttcatgctgctgccgcccctcatggagtggatgcgcgtggccatcacctacgcagagcaccgccgcagcctcaccgtggacagcggcgacatccggcaggcagcccggctgctgctgcctggtctggactgtgaacctcggcagctcaaacccgaacactgtttcagttccttccggaggctggatgcccgagcagctactgaaaaattcaaccaggacctgggtttccgcatgctcaactgtgggaggacggacctcatcaaccaagccatcgaggccttgggtccggatggggttaacaccatggatgaccagggtatgacgccactgatgtacgcctgcgctgctggggacgaagcgatggtccagatgttgattgatgctggggcaaacttggacatccaggttccaagcaactcccccaggcacccttccatccaccccgacagccggcactggacctcactgacattcgctgtgctgcatggacacatctctgtggtccagttgctgctggatgctggtgcccatgtcgagggctcggcagtgaacggcggcgaggacagctatgcggagacgcccctgcagctggcctctgcggcagggaactatgagctggtcagtttgttgctgagccgaggcgccgaccccctcctcagcatgctggaggcccacggcatgggctcctccctccacgaggacatgaactgcttcagccactcagctgcccacggccacaggaacgtcctgaggaagctcctgacgcagccacagcaggctaaagcggacgtgctgtccctggaggagatcctggccgagggtgtggaggaaagtgatgcgtcgagccagggcagtggcagcgaggggcccgtgcggctgagccggacccgcaccaaggccctacaggaggccatgtactacagcgctgagcacggctacgtggacatcaccatggagctgagggcactgggtgaggcctcacgggcatgcacacccatgtccatgcatgcatatggacacacacggtcactccctgctgctcttcagcaggcctgagagggccagggcctgcagggacagacaagccccagggcagctgagcacagactgggtggaggctgggacccccctgctacacggccagttcaggaggggccctgggcctcagacagtgctcaacagtgccacgtcttggggtcatggcccagtcccctgccctcgggccctccaccctgcctggctggagcttcgctgccccctccccagtcacagcccagggatgtc

SEQ ID NO: 460539 - DNA, 921 bp, Homo sapiens
gtgtgacatttagcagctaaccttgaaatgcttgtgctctttcctgatctggacttggactgagatgcacctacctttgcacgttacactcagagcacaagtgattctgctggggaggtcaagagggaaccaggaagttatgacttgactaacatggcaaatcctcactgtctttggaagggaggatgtggagaggaggatgatgggtagagaagatcctcccctttttcacaaggaaggaagaagactaaatcctagagaggtgaggcccgaaaacagagcatgggcctggttctcccaactgtggcccagagctgcctccacaagaagagcaaagacttttcatacaaagtgggaaagaactgcaatagaggcatgtgtcactgcagcaaacaggcgcatacccattccagggaggtgtttccagctagagggctcagcacatacaaaggaacaagtaccaagaagctgggttcggcacgtacaaaggaacaagtaccaagaagccctatgtccagagaacagggagagtttagtgtgggagagaaaaacagaaagggaatttgaaaggagcgatgtgggagcacgctgtagagaagagaaaaaaatctgggcattagaggcagggagactgactcaaaatgatagacactcgttctgagcaagaaagagtgacatcatctcattgtaatttttttaaagtgtaatttacatacagtaaaattcatttttagtgtagaattctgccaattttgacaaatgtacacaagtaagcaactaccaccatagctccatcacccacaaaaagcctcgcttgccctttatagccaacccgtccccaacctatagcgccttacaaccactgttttgtttgctgtccctattgtttgctgtccctatagtttgctttttccagaatgt

SEQ ID NO: 460540 - DNA, 959 bp, Homo sapiens
tccacctggaaggtgtggatgggagtcttcttcgtgtggacggactctacagactgcatgcccagtccttccggaggggacgcacagcacgccgggcacgcccagtccttccagaggagacgcacagcacgccgggcacgcccagtccttccggaggggacgcacagcacgccgggcacgcccagtccttccggaggagacgcacagcacgccgggcacgcccagtccttccggaggggacgcacagcacgccgggcacgcccagtccttccagaggagacgcacagcatgccgggaatgagcaggcccctgttcttcggaacaaaccatctggagaaagagctggaatggagcccatcagtggtgcttcactgcttcaggaagatgcatggctcagcaggacacacagggctcagcaggtcacagccataggtaagcaaccaaagcaccctagaccccaccacctctttgaataaaattacccagtcatgccaggcttctcacctttcccagaaggagtagtacttcacacacacacacacacacacacacacatgcacgtgtacacacatatatacaaacacattcagacacatacgcatgcacatacacaacacacacatgcacgctacacatacacatacatacacacatatacagatacacacatacacacacgcacatacacacacactacacatacgcacacacacacacatatatgcatgcgtgcatccctctttctgtggcatccctgactttttggagattgagtcatttaattatttgtttaaatggctttgtaaatgttctaatgtccagaatatttgctagacaataacaacgttttccatggtttattaagtaaataattgtcctaatagaaatataaattgttacagaagtgcataaaatgaaattatttttccaaatggagttaaataagagtatattgaagg

SEQ ID NO: 460541 - DNA, 6030 bp, Homo sapiens
ggtcaggtcttctaaatgcaggctgtggtaaagccctcccctagtgtgctgacagctgtgcatggtgaacagctccttccaagtgctcgcttagcaccaagtactctcctgacacttatcagtggctgtcattgtgtctctcccccggccactacgccaggaggcggctatgcccctttgcctccccagcacgcctcgctgcgcctgacactaggaggcacccagcaagtagaacgtcatgacatgaataccttaagcctgcccctgaacatacgccgaggggggtcagacaccaacctcaactttgatgtcccggatggcatcctggacttccacaaggtcaaactcactgcagacagcctgaagcaaaaaattctaaaggtaacagagcagataaaaattgagcaaacatcgcgcgatgggaatgttgcggagtatctgaaactagtgaacaacgcagacaagcagcaggcgggacgtatcaagcaagtctttgagaagaagaatcagaaatcagctcactccatcgcccagctgcagaagaagttagagcagtatcatcgaaagctcagagagatcgagcagaatggagcctctaggagctcaaaggacatttccaaagaccacctgaaggatatacatcgctctttgaaagatgcccacgtgaaatctcgaactgccccccattgcatggagagcagcaaatcgggcatgccaggggtctcacttactccacctgtgttcgttttcaataagtccagagagtttgccaacctgatccggaataagtttggcagcgccgacaacattgctcacttgaaaaattccttagaggagtttaggccagaggcgagtgccagggcctacgggggcagcgctaccatcgtgaacaaacccaagtatggcagtgatgatgaatgttcgagtggcacgtcaggctcggccgacagtaacggaaaccagtcgtttggggctggtggagccagcacactggacagccagggcaagctcgccgtgatcctggaggaactgagggagatcaaggatacccaagctcagctggctgaggacatcgaggcactgaaggtgcagtttaagagagaatatggttttatttctcagaccctgcaagaggaaagatacaggtatgagcgactggaggaccagctgcatgacctgacggacctgcatcaacatgagacagccaacctgaagcaggagctggccagcattgaggagaaggtggcctaccaggcctacgagcgctcgcgggacatccaggaagccttggaatcctgccagactcgcatttctaagctggagctccaccagcaagagcagcaagctctgcagacagacaccgtgaatgctaaagttctcctggggaggtgcatcaacgtgatcctggccttcatgactgtcatcttagtgtgtgtgtccaccatcgcgaagttcgtctcacccatgatgaagagtcgctgccacattcttggcaccttctttgccgtgactcttcttgctatattttgtaaaaactgggaccatatcctgtgtgccatagaaaggatgataataccaagatgaagccactggttcctgccttcaagttctttcaagtttttattttaaagaaaactctgtgcatactaccaaattttacagtgaatgattgtgcggactcgtgtgtaagaaaaactaggactgtgtggtgtaaataactacaattctcttaactccgtagcagttgccaactcagtccttgtacttcgttaacacgaatctgtttcagagctctcctaccttgctcactgccttaatcagaccgatttcctgcccacctgaccagcccagcgtggtaaacctctgtatattgagaccttggcataattggtgatcctgaagaaagaggtctctctcctaagtctctgtcagaattgagcttcacaattgctaatggttgttttctgtgagtcctataaaaagcaaggatatgcatgattcagggaatgaaggaatcacaggcttgggcagtgttaaacactgtggcctattgtccccgtgtgatccaccctggcttctctccagggggaccataggtcccgttcatgttactcagtgttccacagcagttcagtcgtgtatgaccctgtaacgtggaaatcttatcacacacctgttatccaacaagtctacctgaggggttttgttacactttaaatgggaaggcatagggatttatgaatggggctttcaccttctcatacccaggcaaccaacacctgattttgtctcaactggctagcaaatgcccagccttcagagtgtgcaggaatgttttcaaatccctcatcagactgtgactttaacattaatttggaatcctgtgagcactactctgaaggtttgtgttttggcaaatcttttttcttttttgagacagggctctgctaaatattgctcaggctggttgcaaactccttgcttcaagggatcctcccacctcagcctcccaagcagccgggactgcaggcacaagccaccatgcctggctgttttttggcaaatcttgattgtgataagcccccctggaggatatgattcactttatgtgattcatcttattcacaggtctgtgagggactgcaaagcttactcaggaaatgaaaacaaatgatggtcatgttgcagttttttccttgaaggacaaccgaaccatagcctctaaagttcaagtgcactgaggtgtcggaacgctgaaagcatgaggaaacgaggacgtagggtgtgactgaatggtggctagattagtgggagcagttcacctggatgaagattgagagcatcgtctttgagaagtgaaagactagcaagaataaaataaattaagtccagtgtttgagccaaggttgccacctgtctcttaacatctcactgaacataagtcctgaggtattaggacgaccatactgcctctgagctgaaaacattcaaaagttcacatccctgtttgggggataccattcaccgccttcagcccagatgatactttcctttaaatctgtgtctctgtgtgtataacaaagaggaagatggaaacaatgttcatggaaactgctgttgagccccttgtcccaccactcccgccatctgctgcaggcaggaaggcatgtgagtgtacgttttcttccaggagacatcaggtccccctggattcaaattaagtgcaatattttgcaaacagctcttcttagggaaatctcctgaaggaaaaaaatgtgacagaatgttccatagtctgagagaatggaatcgttgagcatttagtacaagtccagtgtgtgtgagcgggacttaggcagctcaagcttgcttttttttttaagcgtacaattgagtggttttagtaaattcacaaacttgttcaaccatcaccactatctaattccagactcacgcttttttaaacaataaatgtcatttcatgaaatctttggtgataaagtattttggattcagagaagagctcccttaccagtcccaccctgatctcatggctgtctctcctttcattgtcagactccccctggtctaccgcgttgatgtgtatacactgatctttcaagtctgggagacagataaggaggccaggtgcaaggcagggaggcagagagaatgttgtgcttcctttagcttttgtatttcgatggccagcattaccctttacctgtgggcatcagactcagcgtgggctgagtgctgagtgtaacttacactcctaaatcaagctggggcctgggtgggcccctcttggtatctgtgaatctttccaagcaccacttcggacacaccagggattgagtgctgctgttagtttagagaaggagagatgtctaacccttgaggtgaagggctctgggagggtccaagaagacgtaggcttcattttcacaccagcccacaccattccagtgctcagcctagcaaatgtgctttaatgcacacttctcagacctgtgatccgtgtatcttctccccagtgacagaagtagagaagagaatggaaagcagcacactccgtcccctctagtctggagctgttaacagaatctgctagaaactagctttattctaacataccgtaggatctaaatcctcctacctggatcatgaattcctttgaaataattcatattttcattgactctcactaaatgtcaaataaccttgttttcacttggataggctcaacctacctggcatatttattttgcagtcttgttgaaagttcatgaaactttgtactttttaataagatgatacactcgaaggaaacttttaatctctgcagtttattctctcttaaggaataaacactcccactgtttgttctcttcaatgtgtaaggagattaaatgacattttagaaatattacaattaaaaatagtgatgtagctgtaacatatgctggaattggatatttaatttatgtttgtgtcaactataatcctttccccacccctttcatttatggtaaacatcttgggcaaacccaaagatggaaagtgcttgttgggtgggtaagcaccacctggtctctcagcaaacactcctgagtggttgaagatgctggacattggattctagcactgggtttatctggtgacatagtctcctgtgggtcttgagttggttatttcaagctcaaactctgaatatgattaaaccagaacaccccacccccaactgccaaaaaaaaaaaaaaaaaatgggaattccataatggaaacagcaaaaaagtactccgttgctgggtttggacaatgaacatgggattagtcccaagtttgtagcttggaacggtagcatttttgcctgcgtgatccttgtcagctattcacagaaggaaatcttccgaaactccgtctttcatttcagccggtgaggctgttatccttctctgtcaattagcattcatgtggttttcgctctttccagctctgtcactcttgttttcatttaaatattgccccactctgtgtttattgccttgccatttctctagcatatcaggtttaattatgggctcagtaataatgaggaactagcttccctcaggcaactaattacttttgtcttttttggtcggattgtaccaaattattttgcattgaatgggaatgtttttgcagtgaatccagatatagttgtattggtttggaaaaacatttaaatatatttattcatatgaacatgtgtgattaaacaacctattttacatatttctgtaattctgaggagtgggctgggggtaggaagaaatggcaccacttaaaattcagggcttatatgaagaggtgttttaaggttagcacatgcacaaaggaacgagttggtttaaaaagataaatcactgcaaagaatgaaattggcttattcacatcaaaactagataagatgctaaaaaaaaaagatatgaaacagaactaacctatagtttcctgaaatcagtacagtttaatttataagaagctagaaagtaatgcaccttgattgttttaggaatgatttatgtgttgcaattttaatttatttaaagcatgtctactgtgtttgtcctaagagaaatatttcaacaaaacgtgctctgtgtttaagatatgtttaggcagtagttagcaactctgaaagtagaaactggaaatgtttattgtgaggcttgttgcagaatttccattttgtgagttactacttagtttcatgtcagcctaaaattgtaaattccctgtagatcttcaccccattgtggtgtcatcaatgaatccaaagcaggtgccattatttttttaaataaacacttgatgttagctttggtgttaaataaagaggtagatttcttaaattttcacatttgttggagcccatctcagtagcaaatgtgtgtgtgtgaccaatttttttaatagattttattttttagggcactttcaggttcacagcaaaattgagcagaaggtacagagatttccctt

SEQ ID NO: 460542 - DNA, 325 bp, Homo sapiens
attactgacatttgtattgggtacagtgcagggcgtggagtttctctgagacaaacacaggaataccccgagataatgtgagcagtatctccaaagtccaggctgagtcatatggtaggtgctgtttggaatatctagcctgcctgccttgcagattcaaatgcctcgggcaggagggtgagctagctgccgatcctgctctgctcctgggtttgctgtgtggcccttggtaagtctcttcacaactcttccgtttcagccagagtgtgtaaatatgtattgtggagctttgtggtctttaatatcctgggaatgccagtaaaga

SEQ ID NO: 460543 - DNA, 6010 bp, Homo sapiens
accagaggcaacagctgcagcagccgcgccgccccctcgcccgcggctcccagggtgatcccgagcacagccggtggctcgcggcgcggcagccccagaagacgggaaagttcgcggccggagcgcggagatgccgggcagcgacacggcgctcaccgtggaccggacctactcggaccccggccggcaccaccgctgcaagagccgggtagaacgtcatgacatgaataccttaagcctgcccctgaacatacgccgaggggggtcagacaccaacctcaactttgatgtcccggatggcatcctggacttccacaaggtcaaactcactgcagacagcctgaagcaaaaaattctaaaggtaacagagcagataaaaattgagcaaacatcgcgcgatgggaatgttgcggagtatctgaaactagtgaacaacgcagacaagcagcaggcgggacgtatcaagcaagtctttgagaagaagaatcagaaatcagctcactccatcgcccagctgcagaagaagttagagcagtatcatcgaaagctcagagagatcgagcagaatggagcctctaggagctcaaaggacatttccaaagaccacctgaaggatatacatcgctctttgaaagatgcccacgtgaaatctcgaactgccccccattgcatggagagcagcaaatcgggcatgccaggggtctcacttactccacctgtgttcgttttcaataagtccagagagtttgccaacctgatccggaataagtttggcagcgccgacaacattgctcacttgaaaaattccttagaggagtttaggccagaggcgagtgccagggcctacgggggcagcgctaccatcgtgaacaaacccaagtatggcagtgatgatgaatgttcgagtggcacgtcaggctcggccgacagtaacggaaaccagtcgtttggggctggtggagccagcacactggacagccagggcaagctcgccgtgatcctggaggaactgagggagatcaaggatacccaagctcagctggctgaggacatcgaggcactgaaggtgcagtttaagagagaatatggttttatttctcagaccctgcaagaggaaagatacaggtatgagcgactggaggaccagctgcatgacctgacggacctgcatcaacatgagacagccaacctgaagcaggagctggccagcattgaggagaaggtggcctaccaggcctacgagcgctcgcgggacatccaggaagccttggaatcctgccagactcgcatttctaagctggagctccaccagcaagagcagcaagctctgcagacagacaccgtgaatgctaaagttctcctggggaggtgcatcaacgtgatcctggccttcatgactgtcatcttagtgtgtgtgtccaccatcgcgaagttcgtctcacccatgatgaagagtcgctgccacattcttggcaccttctttgccgtgactcttcttgctatattttgtaaaaactgggaccatatcctgtgtgccatagaaaggatgataataccaagatgaagccactggttcctgccttcaagttctttcaagtttttattttaaagaaaactctgtgcatactaccaaattttacagtgaatgattgtgcggactcgtgtgtaagaaaaactaggactgtgtggtgtaaataactacaattctcttaactccgtagcagttgccaactcagtccttgtacttcgttaacacgaatctgtttcagagctctcctaccttgctcactgccttaatcagaccgatttcctgcccacctgaccagcccagcgtggtaaacctctgtatattgagaccttggcataattggtgatcctgaagaaagaggtctctctcctaagtctctgtcagaattgagcttcacaattgctaatggttgttttctgtgagtcctataaaaagcaaggatatgcatgattcagggaatgaaggaatcacaggcttgggcagtgttaaacactgtggcctattgtccccgtgtgatccaccctggcttctctccagggggaccataggtcccgttcatgttactcagtgttccacagcagttcagtcgtgtatgaccctgtaacgtggaaatcttatcacacacctgttatccaacaagtctacctgaggggttttgttacactttaaatgggaaggcatagggatttatgaatggggctttcaccttctcatacccaggcaaccaacacctgattttgtctcaactggctagcaaatgcccagccttcagagtgtgcaggaatgttttcaaatccctcatcagactgtgactttaacattaatttggaatcctgtgagcactactctgaaggtttgtgttttggcaaatcttttttcttttttgagacagggctctgctaaatattgctcaggctggttgcaaactccttgcttcaagggatcctcccacctcagcctcccaagcagccgggactgcaggcacaagccaccatgcctggctgttttttggcaaatcttgattgtgataagcccccctggaggatatgattcactttatgtgattcatcttattcacaggtctgtgagggactgcaaagcttactcaggaaatgaaaacaaatgatggtcatgttgcagttttttccttgaaggacaaccgaaccatagcctctaaagttcaagtgcactgaggtgtcggaacgctgaaagcatgaggaaacgaggacgtagggtgtgactgaatggtggctagattagtgggagcagttcacctggatgaagattgagagcatcgtctttgagaagtgaaagactagcaagaataaaataaattaagtccagtgtttgagccaaggttgccacctgtctcttaacatctcactgaacataagtcctgaggtattaggacgaccatactgcctctgagctgaaaacattcaaaagttcacatccctgtttgggggataccattcaccgccttcagcccagatgatactttcctttaaatctgtgtctctgtgtgtataacaaagaggaagatggaaacaatgttcatggaaactgctgttgagccccttgtcccaccactcccgccatctgctgcaggcaggaaggcatgtgagtgtacgttttcttccaggagacatcaggtccccctggattcaaattaagtgcaatattttgcaaacagctcttcttagggaaatctcctgaaggaaaaaaatgtgacagaatgttccatagtctgagagaatggaatcgttgagcatttagtacaagtccagtgtgtgtgagcgggacttaggcagctcaagcttgcttttttttttaagcgtacaattgagtggttttagtaaattcacaaacttgttcaaccatcaccactatctaattccagactcacgcttttttaaacaataaatgtcatttcatgaaatctttggtgataaagtattttggattcagagaagagctcccttaccagtcccaccctgatctcatggctgtctctcctttcattgtcagactccccctggtctaccgcgttgatgtgtatacactgatctttcaagtctgggagacagataaggaggccaggtgcaaggcagggaggcagagagaatgttgtgcttcctttagcttttgtatttcgatggccagcattaccctttacctgtgggcatcagactcagcgtgggctgagtgctgagtgtaacttacactcctaaatcaagctggggcctgggtgggcccctcttggtatctgtgaatctttccaagcaccacttcggacacaccagggattgagtgctgctgttagtttagagaaggagagatgtctaacccttgaggtgaagggctctgggagggtccaagaagacgtaggcttcattttcacaccagcccacaccattccagtgctcagcctagcaaatgtgctttaatgcacacttctcagacctgtgatccgtgtatcttctccccagtgacagaagtagagaagagaatggaaagcagcacactccgtcccctctagtctggagctgttaacagaatctgctagaaactagctttattctaacataccgtaggatctaaatcctcctacctggatcatgaattcctttgaaataattcatattttcattgactctcactaaatgtcaaataaccttgttttcacttggataggctcaacctacctggcatatttattttgcagtcttgttgaaagttcatgaaactttgtactttttaataagatgatacactcgaaggaaacttttaatctctgcagtttattctctcttaaggaataaacactcccactgtttgttctcttcaatgtgtaaggagattaaatgacattttagaaatattacaattaaaaatagtgatgtagctgtaacatatgctggaattggatatttaatttatgtttgtgtcaactataatcctttccccacccctttcatttatggtaaacatcttgggcaaacccaaagatggaaagtgcttgttgggtgggtaagcaccacctggtctctcagcaaacactcctgagtggttgaagatgctggacattggattctagcactgggtttatctggtgacatagtctcctgtgggtcttgagttggttatttcaagctcaaactctgaatatgattaaaccagaacaccccacccccaactgccaaaaaaaaaaaaaaaaaatgggaattccataatggaaacagcaaaaaagtactccgttgctgggtttggacaatgaacatgggattagtcccaagtttgtagcttggaacggtagcatttttgcctgcgtgatccttgtcagctattcacagaaggaaatcttccgaaactccgtctttcatttcagccggtgaggctgttatccttctctgtcaattagcattcatgtggttttcgctctttccagctctgtcactcttgttttcatttaaatattgccccactctgtgtttattgccttgccatttctctagcatatcaggtttaattatgggctcagtaataatgaggaactagcttccctcaggcaactaattacttttgtcttttttggtcggattgtaccaaattattttgcattgaatgggaatgtttttgcagtgaatccagatatagttgtattggtttggaaaaacatttaaatatatttattcatatgaacatgtgtgattaaacaacctattttacatatttctgtaattctgaggagtgggctgggggtaggaagaaatggcaccacttaaaattcagggcttatatgaagaggtgttttaaggttagcacatgcacaaaggaacgagttggtttaaaaagataaatcactgcaaagaatgaaattggcttattcacatcaaaactagataagatgctaaaaaaaaaagatatgaaacagaactaacctatagtttcctgaaatcagtacagtttaatttataagaagctagaaagtaatgcaccttgattgttttaggaatgatttatgtgttgcaattttaatttatttaaagcatgtctactgtgtttgtcctaagagaaatatttcaacaaaacgtgctctgtgtttaagatatgtttaggcagtagttagcaactctgaaagtagaaactggaaatgtttattgtgaggcttgttgcagaatttccattttgtgagttactacttagtttcatgtcagcctaaaattgtaaattccctgtagatcttcaccccattgtggtgtcatcaatgaatccaaagcaggtgccattatttttttaaataaacacttgatgttagctttggtgttaaataaagaggtagatttcttaaattttcacatttgttggagcccatctcagtagcaaatgtgtgtgtgtgaccaatttttttaatagattttattttttagggcactttcaggttcacagcaaaattgagcagaaggtacagagatttccctt

SEQ ID NO: 460544 - DNA, 5636 bp, Homo sapiens
cgactttagctcggtaccccgtgctgaagaatgttgcggagtatctgaaactagtgaacaacgcagacaagcagcaggcgggacgtatcaagcaagtctttgagaagaagaatcagaaatcagctcactccatcgcccagctgcagaagaagttagagcagtatcatcgaaagctcagagagatcgagcagaatggagcctctaggagctcaaaggacatttccaaagaccacctgaaggatatacatcgctctttgaaagatgcccacgtgaaatctcgaactgccccccattgcatggagagcagcaaatcgggcatgccaggggtctcacttactccacctgtgttcgttttcaataagtccagagagtttgccaacctgatccggaataagtttggcagcgccgacaacattgctcacttgaaaaattccttagaggagtttaggccagaggcgagtgccagggcctacgggggcagcgctaccatcgtgaacaaacccaagtatggcagtgatgatgaatgttcgagtggcacgtcaggctcggccgacagtaacggaaaccagtcgtttggggctggtggagccagcacactggacagccagggcaagctcgccgtgatcctggaggaactgagggagatcaaggatacccaagctcagctggctgaggacatcgaggcactgaaggtgcagtttaagagagaatatggttttatttctcagaccctgcaagaggaaagatacaggtatgagcgactggaggaccagctgcatgacctgacggacctgcatcaacatgagacagccaacctgaagcaggagctggccagcattgaggagaaggtggcctaccaggcctacgagcgctcgcgggacatccaggaagccttggaatcctgccagactcgcatttctaagctggagctccaccagcaagagcagcaagctctgcagacagacaccgtgaatgctaaagttctcctggggaggtgcatcaacgtgatcctggccttcatgactgtcatcttagtgtgtgtgtccaccatcgcgaagttcgtctcacccatgatgaagagtcgctgccacattcttggcaccttctttgccgtgactcttcttgctatattttgtaaaaactgggaccatatcctgtgtgccatagaaaggatgataataccaagatgaagccactggttcctgccttcaagttctttcaagtttttattttaaagaaaactctgtgcatactaccaaattttacagtgaatgattgtgcggactcgtgtgtaagaaaaactaggactgtgtggtgtaaataactacaattctcttaactccgtagcagttgccaactcagtccttgtacttcgttaacacgaatctgtttcagagctctcctaccttgctcactgccttaatcagaccgatttcctgcccacctgaccagcccagcgtggtaaacctctgtatattgagaccttggcataattggtgatcctgaagaaagaggtctctctcctaagtctctgtcagaattgagcttcacaattgctaatggttgttttctgtgagtcctataaaaagcaaggatatgcatgattcagggaatgaaggaatcacaggcttgggcagtgttaaacactgtggcctattgtccccgtgtgatccaccctggcttctctccagggggaccataggtcccgttcatgttactcagtgttccacagcagttcagtcgtgtatgaccctgtaacgtggaaatcttatcacacacctgttatccaacaagtctacctgaggggttttgttacactttaaatgggaaggcatagggatttatgaatggggctttcaccttctcatacccaggcaaccaacacctgattttgtctcaactggctagcaaatgcccagccttcagagtgtgcaggaatgttttcaaatccctcatcagactgtgactttaacattaatttggaatcctgtgagcactactctgaaggtttgtgttttggcaaatcttttttcttttttgagacagggctctgctaaatattgctcaggctggttgcaaactccttgcttcaagggatcctcccacctcagcctcccaagcagccgggactgcaggcacaagccaccatgcctggctgttttttggcaaatcttgattgtgataagcccccctggaggatatgattcactttatgtgattcatcttattcacaggtctgtgagggactgcaaagcttactcaggaaatgaaaacaaatgatggtcatgttgcagttttttccttgaaggacaaccgaaccatagcctctaaagttcaagtgcactgaggtgtcggaacgctgaaagcatgaggaaacgaggacgtagggtgtgactgaatggtggctagattagtgggagcagttcacctggatgaagattgagagcatcgtctttgagaagtgaaagactagcaagaataaaataaattaagtccagtgtttgagccaaggttgccacctgtctcttaacatctcactgaacataagtcctgaggtattaggacgaccatactgcctctgagctgaaaacattcaaaagttcacatccctgtttgggggataccattcaccgccttcagcccagatgatactttcctttaaatctgtgtctctgtgtgtataacaaagaggaagatggaaacaatgttcatggaaactgctgttgagccccttgtcccaccactcccgccatctgctgcaggcaggaaggcatgtgagtgtacgttttcttccaggagacatcaggtccccctggattcaaattaagtgcaatattttgcaaacagctcttcttagggaaatctcctgaaggaaaaaaatgtgacagaatgttccatagtctgagagaatggaatcgttgagcatttagtacaagtccagtgtgtgtgagcgggacttaggcagctcaagcttgcttttttttttaagcgtacaattgagtggttttagtaaattcacaaacttgttcaaccatcaccactatctaattccagactcacgcttttttaaacaataaatgtcatttcatgaaatctttggtgataaagtattttggattcagagaagagctcccttaccagtcccaccctgatctcatggctgtctctcctttcattgtcagactccccctggtctaccgcgttgatgtgtatacactgatctttcaagtctgggagacagataaggaggccaggtgcaaggcagggaggcagagagaatgttgtgcttcctttagcttttgtatttcgatggccagcattaccctttacctgtgggcatcagactcagcgtgggctgagtgctgagtgtaacttacactcctaaatcaagctggggcctgggtgggcccctcttggtatctgtgaatctttccaagcaccacttcggacacaccagggattgagtgctgctgttagtttagagaaggagagatgtctaacccttgaggtgaagggctctgggagggtccaagaagacgtaggcttcattttcacaccagcccacaccattccagtgctcagcctagcaaatgtgctttaatgcacacttctcagacctgtgatccgtgtatcttctccccagtgacagaagtagagaagagaatggaaagcagcacactccgtcccctctagtctggagctgttaacagaatctgctagaaactagctttattctaacataccgtaggatctaaatcctcctacctggatcatgaattcctttgaaataattcatattttcattgactctcactaaatgtcaaataaccttgttttcacttggataggctcaacctacctggcatatttattttgcagtcttgttgaaagttcatgaaactttgtactttttaataagatgatacactcgaaggaaacttttaatctctgcagtttattctctcttaaggaataaacactcccactgtttgttctcttcaatgtgtaaggagattaaatgacattttagaaatattacaattaaaaatagtgatgtagctgtaacatatgctggaattggatatttaatttatgtttgtgtcaactataatcctttccccacccctttcatttatggtaaacatcttgggcaaacccaaagatggaaagtgcttgttgggtgggtaagcaccacctggtctctcagcaaacactcctgagtggttgaagatgctggacattggattctagcactgggtttatctggtgacatagtctcctgtgggtcttgagttggttatttcaagctcaaactctgaatatgattaaaccagaacaccccacccccaactgccaaaaaaaaaaaaaaaaaatgggaattccataatggaaacagcaaaaaagtactccgttgctgggtttggacaatgaacatgggattagtcccaagtttgtagcttggaacggtagcatttttgcctgcgtgatccttgtcagctattcacagaaggaaatcttccgaaactccgtctttcatttcagccggtgaggctgttatccttctctgtcaattagcattcatgtggttttcgctctttccagctctgtcactcttgttttcatttaaatattgccccactctgtgtttattgccttgccatttctctagcatatcaggtttaattatgggctcagtaataatgaggaactagcttccctcaggcaactaattacttttgtcttttttggtcggattgtaccaaattattttgcattgaatgggaatgtttttgcagtgaatccagatatagttgtattggtttggaaaaacatttaaatatatttattcatatgaacatgtgtgattaaacaacctattttacatatttctgtaattctgaggagtgggctgggggtaggaagaaatggcaccacttaaaattcagggcttatatgaagaggtgttttaaggttagcacatgcacaaaggaacgagttggtttaaaaagataaatcactgcaaagaatgaaattggcttattcacatcaaaactagataagatgctaaaaaaaaaagatatgaaacagaactaacctatagtttcctgaaatcagtacagtttaatttataagaagctagaaagtaatgcaccttgattgttttaggaatgatttatgtgttgcaattttaatttatttaaagcatgtctactgtgtttgtcctaagagaaatatttcaacaaaacgtgctctgtgtttaagatatgtttaggcagtagttagcaactctgaaagtagaaactggaaatgtttattgtgaggcttgttgcagaatttccattttgtgagttactacttagtttcatgtcagcctaaaattgtaaattccctgtagatcttcaccccattgtggtgtcatcaatgaatccaaagcaggtgccattatttttttaaataaacacttgatgttagctttggtgttaaataaagaggtagatttcttaaattttcacatttgttggagcccatctcagtagcaaatgtgtgtgtgtgaccaatttttttaatagattttattttttagggcactttcaggttcacagcaaaattgagcagaaggtacagagatttccctt

SEQ ID NO: 460545 - DNA, 3575 bp, Homo sapiens
attactgacatttgtattgggtacagtgcagggcgtggagtttctctgagacaaacacaggaataccccgagataatgtgagcagtatctccaaagtccaggctgagtcatatggtaggtgctgtttggaatatctagcctgcctgccttgcagattcaaatgcctcgggcaggagggtgagctagctgccgatcctgctctgaaatgaaaacaaatgatggtcatgttgcagttttttccttgaaggacaaccgaaccatagcctctaaagttcaagtgcactgaggtgtcggaacgctgaaagcatgaggaaacgaggacgtagggtgtgactgaatggtggctagattagtgggagcagttcacctggatgaagattgagagcatcgtctttgagaagtgaaagactagcaagaataaaataaattaagtccagtgtttgagccaaggttgccacctgtctcttaacatctcactgaacataagtcctgaggtattaggacgaccatactgcctctgagctgaaaacattcaaaagttcacatccctgtttgggggataccattcaccgccttcagcccagatgatactttcctttaaatctgtgtctctgtgtgtataacaaagaggaagatggaaacaatgttcatggaaactgctgttgagccccttgtcccaccactcccgccatctgctgcaggcaggaaggcatgtgagtgtacgttttcttccaggagacatcaggtccccctggattcaaattaagtgcaatattttgcaaacagctcttcttagggaaatctcctgaaggaaaaaaatgtgacagaatgttccatagtctgagagaatggaatcgttgagcatttagtacaagtccagtgtgtgtgagcgggacttaggcagctcaagcttgcttttttttttaagcgtacaattgagtggttttagtaaattcacaaacttgttcaaccatcaccactatctaattccagactcacgcttttttaaacaataaatgtcatttcatgaaatctttggtgataaagtattttggattcagagaagagctcccttaccagtcccaccctgatctcatggctgtctctcctttcattgtcagactccccctggtctaccgcgttgatgtgtatacactgatctttcaagtctgggagacagataaggaggccaggtgcaaggcagggaggcagagagaatgttgtgcttcctttagcttttgtatttcgatggccagcattaccctttacctgtgggcatcagactcagcgtgggctgagtgctgagtgtaacttacactcctaaatcaagctggggcctgggtgggcccctcttggtatctgtgaatctttccaagcaccacttcggacacaccagggattgagtgctgctgttagtttagagaaggagagatgtctaacccttgaggtgaagggctctgggagggtccaagaagacgtaggcttcattttcacaccagcccacaccattccagtgctcagcctagcaaatgtgctttaatgcacacttctcagacctgtgatccgtgtatcttctccccagtgacagaagtagagaagagaatggaaagcagcacactccgtcccctctagtctggagctgttaacagaatctgctagaaactagctttattctaacataccgtaggatctaaatcctcctacctggatcatgaattcctttgaaataattcatattttcattgactctcactaaatgtcaaataaccttgttttcacttggataggctcaacctacctggcatatttattttgcagtcttgttgaaagttcatgaaactttgtactttttaataagatgatacactcgaaggaaacttttaatctctgcagtttattctctcttaaggaataaacactcccactgtttgttctcttcaatgtgtaaggagattaaatgacattttagaaatattacaattaaaaatagtgatgtagctgtaacatatgctggaattggatatttaatttatgtttgtgtcaactataatcctttccccacccctttcatttatggtaaacatcttgggcaaacccaaagatggaaagtgcttgttgggtgggtaagcaccacctggtctctcagcaaacactcctgagtggttgaagatgctggacattggattctagcactgggtttatctggtgacatagtctcctgtgggtcttgagttggttatttcaagctcaaactctgaatatgattaaaccagaacaccccacccccaactgccaaaaaaaaaaaaaaaaaatgggaattccataatggaaacagcaaaaaagtactccgttgctgggtttggacaatgaacatgggattagtcccaagtttgtagcttggaacggtagcatttttgcctgcgtgatccttgtcagctattcacagaaggaaatcttccgaaactccgtctttcatttcagccggtgaggctgttatccttctctgtcaattagcattcatgtggttttcgctctttccagctctgtcactcttgttttcatttaaatattgccccactctgtgtttattgccttgccatttctctagcatatcaggtttaattatgggctcagtaataatgaggaactagcttccctcaggcaactaattacttttgtcttttttggtcggattgtaccaaattattttgcattgaatgggaatgtttttgcagtgaatccagatatagttgtattggtttggaaaaacatttaaatatatttattcatatgaacatgtgtgattaaacaacctattttacatatttctgtaattctgaggagtgggctgggggtaggaagaaatggcaccacttaaaattcagggcttatatgaagaggtgttttaaggttagcacatgcacaaaggaacgagttggtttaaaaagataaatcactgcaaagaatgaaattggcttattcacatcaaaactagataagatgctaaaaaaaaaagatatgaaacagaactaacctatagtttcctgaaatcagtacagtttaatttataagaagctagaaagtaatgcaccttgattgttttaggaatgatttatgtgttgcaattttaatttatttaaagcatgtctactgtgtttgtcctaagagaaatatttcaacaaaacgtgctctgtgtttaagatatgtttaggcagtagttagcaactctgaaagtagaaactggaaatgtttattgtgaggcttgttgcagaatttccattttgtgagttactacttagtttcatgtcagcctaaaattgtaaattccctgtagatcttcaccccattgtggtgtcatcaatgaatccaaagcaggtgccattatttttttaaataaacacttgatgttagctttggtgttaaataaagaggtagatttcttaaattttcacatttgttggagcccatctcagtagcaaatgtgtgtgtgtgaccaatttttttaatagattttattttttagggcactttcaggttcacagcaaaattgagcagaaggtacagagatttccctt

SEQ ID NO: 460546 - DNA, 3869 bp, Homo sapiens
  misc_feature (3854)..(3854): n is a, c, g, or t
accagaggcaacagctgcagcagccgcgccgccccctcgcccgcggctcccagggtgatcccgagcacagccggtggctcgcggcgcggcagccccagaagacgggaaagttcgcggccggagcgcggagatgccgggcagcgacacggcgctcaccgtggaccggacctactcggaccccggccggcaccaccgctgcaagagccgggtagaacgtcatgacatgaataccttaagcctgcccctgaacatacgccgaggggggtcagacaccaacctcaactttgatgtcccggatggcatcctggacttccacaaggtcaaactcactgcagacagcctgaagcaaaaaattctaaaggtaacagagcagataaaaattgagcaaacatcgcgcgatgggaatgttgcggagtatctgaaactagtgaacaacgcagacaagcagcaggcgggacgtatcaagcaagtctttgagaagaagaatcagaaatcagctcactccatcgcccagctgcagaagaagttagagcagtatcatcgaaagctcagagagatcgagcagaatggagcctctaggagctcaaaggacatttccaaagaccacctgaaggatatacatcgctctttgaaagatgcccacgtgaaatctcgaactgccccccattgcatggagagcagcaaatcgggcatgccaggggtctcacttactccacctgtgttcgttttcaataagtccagagagtttgccaacctgatccggaataagtttggcagcgccgacaacattgctcacttgaaaaattccttagaggagtttaggccagaggcgagtgccagggcctacgggggcagcgctaccatcgtgaacaaacccaagtatggcagtgatgatgaatgttcgagtggcacgtcaggctcggccgacagtaacggaaaccagtcgtttggggctggtggagccagcacactggacagccagggcaagctcgccgtgatcctggaggaactgagggagatcaaggatacccaagctcagctggctgaggacatcgaggcactgaaggtgcagtttaagagagaatatggttttatttctcagaccctgcaagaggaaagatacaggtatgagcgactggaggaccagctgcatgacctgacggacctgcatcaacatgagacagccaacctgaagcaggagctggccagcattgaggagaaggtggcctaccaggcctacgagcgctcgcgggacatccaggaagccttggaatcctgccagactcgcatttctaagctggagctccaccagcaagagcagcaagctctgcagacagacaccgtgaatgctaaagttctcctggggaggtgcatcaacgtgatcctggccttcatgactgtcatcttagtgtgtgtgtccaccatcgcgaagttcgtctcacccatgatgaagagtcgctgccacattcttggcaccttctttgccgtgactcttcttgctatattttgtaaaaactgggaccatatcctgtgtgccatagaaaggatgataataccaagatgaagccactggttcctgccttcaagttctttcaagtttttattttaaagaaaactctgtgcatactaccaaattttacagtgaatgattgtgcggactcgtgtgtaagaaaaactaggactgtgtggtgtaaataactacaattctcttaactccgtagcagttgccaactcagtccttgtacttcgttaacacgaatctgtttcagagctctcctaccttgctcactgccttaatcagaccgatttcctgcccacctgaccagcccagcgtggtaaacctctgtatattgagaccttggcataattggtgatcctgaagaaagaggtctctctcctaagtctctgtcagaattgagcttcacaattgctaatggttgttttctgtgagtcctataaaaagcaaggatatgcatgattcagggaatgaaggaatcacaggcttgggcagtgttaaacactgtggcctattgtccccgtgtgatccaccctggcttctctccagggggaccataggtcccgttcatgttactcagtgttccacagcagttcagtcgtgtatgaccctgtaacgtggaaatcttatcacacacctgttatccaacaagtctacctgaggggttttgttacactttaaatgggaaggcatagggatttatgaatggggctttcaccttctcatacccaggcaaccaacacctgattttgtctcaactggctagcaaatgcccagccttcagagtgtgcaggaatgttttcaaatccctcatcagactgtgactttaacattaatttggaatcctgtgagcactactctgaaggtttgtgttttggcaaatcttttttcttttttgagacagggctctgctaaatattgctcaggctggttgcaaactccttgcttcaagggatcctcccacctcagcctcccaagcagccgggactgcaggcacaagccaccatgcctggctgttttttggcaaatcttgattgtgataagcccccctggaggatatgattcactttatgtgattcatcttattcacaggtctgtgagggactgcaaagcttactcaggaaatgaaaacaaatgatggtcatgttgcagttttttccttgaaggacaaccgaaccatagcctctaaagttcaagtgcactgaggtgtcggaacgctgaaagcatgaggaaacgaggacgtagggtgtgactgaatggtggctagattagtgggagcagttcacctggatgaagattgagagcatcgtctttgagaagtgaaagactagcaagaataaaataaattaagtccagtgtttgagccaaggttgccacctgtctcttaacatctcactgaacataagtcctgaggtattaggacgaccatactgcctctgagctgaaaacattcaaaagttcacatccctgtttgggggataccattcaccgccttcagcccagatgatactttcctttaaatctgtgtctctgtgtgtataacaaagaggaagatggaaacaatgttcatggaaactgctgttgagccccttgtcccaccactcccgccatctgctgcaggcaggaaggcatgtgagtgtacgttttcttccaggagacatcaggtccccctggattcaaattaagtgcaatattttgcaaacagctcttcttagggaaatctcctgaaggaaaaaaatgtgacagaatgttccatagtctgagagaatggaatcgttgagcatttagtacaagtccagtgtgtgtgagcgggacttaggcagctcaagcttgcttttttttttaagcgtacaattgagtggttttagtaaattcacaaacttgttcaaccatcaccactatctaattccagactcacgcttttttaaacaataaatgtcatttcatgaaatctttggtgataaagtattttggattcagagaagagctcccttaccagtcccaccctgatctcatggctgtctctcctttcattgtcagactccccctggtctaccgcgttgatgtgtatacactgatctttcaagtctgggagacagataaggaggccaggtgcaaggcagggaggcagagagaatgttgtgcttcctttagcttagatatcgtggcacataaccttactgtgggtcgaccacggggcgaggtggggatacacctaacaagtgggcggtggcccgcgttggatcccagcctcggccagcgagcggctaaagagtccccagagtgcgccgctccccccacgcaagaccgaggtccattgactaactaattaatatangcgtgcagccagccg

SEQ ID NO: 460547 - DNA, 3418 bp, Homo sapiens
  misc_feature (3394)..(3394): n is a, c, g, or t
accagaggcaacagctgcagcagccgcgccgccccctcgcccgcggctcccagggtgatcccgagcacagccggtggctcgcggcgcggcagccccagaagacgggaaagttcgcggccggagcgcggagatgccgggcagcgacacggcgctcaccgtggaccggacctactcggaccccggccggcaccaccgctgcaagagccgggtagaacgtcatgacatgaataccttaagcctgcccctgaacatacgccgaggggggtcagacaccaacctcaactttgatgtcccggatggcatcctggacttccacaaggtcaaactcactgcagacagcctgaagcaaaaaattctaaaggtaacagagcagataaaaattgagcaaacatcgcgcgatgggaatgttgcggagtatctgaaactagtgaacaacgcagacaagcagcaggcgggacgtatcaagcaagtctttgagaagaagaatcagaaatcagctcactccatcgcccagctgcagaagaagttagagcagtatcatcgaaagctcagagagatcgagcagaatggagcctctaggagctcaaaggacatttccaaagaccacctgaaggatatacatcgctctttgaaagatgcccacgtgaaatctcgaactgccccccattgcatggagagcagcaaatcgggcatgccaggggtctcacttactccacctgtgttcgttttcaataagtccagagagtttgccaacctgatccggaataagtttggcagcgccgacaacattgctcacttgaaaaattccttagaggagtttaggccagaggcgagtgccagggcctacgggggcagcgctaccatcgtgaacaaacccaagtatggcagtgatgatgaatgttcgagtggcacgtcaggctcggccgacagtaacggaaaccagtcgtttggggctggtggagccagcacactggacagccagggcaagctcgccgtgatcctggaggaactgagggagatcaaggatacccaagctcagctggctgaggacatcgaggcactgaaggtgcagtttaagagagaatatggttttatttctcagaccctgcaagaggaaagatacaggtatgagcgactggaggaccagctgcatgacctgacggacctgcatcaacatgagacagccaacctgaagcaggagctggccagcattgaggagaaggtggcctaccaggcctacgagcgctcgcgggacatccaggaagccttggaatcctgccagactcgcatttctaagctggagctccaccagcaagagcagcaagctctgcagacagacaccgtgaatgctaaagttctcctggggaggtgcatcaacgtgatcctggccttcatgactgtcatcttagtgtgtgtgtccaccatcgcgaagttcgtctcacccatgatgaagagtcgctgccacattcttggcaccttctttgccgtgactcttcttgctatattttgtaaaaactgggaccatatcctgtgtgccatagaaaggatgataataccaagatgaagccactggttcctgccttcaagttctttcaagtttttattttaaagaaaactctgtgcatactaccaaattttacagtgaatgattgtgcggactcgtgtgtaagaaaaactaggactgtgtggtgtaaataactacaattctcttaactccgtagcagttgccaactcagtccttgtacttcgttaacacgaatctgtttcagagctctcctaccttgctcactgccttaatcagaccgatttcctgcccacctgaccagcccagcgtggtaaacctctgtatattgagaccttggcataattggtgatcctgaagaaagaggtctctctcctaagtctctgtcagaattgagcttcacaattgctaatggttgttttctgtgagtcctataaaaagcaaggatatgcatgattcagggaatgaaggaatcacaggcttgggcagtgttaaacactgtggcctattgtccccgtgtgatccaccctggcttctctccagggggaccataggtcccgttcatgttactcagtgttccacagcagttcagtcgtgtatgaccctgtaacgtggaaatcttatcacacacctgttatccaacaagtctacctgaggggttttgttacactttaaatgggaaggcatagggatttatgaatggggctttcaccttctcatacccaggcaaccaacacctgattttgtctcaactggctagcaaatgcccagccttcagagtgtgcaggaatgttttcaaatccctcatcagactgtgactttaacattaatttggaatcctgtgagcactactctgaaggtttgtgttttggcaaatcttttttcttttttgagacagggctctgctaaatattgctcaggctggttgcaaactccttgcttcaagggatcctcccacctcagcctcccaagcagccgggactgcaggcacaagccaccatgcctggctgttttttggcaaatcttgattgtgataagcccccctggaggatatgattcactttatgtgattcatcttattcacaggtctgtgagggactgcaaagcttactcaggaaatgaaaacaaatgatggtcatgttgcagttttttccttgaaggacaaccgaaccatagcctctaaagttcaagtgcactgaggtgtcggaacgctgaaagcatgaggaaacgaggacgtagggtgtgactgaatggtggctagattagtgggagcagttcacctggatgaagattgagagcatcgtctttgagaagtgaaagactagcaagaataaaataaattaagtccagtgtttgagccaaggttgccacctgtctcttaacatctcactgaacataagtcctgaggtattaggacgaccatactgcctctgagctgaaaacattcaaaagttcacatccctgtttgggggataccattcaccgccttcagcccagatgatactttcctttaaatctgtgtctctgtgtgtataacaaagaggaagatggaaacaatgttcatggaaactgctgttgagccccttgtcccaccactcccgccatctgctgcaggcaggaaggcatgtgagtgtacgttttcttccaggatcaggcccctggattcattagttgcatattgcaacagtctctaggaatccgtacgaccaatgacgagttcctgctgaaaggatgtgacttgcagcccggtgctacggatgagcaccgctcccaacggtgtaacacaactgcacccattacagccgttacagtcaccggaatgggaaccctccctggttgcccagttccataggtgatctccagcgttttgtnccagaatacacaacatcgacgacg

SEQ ID NO: 460548 - DNA, 4458 bp, Homo sapiens
attactgacatttgtattgggtacagtgcagggcgtggagtttctctgagacaaacacaggaataccccgagataatgtgagcagtatctccaaagtccaggctgagtcatatggtaggtgctgtttggaatatctagcctgcctgccttgcagattcaaatgcctcgggcaggagggtgagctagctgccgatcctgctctgctcctgggtttgctgtgtggcccttggtagaacgtcatgacatgaataccttaagcctgcccctgaacatacgccgaggggggtcagacaccaacctcaactttgatgtcccggatggcatcctggacttccacaaggtcaaactcactgcagacagcctgaagcaaaaaattctaaaggtaacagagcagataaaaattgagcaaacatcgcgcgatgggaatgttgcggagtatctgaaactagtgaacaacgcagacaagcagcaggcgggacgtatcaagcaagtctttgagaagaagaatcagaaatcagctcactccatcgcccagctgcagaagaagttagagcagtatcatcgaaagctcagagagatcgagcagaatggagcctctaggagctcaaaggacatttccaaagaccacctgaaggatatacatcgctctttgaaagatgcccacgtgaaatctcgaactgccccccattgcatggagagcagcaaatcgggcatgccaggggtctcacttactccacctgtgttcgttttcaataagtccagagagtttgccaacctgatccggaataagtttggcagcgccgacaacattgctcacttgaaaaattccttagaggagtttaggccagaggcgagtgccagggcctacgggggcagcgctaccatcgtgaacaaacccaagtatggcagtgatgatgaatgttcgagtggcacgtcaggctcggccgacagtaacggaaaccagtcgtttggggctggtggagccagcacactggacagccagggcaagctcgccgtgatcctggaggaactgagggagatcaaggatacccaagctcagctggctgaggacatcgaggcactgaaggtgcagtttaagagagaatatggttttatttctcagaccctgcaagaggaaagatacaggtatgagcgactggaggaccagctgcatgacctgacggacctgcatcaacatgagacagccaacctgaagcaggagctggccagcattgaggagaaggtggcctaccaggcctacgagcgctcgcgggacatccaggaagccttggaatcctgccagactcgcatttctaagctggagctccaccagcaagagcagcaagctctgcagacagacaccgtgaatgctaaagttctcctggggaggtgcatcaacgtgatcctggccttcatgactgtcatcttagtgtgtgtgtccaccatcgcgaagttcgtctcacccatgatgaagagtcgctgccacattcttggcaccttctttgccgtgactcttcttgctatattttgtaaaaactgggaccatatcctgtgtgccatagaaaggatgataataccaagatgaagccactggttcctgccttcaagttctttcaagtttttattttaaagaaaactctgtgcatactaccaaattttacagtgaatgattgtgcggactcgtgtgtaagaaaaactaggactgtgtggtgtaaataactacaattctcttaactccgtagcagttgccaactcagtccttgtacttcgttaacacgaatctgtttcagagctctcctaccttgctcactgccttaatcagaccgatttcctgcccacctgaccagcccagcgtggtaaacctctgtatattgagaccttggcataattggtgatcctgaagaaagaggtctctctcctaagtctctgtcagaattgagcttcacaattgctaatggttgttttctgtgagtcctataaaaagcaaggatatgcatgattcagggaatgaaggaatcacaggcttgggcagtgttaaacactgtggcctattgtccccgtgtgatccaccctggcttctctccagggggaccataggtcccgttcatgttactcagtgttccacagcagttcagtcgtgtatgaccctgtaacgtggaaatcttatcacacacctgttatccaacaagtctacctgaggggttttgttacactttaaatgggaaggcatagggatttatgaatggggctttcaccttctcatacccaggcaaccaacacctgattttgtctcaactggctagcaaatgcccagccttcagagtgtgcaggaatgttttcaaatccctcatcagactgtgactttaacattaatttggaatcctgtgagcactactctgaaggtttgtgttttggcaaatcttttttcttttttgagacagggctctgctaaatattgctcaggctggttgcaaactccttgcttcaagggatcctcccacctcagcctcccaagcagccgggactgcaggcacaagccaccatgcctggctgttttttggcaaatcttgattgtgataagcccccctggaggatatgattcactttatgtgattcatcttattcacaggtctgtgagggactgcaaagcttactcaggaaatgaaaacaaatgatggtcatgttgcagttttttccttgaaggacaaccgaaccatagcctctaaagttcaagtgcactgaggtgtcggaacgctgaaagcatgaggaaacgaggacgtagggtgtgactgaatggtggctagattagtgggagcagttcacctggatgaagattgagagcatcgtctttgagaagtgaaagactagcaagaataaaataaattaagtccagtgtttgagccaaggttgccacctgtctcttaacatctcactgaacataagtcctgaggtattaggacgaccatactgcctctgagctgaaaacattcaaaagttcacatccctgtttgggggataccattcaccgccttcagcccagatgatactttcctttaaatctgtgtctctgtgtgtataacaaagaggaagatggaaacaatgttcatggaaactgctgttgagccccttgtcccaccactcccgccatctgctgcaggcaggaaggcatgtgagtgtacgttttcttccaggagacatcaggtccccctggattcaaattaagtgcaatattttgcaaacagctcttcttagggaaatctcctgaaggaaaaaaatgtgacagaatgttccatagtctgagagaatggaatcgttgagcatttagtacaagtccagtgtgtgtgagcgggacttaggcagctcaagcttgcttttttttttaagcgtacaattgagtggttttagtaaattcacaaacttgttcaaccatcaccactatctaattccagactcacgcttttttaaacaataaatgtcatttcatgaaatctttggtgataaagtattttggattcagagaagagctcccttaccagtcccaccctgatctcatggctgtctctcctttcattgtcagactccccctggtctaccgcgttgatgtgtatacactgatctttcaagtctgggagacagataaggaggccaggtgcaaggcagggaggcagagagaatgttgtgcttcctttagcttttgtatttcgatggccagcattaccctttacctgtgggcatcagactcagcgtgggctgagtgctgagtgtaacttacactcctaaatcaagctggggcctgggtgggcccctcttggtatctgtgaatctttccaagcaccacttcggacacaccagggattgagtgctgctgttagtttagagaaggagagatgtctaacccttgaggtgaagggctctgggagggtccaagaagacgtaggcttcattttcacaccagcccacaccattccagtgctcagcctagcaaatgtgctttaatgcacacttctcagacctgtgatccgtgtatcttctccccagtgacagaagtagagaagagaatggaaagcagcacactccgtcccctctagtctggagctgttaacagaatctgctagaaactagctttattctaacataccgtaggatctaaatcctcctacctggatcatgaattcctttgaaataattcatattttcattgactctcactaaatgtcaaataaccttgttttcacttggataggctcaacctacctggcatatttattttgcagtcttgttgaaagttcatgaaactttgtactttttaataagatgatacactcgaaggaaacttttaatctctgcagtttattctctcttaaggaataaacactcccactgtttgttctcttcaatgtgtaaggagattaaatgacattttagaaatattacaattaaaaatagtgatgtagctgt

SEQ ID NO: 460549 - DNA, 5770 bp, Homo sapiens
ggggtgatctagaggatcccaaatctctcatgggcacctcaactttgatgtcccggatggcatcctggacttccacaaggtcaaactcactgcagacagcctgaagcaaaaaattctaaaggtaacagagcagataaaaattgagcaaacatcgcgcgatgggaatgttgcggagtatctgaaactagtgaacaacgcagacaagcagcaggcgggacgtatcaagcaagtctttgagaagaagaatcagaaatcagctcactccatcgcccagctgcagaagaagttagagcagtatcatcgaaagctcagagagatcgagcagaatggagcctctaggagctcaaaggacatttccaaagaccacctgaaggatatacatcgctctttgaaagatgcccacgtgaaatctcgaactgccccccattgcatggagagcagcaaatcgggcatgccaggggtctcacttactccacctgtgttcgttttcaataagtccagagagtttgccaacctgatccggaataagtttggcagcgccgacaacattgctcacttgaaaaattccttagaggagtttaggccagaggcgagtgccagggcctacgggggcagcgctaccatcgtgaacaaacccaagtatggcagtgatgatgaatgttcgagtggcacgtcaggctcggccgacagtaacggaaaccagtcgtttggggctggtggagccagcacactggacagccagggcaagctcgccgtgatcctggaggaactgagggagatcaaggatacccaagctcagctggctgaggacatcgaggcactgaaggtgcagtttaagagagaatatggttttatttctcagaccctgcaagaggaaagatacaggtatgagcgactggaggaccagctgcatgacctgacggacctgcatcaacatgagacagccaacctgaagcaggagctggccagcattgaggagaaggtggcctaccaggcctacgagcgctcgcgggacatccaggaagccttggaatcctgccagactcgcatttctaagctggagctccaccagcaagagcagcaagctctgcagacagacaccgtgaatgctaaagttctcctggggaggtgcatcaacgtgatcctggccttcatgactgtcatcttagtgtgtgtgtccaccatcgcgaagttcgtctcacccatgatgaagagtcgctgccacattcttggcaccttctttgccgtgactcttcttgctatattttgtaaaaactgggaccatatcctgtgtgccatagaaaggatgataataccaagatgaagccactggttcctgccttcaagttctttcaagtttttattttaaagaaaactctgtgcatactaccaaattttacagtgaatgattgtgcggactcgtgtgtaagaaaaactaggactgtgtggtgtaaataactacaattctcttaactccgtagcagttgccaactcagtccttgtacttcgttaacacgaatctgtttcagagctctcctaccttgctcactgccttaatcagaccgatttcctgcccacctgaccagcccagcgtggtaaacctctgtatattgagaccttggcataattggtgatcctgaagaaagaggtctctctcctaagtctctgtcagaattgagcttcacaattgctaatggttgttttctgtgagtcctataaaaagcaaggatatgcatgattcagggaatgaaggaatcacaggcttgggcagtgttaaacactgtggcctattgtccccgtgtgatccaccctggcttctctccagggggaccataggtcccgttcatgttactcagtgttccacagcagttcagtcgtgtatgaccctgtaacgtggaaatcttatcacacacctgttatccaacaagtctacctgaggggttttgttacactttaaatgggaaggcatagggatttatgaatggggctttcaccttctcatacccaggcaaccaacacctgattttgtctcaactggctagcaaatgcccagccttcagagtgtgcaggaatgttttcaaatccctcatcagactgtgactttaacattaatttggaatcctgtgagcactactctgaaggtttgtgttttggcaaatcttttttcttttttgagacagggctctgctaaatattgctcaggctggttgcaaactccttgcttcaagggatcctcccacctcagcctcccaagcagccgggactgcaggcacaagccaccatgcctggctgttttttggcaaatcttgattgtgataagcccccctggaggatatgattcactttatgtgattcatcttattcacaggtctgtgagggactgcaaagcttactcaggaaatgaaaacaaatgatggtcatgttgcagttttttccttgaaggacaaccgaaccatagcctctaaagttcaagtgcactgaggtgtcggaacgctgaaagcatgaggaaacgaggacgtagggtgtgactgaatggtggctagattagtgggagcagttcacctggatgaagattgagagcatcgtctttgagaagtgaaagactagcaagaataaaataaattaagtccagtgtttgagccaaggttgccacctgtctcttaacatctcactgaacataagtcctgaggtattaggacgaccatactgcctctgagctgaaaacattcaaaagttcacatccctgtttgggggataccattcaccgccttcagcccagatgatactttcctttaaatctgtgtctctgtgtgtataacaaagaggaagatggaaacaatgttcatggaaactgctgttgagccccttgtcccaccactcccgccatctgctgcaggcaggaaggcatgtgagtgtacgttttcttccaggagacatcaggtccccctggattcaaattaagtgcaatattttgcaaacagctcttcttagggaaatctcctgaaggaaaaaaatgtgacagaatgttccatagtctgagagaatggaatcgttgagcatttagtacaagtccagtgtgtgtgagcgggacttaggcagctcaagcttgcttttttttttaagcgtacaattgagtggttttagtaaattcacaaacttgttcaaccatcaccactatctaattccagactcacgcttttttaaacaataaatgtcatttcatgaaatctttggtgataaagtattttggattcagagaagagctcccttaccagtcccaccctgatctcatggctgtctctcctttcattgtcagactccccctggtctaccgcgttgatgtgtatacactgatctttcaagtctgggagacagataaggaggccaggtgcaaggcagggaggcagagagaatgttgtgcttcctttagcttttgtatttcgatggccagcattaccctttacctgtgggcatcagactcagcgtgggctgagtgctgagtgtaacttacactcctaaatcaagctggggcctgggtgggcccctcttggtatctgtgaatctttccaagcaccacttcggacacaccagggattgagtgctgctgttagtttagagaaggagagatgtctaacccttgaggtgaagggctctgggagggtccaagaagacgtaggcttcattttcacaccagcccacaccattccagtgctcagcctagcaaatgtgctttaatgcacacttctcagacctgtgatccgtgtatcttctccccagtgacagaagtagagaagagaatggaaagcagcacactccgtcccctctagtctggagctgttaacagaatctgctagaaactagctttattctaacataccgtaggatctaaatcctcctacctggatcatgaattcctttgaaataattcatattttcattgactctcactaaatgtcaaataaccttgttttcacttggataggctcaacctacctggcatatttattttgcagtcttgttgaaagttcatgaaactttgtactttttaataagatgatacactcgaaggaaacttttaatctctgcagtttattctctcttaaggaataaacactcccactgtttgttctcttcaatgtgtaaggagattaaatgacattttagaaatattacaattaaaaatagtgatgtagctgtaacatatgctggaattggatatttaatttatgtttgtgtcaactataatcctttccccacccctttcatttatggtaaacatcttgggcaaacccaaagatggaaagtgcttgttgggtgggtaagcaccacctggtctctcagcaaacactcctgagtggttgaagatgctggacattggattctagcactgggtttatctggtgacatagtctcctgtgggtcttgagttggttatttcaagctcaaactctgaatatgattaaaccagaacaccccacccccaactgccaaaaaaaaaaaaaaaaaatgggaattccataatggaaacagcaaaaaagtactccgttgctgggtttggacaatgaacatgggattagtcccaagtttgtagcttggaacggtagcatttttgcctgcgtgatccttgtcagctattcacagaaggaaatcttccgaaactccgtctttcatttcagccggtgaggctgttatccttctctgtcaattagcattcatgtggttttcgctctttccagctctgtcactcttgttttcatttaaatattgccccactctgtgtttattgccttgccatttctctagcatatcaggtttaattatgggctcagtaataatgaggaactagcttccctcaggcaactaattacttttgtcttttttggtcggattgtaccaaattattttgcattgaatgggaatgtttttgcagtgaatccagatatagttgtattggtttggaaaaacatttaaatatatttattcatatgaacatgtgtgattaaacaacctattttacatatttctgtaattctgaggagtgggctgggggtaggaagaaatggcaccacttaaaattcagggcttatatgaagaggtgttttaaggttagcacatgcacaaaggaacgagttggtttaaaaagataaatcactgcaaagaatgaaattggcttattcacatcaaaactagataagatgctaaaaaaaaaagatatgaaacagaactaacctatagtttcctgaaatcagtacagtttaatttataagaagctagaaagtaatgcaccttgattgttttaggaatgatttatgtgttgcaattttaatttatttaaagcatgtctactgtgtttgtcctaagagaaatatttcaacaaaacgtgctctgtgtttaagatatgtttaggcagtagttagcaactctgaaagtagaaactggaaatgtttattgtgaggcttgttgcagaatttccattttgtgagttactacttagtttcatgtcagcctaaaattgtaaattccctgtagatcttcaccccattgtggtgtcatcaatgaatccaaagcaggtgccattatttttttaaataaacacttgatgttagctttggtgttaaataaagaggtagatttcttaaattttcacatttgttggagcccatctcagtagcaaatgtgtgtgtgtgaccaatttttttaatagattttattttttagggcactttcaggttcacagcaaaattgagcagaaggtacagagatttccctt

SEQ ID NO: 460550 - DNA, 3465 bp, Homo sapiens
accagaggcaacagctgcagcagccgcgccgccccctcgcccgcggctcccagggtgatcccgagcacagccggtggctcgcggcgcggcagccccagaagacgggaaagttcgcggccggagcgcggagatgccgggcagcgacacggcgctcaccgtggaccggacctactcggaccccggccggcaccaccgctgcaagagccgggtagaacgtcatgacatgaataccttaagcctgcccctgaacatacgccgaggggggtcagacaccaacctcaactttgatgtcccggatggcatcctggacttccacaaggtcaaactcactgcagacagcctgaagcaaaaaattctaaaggtaacagagcagataaaaattgagcaaacatcgcgcgatgggaatgttgcggagtatctgaaactagtgaacaacgcagacaagcagcaggcgggacgtatcaagcaagtctttgagaagaagaatcagaaatcagctcactccatcgcccagctgcagaagaagttagagcagtatcatcgaaagctcagagagatcgagcagaatggagcctctaggagctcaaaggacatttccaaagaccacctgaaggatatacatcgctctttgaaagatgcccacgtgaaatctcgaactgccccccattgcatggagagcagcaaatcgggcatgccaggggtctcacttactccacctgtgttcgttttcaataagtccagagagtttgccaacctgatccggaataagtttggcagcgccgacaacattgctcacttgaaaaattccttagaggagtttaggccagaggcgagtgccagggcctacgggggcagcgctaccatcgtgaacaaacccaagtatggcagtgatgatgaatgttcgagtggcacgtcaggctcggccgacagtaacggaaaccagtcgtttggggctggtggagccagcacactggacagccagggcaagctcgccgtgatcctggaggaactgagggagatcaaggatacccaagctcagctggctgaggacatcgaggcactgaaggtgcagtttaagagagaatatggttttatttctcagaccctgcaagaggaaagatacaggtatgagcgactggaggaccagctgcatgacctgacggacctgcatcaacatgagacagccaacctgaagcaggagctggccagcattgaggagaaggtggcctaccaggcctacgagcgctcgcgggacatccaggaagccttggaatcctgccagactcgcatttctaagctggagctccaccagcaagagcagcaagctctgcagacagacaccgtgaatgctaaagttctcctggggaggtgcatcaacgtgatcctggccttcatgactgtcatcttagtgtgtgtgtccaccatcgcgaagttcgtctcacccatgatgaagagtcgctgccacattcttggcaccttctttgccgtgactcttcttgctatattttgtaaaaactgggaccatatcctgtgtgccatagaaaggatgataataccaagatgaagccactggttcctgccttcaagttctttcaagtttttattttaaagaaaactctgtgcatactaccaaattttacagtgaatgattgtgcggactcgtgtgtaagaaaaactaggactgtgtggtgtaaataactacaattctcttaactccgtagcagttgccaactcagtccttgtacttcgttaacacgaatctgtttcagagctctcctaccttgctcactgccttaatcagaccgatttcctgcccacctgaccagcccagcgtggtaaacctctgtatattgagaccttggcataattggtgatcctgaagaaagaggtctctctcctaagtctctgtcagaattgagcttcacaattgctaatggttgttttctgtgagtcctataaaaagcaaggatatgcatgattcagggaatgaaggaatcacaggcttgggcagtgttaaacactgtggcctattgtccccgtgtgatccaccctggcttctctccagggggaccataggtcccgttcatgttactcagtgttccacagcagttcagtcgtgtatgaccctgtaacgtggaaatcttatcacacacctgttatccaacaagtctacctgaggggttttgttacactttaaatgggaaggcatagggatttatgaatggggctttcaccttctcatacccaggcaaccaacacctgattttgtctcaactggctagcaaatgcccagccttcagagtgtgcaggaatgttttcaaatccctcatcagactgtgactttaacattaatttggaatcctgtgagcactactctgaaggtttgtgttttggcaaatcttttttcttttttgagacagggctctgctaaatattgctcaggctggttgcaaactccttgcttcaagggatcctcccacctcagcctcccaagcagccgggactgcaggcacaagccaccatgcctggctgttttttggcaaatcttgattgtgataagcccccctggaggatatgattcactttatgtgattcatcttattcacaggtctgtgagggactgcaaagcttactcaggaaatgaaaacaaatgatggtcatgttgcagttttttccttgaaggacaaccgaaccatagcctctaaagttcaagtgcactgaggtgtcggaacgctgaaagcatgaggaaacgaggacgtagggtgtgactgaatggtggctagattagtgggagcagttcacctggatgaagattgagagcatcgtctttgagaagtgaaagactagcaagaataaaataaattaagtccagtgtttgagccaaggttgccacctgtctcttaacatctcactgaacataagtcctgaggtattaggacgaccatactgcctctgagctgaaaacattcaaaagttcacatccctgtttgggggataccattcaccgccttcagcccagatgatactttcctttaaatctgtgtctctgtgtgtataacaaagaggaagatggaaacaatgttcatggaaactgctgttgagccccttgtcccaccactcccgccatctgctgcaggcaggaaggcatgtgagtgtacgttttcttccaggagacatcaggtccccctggattcaaattaagtgcaatattttgcaaacagctcttcttagggaaatctcctgaaggaaaaaaatgtgacagaatgttccatagtctgagagaatggaatcgttgagcatttagtacaagtccagtgtgtgtgagcgggacttaggcagctcaagcttgcttttttttttaagcgtacaattgagtggttttagtaaattcacaaacttgttcaaccatcaccactatctaattccagactcacgcttttttaaacaataaatgtcatttcatga

SEQ ID NO: 460551 - DNA, 1206 bp, Homo sapiens
  misc_feature (1192)..(1192): n is a, c, g, or t
accagaggcaacagctgcagcagccgcgccgccccctcgcccgcggctcccagggtgatcccgagcacagccggtggctcgcggcgcggcagccccagaagacgggaaagttcgcggccggagcgcggagatgccgggcagcgacacggcgctcaccgtggaccggacctactcggaccccggccggcaccaccgctgcaagagccgggtagaacgtcatgacatgaataccttaagcctgcccctgaacatacgccgaggggggtcagacaccaacctcaactttgatgtcccggatggcatcctggacttccacaaggtcaaactcactgcagacagcctgaagcaaaaaattctaaaggtaacagagcagataaaaattgagcaaacatcgcgcgatgggaatgttgcggagtatctgaaactagtgaacaacgcagacaagcagcaggcgggacgtatcaagcaagtctttgagaagaagaatcagaaatcagctcactccatcgcccagctgcagaagaagttagagcagtatcatcgaaagctcagagagatcgagcagaatggagcctctaggagctcaaaggacatttccaaagaccacctgaaggatatacatcgctctttgaaagatgcccacgtgaaatctcgaactgccccccattgcatggagagcagcaaatcgggcatgccaggggtctcacttactccacctgtgttcgttttcaataagtccagagagtttgccaacctgatccggaataagtttggcagcgccgacaacattgctcacttgaaaaattccttagaggagtttaggccagaggcgagtgccagggcctacgggggcagcgctaccatcgtgaacaaacccaagtatggcagtgatgatgaatgttcgagtggcacgtcaggctcggccgacagtaacggaaaccagtcgtttggggctggtggagccagcacactggacagccagggcaagctcgccgtgatcctggaggaactgagggagatcaaggatacccaagctcagctggctgaggacatcgaggcactgaaggtgcagtttaagagagaatatggttttatttctcagaccctgcaagaggaaagatacaggtatgagcgactggaggaccagctgcatgacctgacggacctgcatcaacattcttcagcacggggnaccgagctagaagt

SEQ ID NO: 460552 - DNA, 1266 bp, Homo sapiens
ggtattccacacagcattacctctgaccaaggcacttactttatggctaaagaagagtggcagtgggctcatgctcatggaattcatgggtcttaccatgctccctatcatcctgaagcagctggattgacagaatggtggattggtcttgtgatgtcacaattgcaacaccaactaggtgacaatactttgcagggctggggcaaagttccccagaaggctgtgtatgctctgaatctgtgtccaatacatggtgcagtttctcccatagccaggattcacgggtccaggaatcaagaggtggaagtggaaagggaggaatgtgccaccaggagacacagcaacaatgccattgagttaagattgccacctggacactttgggctcctcctacctttaaggcaacagactaagaagggagttacagtgttggctaaggtgactgactcagactatcaagatgaaatcagtcgactactccacgatgcaggaatgaaggtttgggtcactccgccaggaaaacaacaacaacaacaacaacaacaacaacaaccacgacctgctgaggtgcttgctgaaggcaaagggaatacggaatgggtagtagaaggtcagtgtccttcctctggggaatctggaattgaaacggtaaacagacatcaagagaagagcactgctgtttttggaattaccaatgtcacttcagctcttaacaccattctatgcataggttatttttctaacaatctgaaagcttcagaagatgtctccccagagttcttgttccaaacctcctgggccctgacttactgttagcaaagagccactggcaaggaaataacctatcttaaaccttgacacaaatcatctgagaatcccatccacattccagttctcaggatcgaagaacaaagacagaattcagatgggccttttgtcagagcattcaggtacttactgattgaggaaggcaaagaggtacctcatcactataaggaccgacctgggcaaagtcaggaggagtttgcggatgtgaagcgccctctcatagagattatctattcctacagacagaagatgacatggtcagagtcctttcacttgccacatttaaaacagaacactgcagtacatgtattaccggtacacatctgaatataagcaacaccctgctcttgtgtgagatccaattgtaaccaaaacagcgaataaatgatcggcttgggtataccaccattccagagggcatctcctctgacccttacc

SEQ ID NO: 460553 - DNA, 1089 bp, Homo sapiens
acagatcatgaggcagattcagatgaggaagaggagggcgagtgtaaaaaactaacttcagattctgaatgtgaggaacagaaaccggaggaaatcaaagaaagggaaaccgaaaaaggtcctaataagagatgaagaacaatgaagatatcgtgaaaaatattttgcttccctgccttcatacaatcctctaacagtcaaaaatgtatctgcagcgcccagtaaggccaactgatgactcaaacacaaccccccaagggtgtccttatgcccttccattgcttaaaataaagagctcgggggtcacttacggaaatcaatggaatcttgctctgtcacccaggctggagtgcaatggcatgatctcgggtcactacaacctctgtctccccggttcaagcaattctcctgcctcaacctcctgcgtagctgggattacaggctccggggtgtctgctcctgctgcctggcctctctcagctctgggcctgctccagtctctgagcaaggttggggccaagtcctgggaccatgaatggcagtgggaggcagacagattcctgggcggaaggggttgggtcccccgtaaggccccaccttcaggccagggagggcctgaaggctggggaattcatccgtattgtagtatggatccatacttcattctttttaatgaccaaataatattctgttatatggatgaatttatctatgtttatacggtcatcgactgatagacttggggttgcttctgctttttggctattataaataatattgctgtgaatattcataaacaaatttatgtgtggagacatattttcagttctcttggatatattctaggagtagaattattgggtaacgtagtaattctgtgcttatcattttaaggaactgccaaactatttcccaaagcaaagacatcattttacattcccatcagcaatatttgagagttccagtttatccatatccttgtcaacacttgttattacttgactttttgattatagcccacttagtggcggggactccaagcctagtagcactgtggttcttgcagactcatagaggtactgccttgaa

SEQ ID NO: 460554 - DNA, 709 bp, Homo sapiens
acagatcatgaggcagattcagatgaggaagaggagggcgagtgtaaaaaactaacttcagattctgaatgtgaggaacagaaaccggaggaaatcaaagaaagggaaaccgaaaaaggtcctaataagagatgaagaacaatgaagatatcgtgaaaaatattttgcttccctgccttcatacaatcctctaacagtcaaaaatgtatctgcagcgcccagtaaggccaactgatgactcaaacacaaccccccaagggtgtccttatgcccttccattgcttaaaataaagagctcgggggtcacttacggaaatcaatggaatcttgctctgtcacccaggctggagtgcaatggcatgatctcgggtcactacaacctctgtctccccggttcaagcaattctcctgcctcaacctcctgcgtagctgggattacaggcgggagtgtggtcgcacaatctcggctcactgcaacctccgcctcccaggttccagcaattctcctgcctcagcttcccaagtagctgggactacaggcagacaccaccacacccggctaatttttgtattttaatagagacgaggttttgctatgttggccagactgttcttgaactcctgacctccagtgatccacccacctcagcctctcgaagtactgggattacaggcgtgagtcactgcacccagcctgttcttttgtctt

SEQ ID NO: 460555 - DNA, 965 bp, Homo sapiens
aagtgagttcgctccggagccgcgccgccgccggcccagcatctcgggcgcccgccgcccccgccgccgccgtcagcgcggggatgtaggatgcaggcgggcgccaggttccagcggcggcggcggcagctgcagcagcagcagccccggcggcggcagcctctcctctggccgatggacgcagagccgccgccgccgccgccctgggtctggatggtgccgggctcggccgggctgctccggctcagcgcgggggtcgtggttcccccggtgctgctcgcctcggccccgccgcccgcggccccgctgctccccggtctccccggctggccggccccgagcgagccggtgctcccgctgctgccgctgccctctgcgccagactccgccgccgccgccgccgcgcaccccttccccgcgctccacgggcagtggctgtttggtggccattctccgtccctaggactgcccccctcttccacagtggagctggtgcccgtcttcccacatctctgcccttctgctcttgcaacccctattgggaaaagttggatagacaaaaggattcctaactgtaagtgttatgcttgcattatttttcgacagatcttttttaataattcctttgctctggactcaacgtggatacatcctgaggagtcaaggtttttccatgggcatgaaaagcctcgtttgctggcaaatcaagtagctgtgtctctgtccaggccggctcctgcctccaggccgctccccacggtggtgttagcacctcagcccatcccaggttggtgcccaaataacattgacaatgtctgtttcatttttgcttcaatcataaattagttttagatatgaaaaccatactcatcattttaatgaaacaattatcttggtaaaatataattccttttcacaagcatgaagcttttttaaaaaaaactagtcttggatagcttatccac

SEQ ID NO: 460556 - DNA, 1448 bp, Homo sapiens
gccaccctgagcagcctcactggtgacccggtgttcgaagatgtggccagagtggctttgatgcgcctctgggagagccggtcagatatcgggctggtcggcaaccacattgatgtgctcactggcaagtgggtggcccaggacgcaggcatcggggctggcgtggactcctactttgagtacttggtgaaaggagccatcctgcttcaggataagaagctcatggccatgttcctagagtataacaaagccatccggaactacacccgcttcgatgactggtacctgtgggttcagatgtacaaggggactgtgtccatgccagtcttccagtccttggaggcctactggcctggtcttcagagcctcattggagacattgacaatgccatgaggaccttcctcaactactacactgtatggaagcagtttggggggctcccggaattctacaacattcctcagggatacacagtggagaagcgagagggctacccacttcggccagaacttattgaaagcgcaatgtacctctaccgtgccacgggggatcccaccctcctagaactcggaagagatgctgtggaatccattgaaaaaatcagcaaggtggagtgcggatttgcaacaatcaaagatctgcgagaccacaagctggacaaccgcatggagtcgttcttcctggccgagactgtgaaatacctctacctcctgtttgacccaaccaacttcatccacaacaatgggtccaccttcgacgcggtgatcaccccctatggggagtgcatcctgggggctggggggtacatcttcaacacagaagctcaccccatcgaccctgccgccctgcactgctgccagaggctgaaggaagagcagtgggaggtggaggacttgatgagggaattctactctctcaaacggagcaggtcgaaatttcagaaaaacactgttagttcggggccatgggaacctccagcaaggccaggaacactcttctcaccagaaaaccatgaccaggcaagggagaggaagcctgccaaacagaaggtcccacttctcagctgccccagtcagcccttaacctccaagttggcattactgggacaggagtgtgtaacaactcacctgccgaatcaactagccctgaaaatggatggcgctggagcgtcgggcccatacccggccgtcgccggcagtcgagagtggacgggagcggcgggggccggccggcgcgcgcgcgtgtggtgtgcgtcggagggcggcggcggcggcggcggcgggggtgtgtggggtcctcccccgcccccccccccacgcctcctcccctcctcccgcccacgccccgctccccgcccccggagccccgcggacgtacgccgcgacgagtaggagggccgctgcggtgagccttgaagcctaggcgcggtcaccgggttgatgaactg

SEQ ID NO: 460557 - DNA, 1306 bp, Homo sapiens
gccaccctgagcagcctcactggtgacccggtgttcgaagatgtggccagagtggctttgatgcgcctctgggagagccggtcagatatcgggctgagtataacaaagccatccggaactacacccgcttcgatgactggtacctgtgggttcagatgtacaaggggactgtgtccatgccagtcttccagtccttggaggcctactggcctggtcttcagagcctcattggagacattgacaatgccatgaggaccttcctcaactactacactgtatggaagcagtttggggggctcccggaattctacaacattcctcagggatacacagtggagaagcgagagggctacccacttcggccagaacttattgaaagcgcaatgtacctctaccgtgccacgggggatcccaccctcctagaactcggaagagatgctgtggaatccattgaaaaaatcagcaaggtggagtgcggatttgcaacaatcaaagatctgcgagaccacaagctggacaaccgcatggagtcgttcttcctggccgagactgtgaaatacctctacctcctgtttgacccaaccaacttcatccacaacaatgggtccaccttcgacgcggtgatcaccccctatggggagtgcatcctgggggctggggggtacatcttcaacacagaagctcaccccatcgaccctgccgccctgcactgctgccagaggctgaaggaagagcagtgggaggtggaggacttgatgagggaattctactctctcaaacggagcaggtcgaaatttcagaaaaacactgttagttcggggccatgggaacctccagcaaggccaggaacactcttctcaccagaaaaccatgaccaggcaagggagaggaagcctgccaaacagaaggtcccacttctcagctgccccagtcagcccttaacctccaagttggcattactgggacaggagtgtgtaacaactcacctgccgaatcaactagccctgaaaatggatggcgctggagcgtcgggcccatacccggccgtcgccggcagtcgagagtggacgggagcggcgggggccggccggcgcgcgcgcgtgtggtgtgcgtcggagggcggcggcggcggcggcggcgggggtgtgtggggtcctcccccgcccccccccccacgcctcctcccctcctcccgcccacgccccgctccccgcccccggagccccgcggacgtacgccgcgacgagtaggagggccgctgcggtgagccttgaagcctaggcgcggtcaccgggttgatgaactg

SEQ ID NO: 460558 - DNA, 1097 bp, Homo sapiens
gaggactttgaagggccttgcggtcggtgctccttcctgtgagtgctctttcctacaggtgctccttcctatgagtgctccttcctatgggtgttccttcctgtgagtgctccttcctgtgggtgctccttcctgtgagtgctccttcctgcatctgagactcagcaaatcccagcctgagctcgcaggtttgctctcctgctccccacttatcccgggggcttccccatcgcaggccctggcatctccatctgaccagtggccccagccagacactcgagagttgcagggtctgccccagccttcccccagggcaccaggcctgttgatgccacctgggcatagctctggataaccttggataaccttccttttcttgtctccacggacactctctgggctgagctccagcatcccctggcttctttgctcccaagtgagggcattcccttctaactcgcaaatgtgttcttcctccttccgcgctggtggcctgtccttttcaggttggaacccaaagccctggcagagcctcagcgcctgcccaagatgccctctccagcccagctctgtctccctgtctgccaggccctgggctgccctcgcctctgctcccccagccccttggtccaaccaggtcctgcgcagcccatggtacagccaccccctcctccgtgtgttccccttgacccagatccctgtgtaccccacaccctgcttcttgcttacccagccagttgccaggccctgcgatttggcccttttgttcctaacactgccactctcctcgaacacgaccattatttttcttggaaaccaatggtttgtaagcagatttgtaaacaatggagccctttcttcccttgaaatctggagcagaaagtgggaggagagcagaaagggatgaggaggctggagaaggagacacgcatcctggtggcatcttctgagtgtggctgggctggacggtgtgccgctgctgcctttccaacagccccgtgagatagctcgagcccgcctcacagatgcaggcacgctcctgcagcaagttcaagtccctcgaggaaggccagaaggccagtgagggcagagccagg

SEQ ID NO: 460559 - DNA, 432 bp, Homo sapiens
atcttttcccaatttagtcagcaaaactggataagaaatgcatcgaagatattaatcagctcatagcacagaggttgtggattttcaaaccaatcccctgtggataacaactgtcgcagagtaagaccatttaaagggaccaaaaatggatgaacatacttggcactatgaactaaaagatctttggctaaagaagagatgaagactcattcaactcctacaagtgaattaaggagctctgagaaggcaaagccagcccaggagggtggacacactaagaacaatgtgccttgtcctgatacacagttgtggtataggtaacaaaatctgagtatccaacctaagatgttacccctcacctcaccagaatacctccaatcccttccctggaaacacagaataaattcctatagaaagttataaagcagaaaa

SEQ ID NO: 460560 - DNA, 1026 bp, Homo sapiens
acttggctgagacattgctcctcatcaatcaactcccagcagcatggaaggacatttcttctctacttctcatatttgctgtgtgaactttgtaaagtctccaaacttcaacactggctgcctcatttgtaaaaaaggaatgataataattctacctcacaagagttattttatcaggtttaaattacatgatgaaattaagctcttaacacagtgcctggcaaggagcaacagtttacagatacctgatgtagtccatacaaatcggattcctgatgcagaggagaaaactggaaaattgatcagaggggcagatgaaggatatccacttcaagataatgatagctatcttaactgttatgcaggctctattatgaatatcattttaactggcacacatagcacagaccaagatataatcgccttgaaagtggatgaaaagaatgcagctgaaacatttatcaaattattggaggccaaatgtgaacactagtgaagatcaactgtggttggagaaatgaagaacagcaaaactctaaccccgggacaagtacaagattactgagaaagcttcaccccacaaactcaggggcactaagactgaggctgagccgtaacgacagaattttcccactgttaaagcaaataaatatggcctgagaaggatttctatatttgagtccttgtggactaactgcaacctagcttaacagagtaagaccatttaaagggaccaaaaatggatgaacatacttggcactatgaactaaaagatctttggctaaagaagagatgaagactcattcaactcctacaagtgaattaaggagctctgagaaggcaaagccagcccaggagggtggacacactaagaacaatgtgccttgtcctgatacacagttgtggtataggtaacaaaatctgagtatccaacctaagatgttacccctcacctcaccagaatacctccaatcccttccctggaaacacagaataaattcctatagaaagttataaagcagaaaa

SEQ ID NO: 460561 - DNA, 2632 bp, Homo sapiens
gcggggatcatgaagagggtgttttgtatactcatcacaaccatgaagaagtactattattacccacatttcacagacgagaaaactaagaagtttagtgactcgcccaaggccacctgggaactggtggagctgggattcaaatttgggcagcctcatttctggatgtttctactcaccaatgctgctttcttcttcaactggtacatgataaaaaatcagatttctagcaaatccattgaaagttttatcactcctggtacccaaagggagggtgatgatggccttgattctccagctgtcagtatgctgttaacaggagcagcttctcatcattcctgcttggccttgtcggtgtcatcagccccatggagccggtggtcagatcctccagcggttaggaatgttgtgtgctgcttagacatcaataccagagattcagacagcacaagatgagggggcagttgaccttaacagccatcatggcaacatattttcttaaaatataatgttgaagacattgcacttgcagacgatgcctgaggggcacatttgctgctcctgtccttctgcatagctaagcccctgctgtttgagggattacatgcttctccatctatcagcagtagaaacggaccagtattggatagttgtaaagcacattttgtcagcctggtgaggggctgtgcaagatgatgatgattatgacagctttctttcactcactcattcattcatttgtttactaaatatatgaaagctgaacctgtgccagttggtcagcattgttttcaatgacttgctattctcattgatgaaacaggaccaagaggttaaatgtcttacatttgccaaagtgaattctgaaaggaacagggctggactaatataactggacttcccactttagataggagatgccaggatggctgcccataaccatggaagttgagagaagtgtttggacttatgatgccaaaatactttgcaactgtcttaatatttttttattctgattttaaagaggggatcaggggagcacttgcacacatagaataattatgcagcaatttaaaatttcgtataaagactattcaatgccaagagaaaacgttcgtgatacaagaaaagaaacagtttctaaaataaaacatattaccaattttgagagataataagactctatgtttatacatttgttaatacctacatgtggatatatatgcccattgaaaacatgacttgaaggatagacatcaaaatgttgacatcttttctgaatacctttaatttccttatttagactttccttcattttccaaacattttcacaaggaactctttttttggggggataaaaagtgtactgtttccgggggtgggggcggggagggttgtgcagggatgaataggcagagaacagagaattcttagggcagtaaaaccactctgtaggatactctaatggtgggtacatgtcattagacatttttccaaacccatagaatgtataagaccaagagtgaaccctaatgtaaactgtgggctccagtgataatgatgagtccatgtaggttcatcagttgtaacaaatgcacagctctagtggggatgttgataatggggaggctgtgcaattgtgggagggagggtatgtggggaatttctataccttcttcttaattttgctgtgaacctaaaattgctctaaaaatgaagtcttaagtgttttataaagaaaaaaatattttatccaatggaagagctagtgatgaatgaatgtgtgtagcacccagaactccctaagcttgattttgctgtgtgatcatgggcatatgcttgttttctcagtgccttggtttatcccagtgtggggtctatgagttctttgtgttttctttgtgcttattcattgggaagcaccgacaaggtaaaatttatttgcagctttcataaggctttgcctttaaatgtgaaaagcaaagttaagtttgctcaattccagtagctggcaaaactacaagttggcccagctctttcctcctaagtaggaggcttgttcactgcccctctccctacccctggaattctgtgaacccctcttttctcccagaattaattctttaaaaaagattctttggtatttctctttgtttcaataaataagaccaatccttccctacttcacccttttcttcactggtaaagtgaaggagttgggttaaataattttaatttaaaataaaatttattagcaacttaactagatcatttttaagattaaattgcattaagaatttaaaaacattttagctgaaataatgttaaattgctttagcatacatacaggaaaacattcaataatttctactgctgttgatattgctctaaatcctagtttctggaactggcccttagcaccacattgaaattccctgaaatttgtacagctgaagccaaatggccaatgtggcccttccacaaatgtaattatgatcaaggggaaaaaaaatgcaagcaacaagatgttgctcttgtctatttattgaattttaaaatgtctttagctggttaacttgaaatatttctcaaaatatatttcatgtatctatttcttacacattcatttttc

SEQ ID NO: 460562 - DNA, 1473 bp, Homo sapiens
ctgtgttttcagatgttagcccaggtgttattgctgccatgctgtgtggcagtggcgtcctttgaatgtactccagcctgggccacggagcgagacctgagaaagaaagaaagagggaaagaaagaaaagaagaaagagaaagaaggaaagaaagaaagaaagaaagaaagaaagaaagaaagaaagaaagaaagaaagaaagaaagaaagagaaagagagaaacagagaaaagagagaaggaaaaagaaagaagaatgagaaagagagagggagagaaagaaagaaagaaagaaagaaagaaagaaagagaaagaaagaaagaaagaaagaaagaaagaaagaaagaaagaaagaaagaaaagaaaagaaaagaaagaagaaagaaagacagagaaagaaagaaaaagactcgctgcatagaacctgcctcccaatggagatgcagagaaagaaggaacattcgctgggtggaggcaccttaagagaggaagggccatgccctgaagacacaggcaaagtgcctgtaaataaaccctgagtgggcaacatgaatggccgcagaccagacaaaatgagaatccagttaaacaagtgcatgaaatatgccccttagtccactcagcctgcaacacaaaagcacagaacaggcagcttctaaaccacagacattgacttccgttctggaggccggaagtccaagatggagggtcccgcagattccgtgtctggtctttttctacagaaacattggcaaaatcatcttcattgttcatagattgttgcagcagatccaactgaaggatacaccaaccattttaatcggacacaaaagaacaggctgtcctcacctgaccaccacccacaacaaccgaactttaatcagacacaaaagaacaggctgtcacctgaccaccacccacaacaaccgaagggcagggtgagtccatttagagtctcgagaatttcagacgtgcattcactttaaagcagggctcaggaccatgaccccaggctgaggactgagggtaaagtgccacttgccacatggggcctccgggggaagtcgggaagaaacctgcacaaggatgagaccgtcccccagcaggactccaggactccatccccagggccatggccaccccagggccatgcatgcccagaaacaccctccattccctgcaggcaggaacagcaggtgcagctcctctgcctgccagctttgggacctctaggactgaccgcttcctgtctggacaccagtcctgtaatgctctcatccttgctgtctgagcctggccagttcctactgccatctcagacggcctgtggtctggtcctcagcaaacccctctgggccaacttcttccctccttgtatcctcacaggcacccgttgctgcctctggctaccccctgcagccatgctgtcttctctttcacatcctcggccactggcctggggtgagactggg

SEQ ID NO: 460563 - DNA, 1308 bp, Homo sapiens
ctgtgttttcagatgttagcccaggtgttattgctgccatgctgtgtggcagtggcgtcctttgaatgtactccagcctgggccacggagcgagacctgagaaagaaagaaagagggaaagaaagaaaagaagaaagagaaagaaggaaagaaagaaagaaagaaagaaagaaagaaagaaagaaagaaagaaagaaagaaagaaagaaagagaaagagagaaacagagaaaagagagaaggaaaaagaaagaagaatgagaaagagagagggagagaaagaaagaaagaaagaaagaaagaaagaaagagaaagaaagaaagaaagaaagaaagaaagaaagaaagaaagaaagaaagaaaagaaaagaaaagaaagaagaaagaaagacagagaaagaaagaaaaagactcgctgcatagaacctgcctcccaatggagatgcagagaaagaaggaacattcgctgggtggaggcaccttaagagaggaagggccatgccctgaagacacaggcaaagtgcctgtaaataaaccctgagtgggcaacatgaatggccgcagaccagacaaaatgagaatccagttaaacaagtgcatgaaatatgccccttagtccactcagcctgcaacacaaaagcacagaacaggcagcttctaaaccacagacattgacttccgttctggaggccggaagtccaagatggagggtcccgcagattccgtgtctggtctttttctacagaaacattggcaaaatcatcttcattgttcatagattgttgcagcagatccaactgaaggatacaccaaccattttaatcggacacaaaagaacaggctgtcctcacctgaccaccacccacaacaaccgaactttaatcagacacaaaagaacaggctgtcacctgaccaccacccacaacaaccgaagggcagggtgagtccatttagagtctcgagaatttcagacgtgcattcactttaaagagtgcaccagaagtgtgatttgaagaggacaaatggttttctagctccagagtggttaaaatataatctgggtaagtaaggagaaatggaagtgcctaacgaatccaacgtgtgagaaaagctggtgaagacaattcatgggggatttgatgctctgtgtaaaacagagaaggaagaaagccatttagttgtgaaggaggcccttcgcaaataccagcaaaggcagcccaggacagggacgctggccaacctctgctagaatcacgttgctgctagataatgcaatgcacaaataaagtaacagatccaataatgcaaa

SEQ ID NO: 460564 - DNA, 1202 bp, Homo sapiens
aaaaacggaggctttccactctacgtcacccgccaggctcccagaacattccaaggcctcttctgggtcttctccttggcgctggtcgccatttgctatactttgccaggtataaactccgaattgttaagccaccaaaattacccctagagaaaaaacccaaccctgataaggatggtacgtattgagttctctgacctgtttctgtggcctgggctggagaccaggggcacccaaagccagtgggctgtggcacacaatcttttgttctgcacaggtccagattatgagcccaacctctggatgtgggtaaatcccaacattgtgtatccccctggaaagctggaggtctcaggacgtaggaagagggaggacctgacaagcacactcccctcctctcagccaccccagaaggaggaagatgccagctgctcagaggccgcaggggtggaatcactgtcccagtcctccagcaagcggtctccccctcggaagcggtttgccttttcccccagcacctgggagctcacagaagaggaggaggctgaggaccaggaagacagctcctctatggctctcccatcccctcacaaaagggcccccctccagagtcggaggcttcggcaagccagcagccaggcggggaggctctggtcccggccccctctcaattacttccacctaattgccctggcattaagaaacagttccccctgtggcctcaacgtgcaacagatctacagtttcactcgaaagcacttcccctttttccggacggccccggaaggctggaagaatactgtccgtcacaatctctgttttcgagacagctttgagaaagtgcctgtcagcatgcagggcggggccagcacacggcctcgatcttgcctctggaagttgaccgaggagggacaccgccgctttgcggaggaggcccgcgccttggcttccactcggctagaaagtatccaacagtgcatgagccagccagatgtgatgcccttcctctttgatctttaaccccaagaagcaacagccagctaatgctttattaaaattaccctcactagccttctgtgtgtgtctgtggaggtggggtctctaaggatggggttaagggtggaggtggagatcaactccaagctctgtccttctctttagaggctggttcattcatttgtgcatttgtttgttcacttatt

SEQ ID NO: 460565 - DNA, 2268 bp, Homo sapiens
gatgcagcggcaacgtgacgtaggttaagtgtgcatagagaaggaagtttccatctgctctgttcagcttcagccaggacccgaccagggaccgtcctgtgcccgacagggaccgagaccgcaggttggttgcattgtgcagatcggctccaccgtcgtcctcccggaagaactcctcgctggtcgacgcggccgcgctccttattgcatgaatgtcccctgtggtttcatcaatggtaaaaacggtgccagcgccatctcctgagagggtgtatttcgcagtgccctttcccttgtctaagtcggaatggagctttagggaagagagggagagagagaggaagagaaagagaaggacaaagaaagaacaccattaaaaggatgttgccaaattaaaaagtcataatttgcaatacaattcctttaatcaaaaatgttaaataaaaatcttatggttctgttaaaaaaaaaaaaaaaaaaacacagcgacgcggccgcgtcgaccaaatttttatcaaagttaatggatcagttagaagctctaaagaagcagttgggtgataatgaagctattactcaagaaatagtgggctgtgcccatttggagaattatgctttgaaaatgtttttgtatgcagacaatgaagatcgtgctggacgatttcacaaaaacatgatcaagtccttctatactgcaagtcttttgatagatgtcataacagtatttggagaactcactgatgaaaatgtgaaacacaggaagtatgccagatggaaggcaacatacatccataattgtttaaagaatggggagactcctcaagcaggccctgttggaattgaagaagataatgatattgaagaaaatgaagatgctggagcagcctctctgcccactcagccaactcagccatcatcatcttcaacttatgacccaagcaacatgccatcaggcaactatactggaatacagattcctccgggtgcacacgctccagctaatacaccagcagaagtgcctcacagcacaggtgtagcaagtaatactatccaacctactccacagactatacctgccattgatcccgcacttttcaatacaatttcccagggggatgttcgtctaaccccagaagactttgctagagctcagaagtactgcaaatatgctggcagtgctttgcagtatgaagatgtaagcactgctgtccagaatctacaaaaggctctcaagttactgacgacaggcagagaatgaagcctttgtatgacagacccatgtatttttggcatgaggaactaacagtccattactctatcttcagcctatcaggatcacagttttaaggaagacttggttttgttgaatatgacaatgaaatctgtgtgtatcagatttttattgaagcattcatcagcagcctcaaccagttttcattgtccatttactagattcaatcgtctctgagtatatagggctgatgttagcaagaccctaaaaatgtccattgaaccctgcttcaaaaaatgaaaacacacctctataaaatgtgtactgggaataagctttgtatttacatacattaggggaattttttaaaatctgtaatgtttggacaaacagatgatattactttgctataaaattataaatgtaacttttaataaagatagccagaatattctaaattagaaattacgtttttgtttccctcaagacataaaacaaatataaacattctaaactgctggatgaatctgaaaagacattaagttcaaattttaatttattctcatattaaatataactccattaaaagtttaaaatttcatgggagaaaatataataaggtaaagaggtagaatcactttcagacttaagaataatgttgatttcccaagtgctttaccttatctgttaaagcgtaagatgaattggtatttgcttcataggcagtttgactgcatgtattagagaatgaaaagaagatatttgtagtaatgcctggaaacttggtgctttaaattaaggtactcctctgctgctgtagaatggattccacacagtggatagctatgggtgattcagaatattatgtttagattcccatttgttaagtttataagttttgtggggaattatgaacttactgtgtactacctgcatttgtgctgtgtgaaaaataaatacaaggattcgtttagctaaaaaaaaaagtcgacgcggccgcgtgcttcaaatttttatcaaagttaatggatcagttt

SEQ ID NO: 460566 - DNA, 2129 bp, Homo sapiens
  misc_feature (1809)..(1809): n is a, c, g, or t
  misc_feature (1815)..(1815): n is a, c, g, or t
  misc_feature (1886)..(1886): n is a, c, g, or t
  misc_feature (1889)..(1889): n is a, c, g, or t
  misc_feature (1920)..(1920): n is a, c, g, or t
  misc_feature (1933)..(1933): n is a, c, g, or t
  misc_feature (1989)..(1989): n is a, c, g, or t
  misc_feature (1993)..(1993): n is a, c, g, or t
cggcaccagcggcacgagctcaggagcatgacaagcgagaccctgtggtggcttattactgtcgtttatacgcaatgcagactggaatgaagatcgatagtaaaactcctgaatgtcgcaaatttttatcaaagttaatggatcagttagaagctctaaagaagcagttgggtgataatgaagctattactcaagaaatagtgggctgtgcccatttggagaattatgctttgaaaatgtttttgtatgcagacaatgaagatcgtgctggacgatttcacaaaaacatgatcaagtccttctatactgcaagtcttttgatagatgtcataacagtatttggagaactcactgatgaaaatgtgaaacacaggaagtatgccagatggaaggcaacatacatccataattgtttaaagaatggggagactcctcaagcaggccctgttggaattgaagaagataatgatattgaagcatcttcaacttatgacccaagcaacatgccatcaggcaactatactggaatacagattcctccgggtgcacacgctccagctaatacaccagcagaagtgcctcacagcacaggtgtagcaagtaatactatccaacctactccacagactatacctgccattgatcccgcacttttcaatacaatttcccagggggatgttcgtctaaccccagaagactttgctagagctcagaagtactgcaaatatgctggcagtgctttgcagtatgaagatgtaagcactgctgtccagaatctacaaaaggctctcaagttactgacgacaggcagagaatgaagcctttgtatgacagacccatgtatttttggcatgaggaactaacagtccattactctatcttcagcctatcaggatcacagttttaaggaagacttggttttgttgaatatgacaatgaaatctgtgtgtatcagatttttattgaagcattcatcagcagcctcaaccagttttcattgtccatttactagattcaatcgtctctgagtatatagggctgatgttagcaagaccctaaaaatgtccattgaaccctgcttcaaaaaatgaaaacacacctctataaaatgtgtactgggaataagctttgtatttacatacattaggggaattttttaaaatctgtaatgtttggacaaacagatgatattactttgctataaaattataaatgtaacttttaataaagatagccagaatattctaaattagaaattacgtttttgtttccctcaagacataaaacaaatataaacattctaaactgctggatgaatctgaaaagacattaagttcaaattttaatttattctcatattaaatataactccattaaaagtttaaaatttcatgggagaaaatataataaggtaaagaggtagaatcactttcagacttaagaataatgttgatttcccaagtgctttaccttatctgttaaagcgtaagatgaattggtatttgcttcataggcagtttgactgcatgtattagagaatgaaaagaagatatttgtagtaatgcctggaaacttggtgctttaaattaaggtactcctctgctgctgtagaatggattccacacagtggatagctatgggtgattcagaatattatgtttagattcccatttgttaagtttataagttttgtggggaattatgaacttactgtgtactacctgcatttgtgctgtgtgaaaaataaatacaaggattcgtttagctaattcaacttactacaaagacaaatgtctgtttttatttgcntgctangattgtcttttttaaaagtcatttttatttataggaatatgggtgtttctataggaagaaacaggtttttngtnttttgttttttaagataaatttgacaaagtnaactgaaatttanctggtccattttattcatgctactaagatgggaatctttaaacacaagggtcagcnagcnttggccatggattggcacctgttacgtaaataaagtttctttgaacaagcctacactcatccattatgttttgctgggggtgcttccacaactgcagagttgtatggttgcagtctaaaaactttacaattggctc

SEQ ID NO: 460567 - DNA, 911 bp, Homo sapiens
cacgggatcaaggctggtagcatgagccgagtgcagcctgccgggccaggtcgtcagaacaagcccagcaggtgcaagcaaaacccaagcagagccaccggtggccacagaagttgctggctggtgaatttattatatatgaatttaatataccaaatagatagaatacaagaaatgataagtgggaaaatttcaaaagatttatatttctctagtgagcacaaaaatagcctatcctgcattcttctcagttgccacaagatgtgtagtactctgacttttcccacaagtgaagtgattaactgtcttggaaaaacagctggagcaattgaagttagggttaaggatctcaagggcttggacttctcagagatgaagatctggatcactccatcaggcaagcaacgaagaccagatgaaatgctgcttgaagggctggcatatctagaattggtggtagaaatatctttgcttgaaagtttgctcaagaaacaccatgcatatttgacatcataaggaaagaaatgagcagaaccatacatccaacttacattgcaattactgcagaggaagagagatggagaagttaaaatgaaacatttcaaggatgaatgggcactgaaaattggtaaagtggcagaaaagtccaagcttgaagaatgaaaaagtaaatgtatggagaaaaaggagtttggaaaacaggaaaaaaaaagatattttgcagaaacatctgtttgctgttgctaaaaattttagcatttaaatgttctcatttgggctctgaagttagcacttccttgaagtagttcacacctttgctattgctcctgttcagctacagatcattttatgcaaggctgattttaacaagaaaatggtgcattaatttacaatgtgttgagtgttttaaa

SEQ ID NO: 460568 - DNA, 4192 bp, Homo sapiens
tgcgttgggagtgactgttatttttctccctgctccatggagagagccttgcgccttcccctcccctgctgggggctgccctcctctctcccaggagtttggctgtgggctgctgcgcttgccattggctcagacaccagggccaccagaagctgcctgcagtgtgagcttagagcggtgccagcctcaaggctttccccgtgagtctccatgcaccctcactccaccgccccagcagagtgtattctatcttcattcaggctatagcatagatgactgacagcgctcaagttgttacccttctacgtggcggcatagatgcctttggcctgggagaccttcccaacctgctgggcctggtgggggaccagctgggcgacacagagcggaagcggcggcatgccaagccaggcagctacagcatcgaggtgctgctggtggtggacgactcggtggttcgcttccatggcaaggagcatgtgcagaactatgtcctcaccctcatgaatatcgcctggtgccagctggtgctgtccgtggctggtgacccagctgttatggtagaaaaacttttctccaccctcttatgttcagtactggagggcttctatgtttcctccacacccacagatgagcagggtcgagctccaagagaaagggagcagacatgctcagtgaaactgccagcaggagacttaaggccagcagaggacgtggaagggaaggctgaacaggtctcatgccccagggaactttccaatgatgaaaaactccccactattcagtgcatatatgggtgccaggaaggcccatggctgaagcctgacaccggctgctctgaagtctgcccattcatgaactggggcagctgccagttctgggcactgcggaaagtggcttgggactggggcttggtgatgcacgcggcttctgctgcccacagtttcgtgcttacagcctggctgcctccttggctggcccagaagggggtggacaagcagaggctgagtgtccgcctcatgaacactgttcaggagcttcctggcagaggagtgcaaagggctgcattctttgatgagctgtgcagggcactggcccacagtcctgggcctgaggcctggggtggggcccaagactctgcatttctcacaagctcccaggtgctgctgctgctccaaggtcctggagtatgtctcctggaggagtgcccactgctgcctccccagggccggggtactgtagggcagacattatgccagtggcaactggaacggtacacagggatgttagggcgagtggcctgtggttccctgagccaggtagatgagatttaccacgatgagtccctgggggttcatataaatattgccctcgtccgcttgatcatggttggctaccgacagtccctgagcctgatcgagcgcgggaacccctcacgcagcctggagcaggtgtgtcgctgggcacactcccagcagcgccaggaccccagccacgctgagcaccatgaccacgttgtgttcctcacccggcaggactttgggccctcagggtatgcacccgtcactggcatgtgtcaccccctgaggagctgtgccctcaaccatgaggatggcttctcctcagccttcgtgatagctcatgagaccggccacgtgctcggcatggagcatgacggtcaggggaatggctgtgcagatgagaccagcctgggcagcgtcatggcgcccctggtgcaggctgccttccaccgcttccattggtcccgctgcagcaagctggagctcagccgctacctcccctcctacgactgcctcctcgatgacccctttgatcctgcctggccccagcccccagagctgcctgggatcaactactcaatggatgagcagtgccgctttgactttggcagtggctaccagacctgcttggcagtggttgggggccagggcagtgtccttctgtggcccatgctgaccattcatgaggtgccttctgcccagctggccagtgggcctggtgatgggcccacagacacagtgccagccaccatgcagggatgcagagtgaacacctgtgggggcagtgccatggagaaaggaggggtccctggaggctgccggtacttggagttgagtaaacttgaagcagcagcagcagcccagggtgacctcatgccctctgctctgccccagtggtgcttcaaaggtcactgcatctggaagtcgccggagcagacatatggccaggatggaggctggagctcctggaccaagtttgggtcatgttcgcggtcatgtgggggcggggtgcgatcccgcagccggagctgcaacaacccctccccagcctatggaggccgcctgtgcttagggcccatgttcgagtaccaggtctgcaacagcgaggagtgccctgggacctacgaggacttccgggcccagcagtgtgccaagcgcaactcctactatgtgcaccagaatgccaagcacagctgggtgccctacgagcctgacgatgacccaggtccctacaggaatctggttcctgtggatgaaatccaaggtggtcttggaggttgtggcttccgttgctgcctagagagctgcctgcctgggtcaggatcctgcctgtcctgggttggagctcccccagacccaggtccctacaggaatctggttcctgtggatgaaatccaaggtggtcttggaggttgtggctccagacttgagtccttcatgctggagacaaggagttaccagctgtgctggagcccagggaccagagcagagcccaagaacgcccagaagtgtgagctgatctgccagtcggcggacacgggggacgtggtgttcatgaaccaggtggttcacgatgggacacgctgcagctaccgggacccatacagcgtctgtgcgcgtggcgagtgtgtgcctgtcggctgtgacaaggaggtggggtccatgaaggcggatgacaagtgtggagtctgcgggggtgacaactcccactgcaggactgtgaaggggacgctgggcaaggcctccaagcaggcagtggtgaagaaccaggtcaccggcagcttcatcctcaaccccaagggcaaggaagccacaagccggaccttcaccgccatgggcctggagtgggaggatgcggtggaggatgccaaggaaagcctcaagaccagcgggcccctgcctgaagccattgccatcctggctctccccccaactgagggtggcccccgcagcagcctggcctacaagtacgtcatccatgaggacctgctgccccttatcgggagcaacaatgtgctcctggaggagatggacacctatgagtgggcgctcaagagctgggccccctgcagcaaggcctgtggaggaggcccacggcagcctgcccaccccatagggatccagttcaccaaatacggctgccggcgcagacgagaccaccacatggtgcagcgacacctgtgtgaccacaagaagaggcccaagcccatccgccggcgctgcaaccagcacccgtgctctcagcctgtgtgggtgacggaggagtggggtgcctgcagccggagctgtgggaagctgggggtgcagacacgggggatacagtgcctgctgcccctctccaatggaacccacaaggtcatgccggccaaagcctgtgccggggaccggcctgaggcccgacggccctgtctccgagtgccctgcccagcccagtggaggctgggagcctggtcccagtgctctgccacctgtggagagggcatccagcagcggcagatggtgtgcaggaccaacgccaacagcctcgggcattgcgagggggataggccagacactgtccaggtctgcagcctgcccgcctgtggaggaaatcaccagaactccacggtgagggccgatgtctgggaacttgggacgccagaggggcagtgggtgccacaatctgaacccctacatcccattaacaagatatcatcaacggagccctgcacgggagacaggtctgtcttctgccagatggaagtgctcgatcgctactgctccattcccggctaccaccggctctgctgtgtgtcctgcatcaagaaggcctcgggccccaaccctggcccagaccctggcccaacctcactgccctccttctcgcagtctctaatcactagtgaattcgc

SEQ ID NO: 460569 - DNA, 5379 bp, Homo sapiens
tgcgttgggagtgactgttatttttctccctgctccatggagagagccttgcgccttcccctcccctgctgggggctgccctcctctctcccaggagtttggctgtgggctgctgcgcttgccattggctcagacaccagggccaccagaagctgcctgcagtgtgagcttagagcggtgccagcctcaaggctttccccgtgagtctccatgcaccctcactccaccgccccagcagagtgtattctatcttcattcaggctatagcatagatgactgacagcgctcaagttgttacccttctacgtggcggcatagatgcctttggcctgggagaccttcccaacctgctgggcctggtgggggaccagctgggcgacacagagcggaagcggcggcatgccaagccaggcagctacagcatcgaggtgctgctggtggtggacgactcggtggttcgcttccatggcaaggagcatgtgcagaactatgtcctcaccctcatgaatatcgcctggtgccagctggtgctgtccgtggctggtgacccagctgttatggtagaaaaacttttctccaccctcttatgttcagtactggagggcttctatgtttcctccacacccacagatgagcagggtcgagctccaagagaaagggagcagacatgctcagtgaaactgccagcaggagacttaaggccagcagaggacgtggaagggaaggctgaacaggtctcatgccccagggaactttccaatgatgaaaaactccccactattcagtgcatatatgggtgccaggaaggcccatggctgaagcctgacaccggctgctctgaagtctgcccattcatgaactggggcagctgccagttctgggcactgcggaaagtggcttgggactggggcttggtgatgcacgcggcttctgctgcccacagtttcgtgcttacagcctggctgcctccttggctggcccagaagggggtggacaagcagaggctgagtgtccgcctcatgaacactgttcaggagcttcctggcagaggagtgcaaagggctgcattctttgatgagctgtgcagggcactggcccacagtcctgggcctgaggcctggggtggggcccaagactctgcatttctcacaagctcccaggtgctgctgctgctccaaggtcctggagtatgtctcctggaggagtgcccactgctgcctccccagggccggggtactgtagggcagacattatgccagtggcaactggaacggtacacagggatgttagggcgagtggcctgtggttccctgagccaggtagatgagatttaccacgatgagtccctgggggttcatataaatattgccctcgtccgcttgatcatggttggctaccgacagtccctgagcctgatcgagcgcgggaacccctcacgcagcctggagcaggtgtgtcgctgggcacactcccagcagcgccaggaccccagccacgctgagcaccatgaccacgttgtgttcctcacccggcaggactttgggccctcagggtatgcacccgtcactggcatgtgtcaccccctgaggagctgtgccctcaaccatgaggatggcttctcctcagccttcgtgatagctcatgagaccggccacgtgctcggcatggagcatgacggtcaggggaatggctgtgcagatgagaccagcctgggcagcgtcatggcgcccctggtgcaggctgccttccaccgcttccattggtcccgctgcagcaagctggagctcagccgctacctcccctcctacgactgcctcctcgatgacccctttgatcctgcctggccccagcccccagagctgcctgggatcaactactcaatggatgagcagtgccgctttgactttggcagtggctaccagacctgcttggcagtggttgggggccagggcagtgtccttctgtggcccatgctgaccattcatgaggtgccttctgcccagctggccagtgggcctggtgatgggcccacagacacagtgccagccaccatgcagggatgcagagtgaacacctgtgggggcagtgccatggagaaaggaggggtccctggaggctgccggtacttggagttgagtaaacttgaagcagcagcagcagcccagggtgacctcatgccctctgctctgccccagtggtgcttcaaaggtcactgcatctggaagtcgccggagcagacatatggccaggatggaggctggagctcctggaccaagtttgggtcatgttcgcggtcatgtgggggcggggtgcgatcccgcagccggagctgcaacaacccctccccagcctatggaggccgcctgtgcttagggcccatgttcgagtaccaggtctgcaacagcgaggagtgccctgggacctacgaggacttccgggcccagcagtgtgccaagcgcaactcctactatgtgcaccagaatgccaagcacagctgggtgccctacgagcctgacgatgacccaggtccctacaggaatctggttcctgtggatgaaatccaaggtggtcttggaggttgtggcttccgttgctgcctagagagctgcctgcctgggtcaggatcctgcctgtcctgggttggagctcccccagacccaggtccctacaggaatctggttcctgtggatgaaatccaaggtggtcttggaggttgtggctccagacttgagtccttcatgctggagacaaggagttaccagctgtgctggagcccagggaccagagcagagcccaagaacgcccagaagtgtgagctgatctgccagtcggcggacacgggggacgtggtgttcatgaaccaggtggttcacgatgggacacgctgcagctaccgggacccatacagcgtctgtgcgcgtggcgagtgtgtgcctgtcggctgtgacaaggaggtggggtccatgaaggcggatgacaagtgtggagtctgcgggggtgacaactcccactgcaggactgtgaaggggacgctgggcaaggcctccaagcaggcagtggtgaagaaccaggtcaccggcagcttcatcctcaaccccaagggcaaggaagccacaagccggaccttcaccgccatgggcctggagtgggaggatgcggtggaggatgccaaggaaagcctcaagaccagcgggcccctgcctgaagccattgccatcctggctctccccccaactgagggtggcccccgcagcagcctggcctacaagtacgtcatccatgaggacctgctgccccttatcgggagcaacaatgtgctcctggaggagatggacacctatgagtgggcgctcaagagctgggccccctgcagcaaggcctgtggaggaggcccacggcagcctgcccaccccatagggatccagttcaccaaatacggctgccggcgcagacgagaccaccacatggtgcagcgacacctgtgtgaccacaagaagaggcccaagcccatccgccggcgctgcaaccagcacccgtgctctcagcctgtgtgggtgacggaggagtggggtgcctgcagccggagctgtgggaagctgggggtgcagacacgggggatacagtgcctgctgcccctctccaatggaacccacaaggtcatgccggccaaagcctgtgccggggaccggcctgaggcccgacggccctgtctccgagtgccctgcccagcccagtggaggctgggagcctggtcccagtgctctgccacctgtggagagggcatccagcagcggcagatggtgtgcaggaccaacgccaacagcctcgggcattgcgagggggataggccagacactgtccaggtctgcagcctgcccgcctgtggaggaaatcaccagaactccacggtgagggccgatgtctgggaacttgggacgccagaggggcagtgggtgccacaatctgaacccctacatcccattaacaagatatcatcaacggagccctgcacgggagacaggtctgtcttctgccagatggaagtgctcgatcgctactgctccattcccggctaccaccggctctgctgtgtgtcctgcatcaagaaggcctcgggccccaaccctggcccagaccctggcccaacctcactgccctccttctccactcctggaagccccttaccaggaccccaggaccctgcagatgctgcagagcctcctggaaagccaacgggatcagaggaccatcagcatggccgagccacacagctcccaggagctctggatacaagctccccagggacccagcatccctttgcccctgagacaccaatccctggagcatcctggagcatctcccctaccacccccggggggctgccttggggctggactcagacacctacgccagtccctgaggacaaagggcaacctggagaagacctgagacatcccggcaccagcctccctgctgcctccccgcggggtgggaggaagacaaagatcagggaaagccctaatcggagatacctcagcaagctgcccccggcgggactgaccctctcagggcccctgttggtctcccctgccaagaccaggcccaccagagaagggggctcaggacaccctggaccccaagtcctcagcatccagggatttccaaactggcgctcaccccctgactccaccaggatggcaacttcaattatcactctcagcctggaaggggactctgtgggacacagagggaacacgatttctcaggctgtcccttcaatcattgcccttctccgaagatcgctcctgctggagtcggacatcttcatcttctacctggctcaagctgggccagagtgtgtggttctcccagggcctggccctggagatgacaagggccacccaggccaagtgccccagggcagggtgccagcccctggcctggtgctggagtggggaagacacactcacccacggtgctgtaagggcctgagctgtgctcagctgccggccatgctacctccaagggacagatttaagaggatgtatggaaatgcctggatgtccaggcagaagtctgctgcaggggcagagccctcatggataacctctactagggcagtgcagaagggaaatgtggggttggagtccccacacagagtccttactggggcactgcctagtggagctgtgagaagagtgcgccatcctccagaccccagaatggtagatccactgacagcttgcaccacgctcctggaaaagctgcaggcactcaatgccggcctgtgaaagcagccaagtgtgctgtaactggcagagccacagtggtggacctgcccaatgccttagaagcccacttcttgtctcagtgtagcct

SEQ ID NO: 460570 - DNA, 2564 bp, Homo sapiens
  misc_feature (2)..(2): n is a, c, g, or t
  misc_feature (4)..(6): n is a, c, g, or t
  misc_feature (10)..(10): n is a, c, g, or t
  misc_feature (12)..(12): n is a, c, g, or t
tntnnncctntnaggtctgtgcgttcccgcgtcccccagctccccccgcagccggctcctcagtggtccgctctggttgccaggtgcagattctgttcctaactgaaagctgagtgttctccgcagcttattgtggccccgacaagcctgggtaactgcggccatcgccagagcagccttggcgctatggaggcgcccagggctacccctcagccttactgggggctggtcctggaggagccacgcagggttatggcagcactgactgaaggcaggagaccagattcgaatccttatggattaccatgggaattggtgatatgtgccgctgtcgttggattttttgctgttccctttttcttgtggagaagttttagatcggttaggagtcggctttatgtgggaagagagaaaaagcttgctgtagcactttctggactaattgaagaaaaatgtagactacttgaaaaatttagccttgttcaaaaagagtatgaaagctatgaaatagagtcatctttagacgattccagctttgagaaggaggcaacagaagcacagagtttggaggcaacctgtgaaaagctgagcaggtccaattctgaactggagcatgaaataccctgtctagaaaaggagttaaaagaagagaaatctaaacattctgaacaagatgaggtgatggcggatatttccaaaaggatacagtctctagaagatgagtcaaaatccctcaaatcccatgtagctgaagccaaaatgaccttcaagagatttcaaatgaatgaagaaagaatgaagataggaatacaatatgctttaaatgaaaattctcaacttcaggaaagccagaaacagcttttgcaagaagctgaagcatggaaagaacaagtgagtgaacttaataaacaacagaaaataacatttgaagactccaaagctgctgtgctggaagaagacataacagatgatggtaacttggaattagaaatgaacagtgaatcagaagatggtgcttacgtagataatcctccaaaaggagctttgaagaaactgcttcatgctgctaagttaaatgcttctttaacaaccttagaaggagaaagaaaccaaatttatattcagttatctgaagttgataaaaccaaggaagagcttagagggcatattaaaaatcttcagacggaacaagtatctttgcagttggaaaacacacattttgaaagtgagaatcagaagcttcaacagaaacttaaggtaatgacagaattatatcaagaaaatgaaatgaaactctacaggaaattaatagtagaggaaaataaccggctagagaaagagaaactttctaaagtagatgaaatgatcagccatgctgctgaagagctggagacctgcagaaagcaagcaaacgatcttgaagaagaatttcagagaaaaaaagatccttatgcacttgatgttccaaatacagcatttggcagagagcattcctcatatggtccctcaccattgggtcggccttcatctgaaatgagagcttttctctatcttccatctttgttggagggtccactgagactctcacctttgcttccagggggaggaggaagaggcccaagaggcccagggaatcctctggaccaccagattaccaaggaaagaggagaatcaagctgtgataggtttaccgatcctcacagggctccttctgacactgggttcctgtcacctccatgggaacaggactgtaggatgatgtctcctccaccaggacaatcatatcctgattcagctcttcctccacaaaggcaagacagattttattctaattatgctagacgctctggaccagcagaactcagaagttttaataagcctcctttggataaaatggatgggtcaatgccttcagaaatggaatccagtagaaatgataccaaagataatcttggtaatttaaatgtggctgattcatctctccctgctggaaatgaagtgactggccctggctttgttcctccacctcttgctccaatcagaggtccattgtttccagtggatatgaggggcccgttcatgagaagaggacctccttttcctccacctcctccaggaaccatgtttggagcttctccagattattttccaccaagggatgtcccaggtccaccacgtgcttccatttgcaatgagaaatgtctatccaccgaggggttttcctccttaccttcccctaagacctggatttccccccaccacccccacattctgaagatagagtgagttcccttcagggttgagtctgccttcaaatgagcctgctgctgaagatccagaaccacagcaagaaacctgacaatatttttgctctcttcaaaagtcattttgactgttctcattttcagtgattacacttttgctcaaattgaaacttaatagaattataattctcgggatagtattttgtaaataaggatgatttaaatatgaatcttatgtgtaaattatttccattttattttattctagatagtataactattttaatttggttaactaat

SEQ ID NO: 460571 - DNA, 5009 bp, Homo sapiens
tatgaagagctatgtttgatatgcattggcacaatctcagtatggttagaagctactgtcgggcacaaggtgaagttacaatcagagaagctttacgtgaacttgatctttggggagttggagcagtgtttacattaattgattatgaagacagccaaagtcgaactatgaagctgattaaagactggaaagatatagtaaatcaggttggagataatagatgccttctccaatccttaaaggattctccttattataaaggatttgaagataaagtatcaatttgggaaagaaaacttgcagagttagatgaatacctgcagaatttaaatcatattcagagaaagtgggtgtatttggaacccattttcggccgtggagcattgccaaaagaacagacacgcttcaacagagttgatgaagattttaggatctataacactgttgtcccctacccgtccatccctcccatgggatcatctaagcattggagctggcaggaacttagcagcctgcaacttacctccaggcccttgagcagtcagattttatgcttggcggagcagattaaattcactgaagatgtagaaaatgctattaaagatcatagtcttcatcagattgaaacacaactggtgaataagttagagcaatatactaacattgatacaagttctgaggatccagggaatactgaatcgggcatcctggagcttaaacttaaagccctaattcttgacattatccataatattgatgtggtaaagcagttaaaccaaattcaggttcatacaactgaagactgggcttggaaaaaacaacttagattctatatgaaaagtgatcatacatgttgtgttcaaatggtggattctgaatttcagtatacttatgaatatcagggcatcgatgtgaagtcaatgggacgaatatttgttggtttggtgaagtgtggggcctggggttgttttgatgaatttaataggctggaagaatctgtactgtcagcagtttctatgcaaatccagacaattcaagatgctttgaagaatcatagaactgtatgtgaactgcttggcaaggaggtagaagtaaattctaattctggaatttttatcactatgaatcctgctggaaaaggttatggaggaagacaaaaactgcctgataatcttaaacagcttttcaggcccgtagctatgtctcatccagacaatgagcttattgcagaagttattctctattcggaaggctttaaagacgctaaagtattgagcagaaaattggtagctattttcaatctatctagggaacttttgacacctcagcaacattatgattggggtttgagagctttgaagacagttctgagaggaagtggaaatctccttagacagctaaacaaaagtggcactacacagaatgctaatgaaagtcatattgtggtacaagcactgaggcttaataccatgtcaaagtttacgtttactgattgcacccggtttgatgcactgataaaagatgtctttccgggaattgaattgaaagaagtggaatatgatgaactaagtgctgcattaaagcaggtctttgaagaggccaattatgaaattatacccaatcagatcaaaaaggctttagaattgtatgaacagttatgccagaggatgggagttgttattgttggtccaagtggtgctggaaaatcaacgctttggagaatgttaagggctgcgctttgtaaaactggcaaagtagtgaaacaatatactatgaatcccaaagctatgcctcgatatcaattattaggccatattgacatggacacaagagaatggtctgatggtgttttgacaaatagtgctcgtcaagtggttcgggaacctcaagatgtcagctcatggataatctgtgatggtgatattgaccctgaatggatagaatctctgaattctgttctggatgataatcgactgctgactatgcccagtggagaaaggattcagtttggcccaaatgttaactttgtatttgaaactcatgatttaagttgtgcatcaccagccacaatatctagaatgggaatgatctttcttaggggacttggtggaaatctgaatatgaagtcacgtttggaatttaccaaagaggtttttcattgggcacgagaatctcctccagactttcacaaacctatggatacctactatgactctactaggggtcgattagcaacatatgtgcttaagaagccagaagacttgactgctgatgatttcagtaacggcttaactcttccagtcattcagactcctgacatgcaacgaggtctagattatttcaaaccatggttaagttctgatactaaacagccctttattctggtaggaccagaaggatgtggcaaagggatgctgctcaggtacgcattttcacaactccggtccactcaaattgctacagttcactgtagtgcacaaaccacttctcgacatctcctgcagaaactgagccagacttgcatggtaatcagtactaatactggtcgtgtatacagaccaaaagactgtgaaagacttgttctgtacttaaaagatatcaacctacctaaacttgataaatgggggaccagtactttggtagcattcctacaacaggtgcgagccaaatttacagttgatgattatagtcactatttctttactccttgcattcttacccaatgggttcttggcttatttagatatgatttagaaggaggatcctcaaaccatccactagattatgtgttagaaattgtagcatatgaggcacggcgcttatttcgtgacaaaattgttggtgcaaaggaacttcatttatttgacatcattttaacatcagtgtttcaaggagattggggctcagacatattagacaatatgtcagttgatcctgattttctaaaatcatttttattaatccatgaatcttgtaaagcatatggtgctacaccaagccgatacatgacctttttacatgtgtattctgccattagtagtagcaagaaaaaggaattattaaaaagacaaagtcatttgcaggctggtgtatctaaactaaatgaagctaaagctcttgtggatgaactgaacagaaaagctggagaacaaagtgtgttacttaaaacgaagcaagatgaagcagatgctgcccttcaaatgatcacagtgtcaatgcaggatgctagtgagcaaaaaacagaacttgaaagactgaagcacagaatagcagaagaagttgttaaaattgaagaaagaaaaaataaaattgatgatgaattaaaagaagtacaacctttagtcaatgaagctaaactagcagttggaaacattaagcccgaatcactttcagaaattcgctcactacgcatgccacctgatgtaattagagatattcttgaaggagttttaaggttgatgggtatctttgatacatcttggaatgctaagcgtgccagtactgcagctgcacctttggctgcctgggtgaaagccaatattcagtattcccatgtcttggaacgaattcatcctttggaaactgaacaggcaggattagaatcgaatctgaagaaaactgaagacagaaaaaggaaactagaggagcttcttaattctgttggtcaaaaggtatcagaactcaaagaaaaatttcagagcaggacttcagaagctgccaaacttgaggctgaagtaagcaaggcacaagaaacaatcaaagctgcagaagtcttaattaatcagcttgacagagaacataagagatggaatgcacagtgtcctggtttgggtgataaattatatgatctaatattggtcaactcagtggataatggaaagtataataaggctgttagaaactatggagaaggtagtcgagtgtgcccatttcttatagatccttcttcccaagctacagagtggttaaaaacacatttgaaagactcacgtttagaagttatcaatcagcaggatagtaactttatcacagctcttgaattagcagtacgttttgggaaaacccttattatacaagagatggatggtgtagaacctgttctttatccattattgagacgagatctggttgctcaaggaccacgttatgtggtacaaataggtgacaaaattattgactacaatgaagaattccgcctctttttgtcaacaagaaacccaaatccttttattccaccggatgcagcttccattgttactgaggttaactttactacaacaagaagtggattacgagggcagcttttagctttaaccattcagcatgagaaacctgatttagaagaacagaaaacaaaactattacaacaggaagaagataagaaaatacagctagccaagctcgaagaatctcttctagagacacttgccacatctcaaggcaatattttggaaaataaggatttgattgagtctttgaatcagacaaaagcaagcagtgcacttattcaagagtcacttaaagaatcttacaaactccaaatttcccttgatcaagaacgggatgcctatctccccctggctgagagtgccagcaagatgtacttcattatttctgatttgtccaaaattaataacatgtaccgttttagtttggctgcttttctccgacttttccaacgagctctacaaaacaaacaggagcactgcagctggcatctggtgcgtgcccctctaggacgaagcttccagaggaaagaacaggcagcaatctttgctgttctgcagactctgctggtgatacccaggcaaacagggtcaggagtggacctcctgcaaagtccagcagacctgcagcagaggggcctgactgttagaaggaaaactaacaaacagaaaggaatagcatcaacatcaacaaaaaggacatctatacaaaaaccccatccgaaggtcaccaagatcaaagaccaaaggtagataaatccacgaagatgaggaaaaaccagc

SEQ ID NO: 460572 - DNA, 502 bp, Homo sapiens
tcggattttgggaaaaacggcccgccagtgtggtggaattcctgcgggcaagctcagcctcggtgagtcttggtggccttgacagcccccacttaacacactgtgctgattaagagagacaggagggcaagtttttcccttttttaaagaaatcatcctcgacatggactacctgccttgaagcatgatctatctagttccacttacctcctccccgacgcccccattctgactcttctccagagtggaggtctgagaagaaaaaaagaaatgccgcatttcatctccttgtttcacacccaggagtacttctactctcaacagttggagtctttgcattgtgaacaaaagtcaggttgtgtgggagcaaagccagctgctcccagtgcagacccaggagcagagtgcagaggagaatgagtcagagttgtgtcttcaaaaattacgtaattgcgatttgctaagagtttactttctgtttgggaaattggaaaagagaaag

SEQ ID NO: 460573 - DNA, 1194 bp, Homo sapiens
catagatacatatgtgaagatttattgtattgttcactatcaaagaacaaagcttctggtacctgccctttggacagctgcgggcaagctcagcctcgcttgtccataaagcctgccttgctccaaagcatctgactgtaaagactggtcacctatacctgtgatttgtgggcctgaagaaaaccatccatccttgcaaatgtcttctgctgagatgcctcacacagagactgtctctcctcttccttcctccatggatctgcctattcaggacagccatgattcttccaccagtcccaaaggcaaacaacccactactgcagagaagagtgccacaaaaaaggaagacaaggtcccggtcaagaaacagaagaccagaactgtgttctcttccacccagctgtgtgtactcaatgatagatttcagagacagaaatacctcagcctccagcagatgcaagaactttccaacatcctgaacctcagctacaaacaggtgaagacctggttccagaaccagagaatgaaatctaagaggtggcagaaaaacaactggctgaagaatagcaatggtgtgacgcagggatgcctggtgaacccgactgggaaccttccaatgtggagcaaccagacctggaacaattcaacctggagcaaccagacccagaacatccagtcctggagcaaccactcctggaacactcagacctggtgcacccaatcctggaacaatcaggcctggaacagtcccttctataactgtggagaggaatctctgcagtcctgcatgcagttccagccaaattctcctgccagtgacttggaggctgccttggaagctgctggggaaggccttaatgatttttcttgtatggaaactacgtgttctggtttccatgatgcctatccagtcaatctcatggagggtgggtcccagcctcatgcggccgccgggctattgggaggtgggtggtcgcggccgcagcgccaagtcgggctggcgggctcagtgctcgctgggggcagggcggcgaactggaggaagagggtggacgttggtgagaaccgcagtttcagccacgccagtgcagcgaaggcccccgatcaaaaagacagatttgttactagatgattcatcggtgccattctttgggcagatagggcagttgtgaaaatgaatcaaggcaatttaaa

SEQ ID NO: 460574 - DNA, 1549 bp, Homo sapiens
ttcaaaggcattgttctccataaaataacttgttcaaacccaaagaacggtgcatttcagagaaggagatgcatatgcgatctaagagctttgcccctggtgggactctgcctgttgcattgccccacgtagcactggacaaggtgccatcccctgctatgcagcaggttctggagcctgccgtcaagacaggatgcagccccacagcgggagcacgctgtcaagctaccattccaaatgttttccgaatctgtttcagaatctatgataacttgccggaagttaaaaagaaaaaagaagaacaaaggaaaagggtgatcttacaaagtaacagactccgtgccgaagtcttcaaaaagagaggcctgatacaagcaagtttgtttacatccctggggaatcttttacatcaaacttttgggatccaaatccatctccttttaaatttcaatctcagcacctgccagttatgcaaatgccaaaatgtgggtcatcatatagtatatttgaaacctttctgaacatgtacaccacccaatgctagaggctgacttggaaaccgtgagtcagcaaatgcttgctccgatgtaacagggctctttgaatgaactatttctgaaacagccaattgtgggagagcagttgagactttgatgtctgaggttctcccatttcaacacttggtataaaaattgcaggcaaggggcctggtctctgactgcatcaaatgaccaacggtctgagtatgaggcacatcaggggcagaaccagagaagagaaagtacggtgatgtggctgcccaacaggaggtcagctcacccagacagcttcctccagctctgaaacagatcgactgagcaccagatgaagttggcatggatgggagatgtgatgtacaagagaaaagcaaaaattacttgagttatctccccgaagtcaaaagtaatgggacacgcagaccctcctgaaattctgagcagaaattgctgctacatttgaatcagattctaagagatcatcaacattagaaggtgcacatcataattcaaatctctgaagaggaagaaggaagatattgacttcagtcttcatttagtcctgttatgggacttccagacactgaaaaaactcatccctacagccggctggaggatattgtcctggaaggggcagctttcacacatggtttgaattcaattagccagctcctctgagagccactagagtaccatttaggacattgcttcttgaattctcatttgcagccttgcaaataattttcaaaggtcattagaccataaggagttttcattacccttcattcatgtcaacagcaaacacttactgattgagcgtccacttggtgccctatgctaggtgcttccaggtgcatccaaaaagggatgcagcacaaaaaattaaaatgactagaagcagcaacacatggaaggtaaaaatctttctaataagagcaatggaagaaacatttctacaaatgttaagttgtaagtcaaatgtttttaaaaagaaagaaatgacaaatttgatt

SEQ ID NO: 460575 - DNA, 825 bp, Homo sapiens
gtactgtgaagcggcactctttagagatgcactatgtgttgttttgtttggttttgtttgtgggcactttctaaaatgggatttaaagtccaggggccataattaggcccaccacaaatgatgttattattgtctttaatgtatggccttaaatacatcataagaaggttcacagtgacagtttactcattgctgcgagcttgtggacaccattgtctgctttaaaacaatgctctggctttgctctttgaagacaagacctgaaaaatcagctgtatgtattttcgtagatcatcaacattagaaggtgcacatcataattcaaatctctgaagaggaagaaggaagatattgacttcagtcttcatttagtcctgttatgggacttccagacactgaaaaaactcatccctacagccggctggaggatattgtcctggaaggggcagctttcacacatggtttgaattcaattagccagctcctctgagagccactagagtaccatttaggacattgcttcttgaattctcatttgcagccttgcaaataattttcaaaggtcattagaccataaggagttttcattacccttcattcatgtcaacagcaaacacttactgattgagcgtccacttggtgccctatgctaggtgcttccaggtgcatccaaaaagggatgcagcacaaaaaattaaaatgactagaagcagcaacacatggaaggtaaaaatctttctaataagagcaatggaagaaacatttctacaaatgttaagttgtaagtcaaatgtttttaaaaagaaagaaatgacaaatttgatt

SEQ ID NO: 460576 - DNA, 1208 bp, Homo sapiens
caaacacatagtatcatggggttatgaaaacttgttgcctgccccagatagcaacactggctccagttctgaaaatcaagggaatccagtggaagctgctgctgttgcctcttcggaccatctcttccctgtccagggccttacttcatggaaacaccacaggtggagtccagcaggaaaatggattagatctctccattcactcaataaaatgtccaagatttcatactatattttcaattaaagaggagtttcagactttatgttgctccaatttatggatatctactctcttgtactttatatccaaatttgtagatctatttgaagaattcagagaatctatggaagatggctcagcttgctgtgaagcaaagaaaccagggaccttctccagaacctctgaagttgatgttaggtccagctagtgtttgtcctctaaaaaaaatacttaactgttgatcagttgttctgctgttggcagctgccttctcagatgggctccgtgctaaacaactctctgctgcttcactacagtcttgctaaggtcttattagtggttgagtcaaacattacaagaaggaggggtttcattcctgtgaagcattcctgtataagagccttcctctctgggatggcctctgttgtcggtcacagttccttcagcttgtgagatggattccttttagtagctactctgaggtgaaaccacttctttttgatcgtccggcacagcccttctttacatcagccatttatttcaaggtaacaaaaactttagatttaaccactgttgctagtggtacacaattccaaactgacatttgaatcaaagtataaatgaatagtatttttaaagtctattgaagtattttcacattttcagtgtgtttttttttgggcctgattttcaagagtaaccatagttttaccattaggaaaaaaaaaaccctaaacattaaaaaactccttggaatgccatctgtattcctccattatgtcatctttcatacaacaatcagctgagtttaatctacaaaataggtctcctggtacctaagactcagggaagactaatggattgaaatgactaaggtcacagagcaaagtataactacctgtgcttagctctcaaaatgatattttattaactaagcgtggaattaggtaactacttgttataaaacgtagtttatagaaatctattt

SEQ ID NO: 460577 - DNA, 648 bp, Homo sapiens
cagggcagagtccttcttacaagaggggtttcattcctgtgaagcattcctgtataagagccttcctctctgggatggcctctgttgtcggtcacagttccttcagcttgtgagatggattccttttagtagctactctgaggtgaaaccacttctttttgatcgtccggcacagcccttctttacatcagccatttatttcaaggtaacaaaaactttagatttaaccactgttgctagtggtacacaattccaaactgacatttgaatcaaagtataaatgaatagtatttttaaagtctattgaagtattttcacattttcagtgtgtttttttttgggcctgattttcaagagtaaccatagttttaccattaggaaaaaaaaaaccctaaacattaaaaaactccttggaatgccatctgtattcctccattatgtcatctttcatacaacaatcagctgagtttaatctacaaaataggtctcctggtacctaagactcagggaagactaatggattgaaatgactaaggtcacagagcaaagtataactacctgtgcttagctctcaaaatgatattttattaactaagcgtggaattaggtaactacttgttataaaacgtagtttatagaaatctattt

SEQ ID NO: 460578 - DNA, 1140 bp, Homo sapiens
gctgtgaggactgccagcacgctgtcacctctcactatgaggactggcttccatggaggtgaagaactgctgcatggtgacagagttcatccttttgggaatcccacacacagaggggctggagatgacactttttgtcttattcttgcccttctatgcctgcactctactgggaaatgtgtctatccttgttgctgttatgtcttctgctcgccttcacacacctatgtatttcttcctgggaaacttgtctgtgtttgacatgggtttctcctcagtgacttgtcccaaaatgctgctctaccttatggggctgagccgactcatctcctacaaagactgtgtctgccagcttttcttcttccatttcctcgggagcattgagtgcttcttgtttacggtgatggcctatgaccgcttcactgccatctgttatcctctgcgatacacagtcatcatgaacccaaggatctgtgtggccctggctgtgggcacatggctgttagggtgcattcattccagtatcttgacctccctcaccttcaccttgccatactgtggtcccaatgaagtggatcacttcttctgtgacattccagcactgttgcccttggcctgtgctgacacatccttagcccagagggtgagcttcaccaacgttggcctcatatctcttgtctgctttctgctaattcttttatcctacactagaatcacaatatctatcttaagcattcgtacaactgagggccgtcgccgtgccttctccacctgcagtgctcacctcattgccatcctctgtgcctatgggcccatcatcactgtctacctgcagcccacacccaaccccatgctgggaaccgtggtacaaattctcatgaatctggtaggaccaatgctgaaccctttgatctataccttgaggaataaggaagtaaaaacagccctgaaaacaatattgcacaggacaggccatgttcctgagagttagtaagagcagataaatgggtgcatggctctggaattccttttgctttgacctaagaaatttcattctggaatcttcatatgtgacaatgacttggaattttcagcactgtgctgaatgatatggaccattatgctatatataatacatta

SEQ ID NO: 460579 - DNA, 930 bp, Homo sapiens
cttagacaaagcgcatgttggtggagaagatgggacatgaagcggtggaacttggccatggagaagcaaacatcaccggcctggaggagaacaccttgatcgccagcctttgtgacctgctggagaggatatggagccatggcttgcaggtcaagcaggggaagtcggctttgtggtcacatttaattcaatttcaggacagagaagagaaacaagagcaccttgcagaatcaccagttgccctcggaccagaaagaagaaaatctgactcaggagttatgttgccaacgctcagggtctctcttattcaggacatgaggcatattcaaaacatgagtgagatcaagactgatgttggacgagctcgggcgtggataagactgtctctagaaaagaagctcttgtcccagcatcttaagcagttgctttctaaccaaccactcaccaagaagctttataagcgatatgcttttctacgttgcgaagaagaaagagagcagtttctttaccaccttctttctctcaatgctgtggactatttctgcttcaccagtgtgttcaccactatcatgattccgtataggtcagtgatcatcccaatcaaaaagctgagcaatgcaataatcacatcaaacccttggatctgtgtatcaggagagctgggagacacaggagtaatgcagattcccaaaaacctcctcgaaatgacctttgaggtaggttcagctaatacctttcctagaagaatgtatcacgtgtagttttacagatgattctgtctggctttttcatttttccttgaatcaaataaaatagaggaacactcaaagcgtgcaggatcatttttgtgattatatgtctaaagttgtcttaagcagcttatatactaatttgttttgcattttcattgttaagctctatttttcactt

SEQ ID NO: 460580 - DNA, 536 bp, Homo sapiens
cttagacaaagcgcatgttggtggagaagatgggacatgaagcggtggaacttggccatggagaagcaaacatcaccggcctggaggagaacaccttgatcgccagcctttgtgacctgctggagaggatatggagccatggcttgcaggtcaagcaggggaagtcggctttgtggtcacatttaattcaatttcaggacagagaagagaaacaagagcaccttgcagaatcaccagttgccctcggaccagaaagaagaaaatctgactcaggagttatgttgccaacgctcagggtctctcttattcaggacatgaggcatattcaaaacatgagtgagatcaagactgatgttggacgagctcgggcgtggataagactgtctctagaaaagaagctcttgtcccagcatcttaagcagttgctttctaaccaaccactcaccaatgattccgtataggtcagtgatcatcccaatcaaaaagctgagcaatgcaataatcactatcgatccgaaatctggcccgaggtacta

SEQ ID NO: 460581 - DNA, 1931 bp, Homo sapiens
gatttgtcctcttgctccttcctgctaggacagcagggcttctcgtacacatgctgtagcgggcactgccttggcaggaggatttggggcttccacatatcctgttctcaagattgtagcatctcagtactctagagcccagtacctgacatcaaggatgtctggagcttccttttaaggaaagaaaagatcagcaaacttgcctgttcccgtttacacttccaccaccagttcgtgagagttcctgttctgcatcctcaacactagtattaagtgagagttcctgttctgcatcctcaacgctagtattaagtgcactggcctttagtctgttaaaaagcatacaatggctacagatgttcaattggctgattatccactgatgagtccaaaggctgagctgaaactggagaagaagtcagggcgcaagccaaggagccccagggacagtgggccacagaaagaactggtgatcccagggattgtggatttcgagcggatccgccgggcattgaggaccccaaagccccaaacccctggcacctactgctttggacgcctcagtcaccactccttcttctcccggcaccacccacacccccagcacgtgacccacatccaagcctctaaccctttgcagatctcaccgggaagcctgtctgtgtcgtcagggattttccagcccccttgcctgagtcaactgtcttttccggctgtcaaatggggatacccaccatctctgtccccattggagacccacagtctaatcggaacccccagctttcttctggtggaagcctggaagaaggagttgaaggagctagcttcccgggtggccttcctcaccaaggaggatgaactgaagaagaaagaggggactgaggagttccgagcagaggcacctagcacagcagctcaaaagctggcaaatgcagggcaccatcagaaaccaggctataagtgggcagcaatgggaaaggcaccaggcctctctgggacagacctgggggcagctgagctgggaattaaggtaggcggtgggcccttggtgcaggatgctgttttcaaatctctgatgggtgtggggaggagcagcagggaggacctacctgggagggagaacgagaaccacccgcgggcatccagcgatcgaccctgcattactgagttccaggaggaagagcttttgctgcagaaggagcagaaggaggagcctctgcgggagcagggggcaaagtactcagcagagactgggaggctcatccccgcttccacccgggctgtcggccgccgcagatctcaccagggccagcagagtcagtcttccagcagacatgaaggagtccaggccttcctccttcaggatcaggagctgctggtcctggagctcctgtgtcagatcctggaaacagacttgctaagcgcaatccagttctggctgctctacgctccgcccaaggaaaaagacctcgctctgggactcctgcagacagcagtggctcagctccttccccagcccctagtctccatccctacagaaaagctcctaagccagcttccagaagtgcatgaacctcctcaagagaagcaagagccaccctgcagtcaatccccgaagaaaacgaagatatcaccttttacaaaaagcgaaaaaccagagtacattggagaagctcaagtcctccagatgcattcaagccagaacacagagaagaagacatcgaagccgagggcagagagctgaggggccctaacacttgcacctgccttgctcaagagcagccccaagggttcaggggtgtttctgtctccaccaccttcacagcagtacctgattccctaccgtgaaaactcttactaaataaaaccgtcttccctgagagaggacagttctgctttcctagcagtgggaggcctgtgcttggttgggg

SEQ ID NO: 460582 - DNA, 497 bp, Homo sapiens
atctcattgatatttgttacttggatgttgaaagaagagagattggattccattcgctccattcctctcaggttggattccctcctcggtcaccagcagagctgagagcaggagctgggcttgactcagaccttcccctcagcactcacacatccacctgcagctcccaggtgggggccccaccttcccggtcctctcctgcctgctgtctctcctcccactagagtacattggagaagctcaagtcctccagatgcattcaagccagaacacagagaagaagacatcgaagccgagggcagagagctgaggggccctaacacttgcacctgccttgctcaagagcagccccaagggttcaggggtgtttctgtctccaccaccttcacagcagtacctgattccctaccgtgaaaactcttactaaataaaaccgtcttccctgagagaggacagttctgctttcctagcagtgggaggcctgtgcttggttgggg

SEQ ID NO: 460583 - DNA, 480 bp, Homo sapiens
  misc_feature (43)..(43): n is a, c, g, or t
  misc_feature (87)..(87): n is a, c, g, or t
  misc_feature (89)..(89): n is a, c, g, or t
atcaccttttacaaaaagcgaaaaaccagcacccacaatgtgngaatcttttgggggggggggggggaattttcccacgtttgaagngnaaaaggaaaaaaattttttttccaaagacaagttcctgctgtcacggaacttacatcccagcaaggaggaatacagacaacaaattaaaacacctggggaggagtggagacagatactagtacattggagaagctcaagtcctccagatgcattcaagccagaacacagagaagaagacatcgaagccgagggcagagagctgaggggccctaacacttgcacctgccttgctcaagagcagccccaagggttcaggggtgtttctgtctccaccaccttcacagcagtacctgattccctaccgtgaaaactcttactaaataaaaccgtcttccctgagagaggacagttctgctttcctagcagtgggaggcctgtgcttggttgggg

SEQ ID NO: 460584 - DNA, 737 bp, Homo sapiens
aaatcttagtgccctctgcgaatgtttatttagtttccattatgttttccccttgtttctatgatcaacaaaaggcaaaacagagaacgctaagcctggctgaagaggcgaagacccttctctccagcctgtgctcaggaacagacggtagcctccgttacgcaaagacggaacttcagcagatttgttatggaacccagcaccaggctagaacttctgctggtcagtcttcagtgcaggggtcataccacagggaacagcactcaacttcctccttcaaactgtgtcctgaacgacaggaccttcaagcctcaggatatacatgggaggaaataaaacttcttgattcctcctgtggctgggggaaccatagagagatcagtcccttgcaactgtccctggggacacttactgagctcctggactgccaagtgctgctggctccccatctgaatactggaaccaaattcaagctggtttgtcttttactgagaagcctttgaattctttgaatatgttctgactggtgtctagccagtgggagatgtgattacagaaattgatgggcctgtggcacagactgctttctgaaaacacagggttgtgtattttgaaagtgattccataaatgcttatttcacctgactccagttttctgtatgtgaaagcagtggctaatgtgtcaaatgaggacaaccaagccatcaaggtctttcctctggaaggtcacagaagaa

SEQ ID NO: 460585 - DNA, 1433 bp, Homo sapiens
cagccagagctccagctgcgcctcttcctcctgttcttaggaatctgtgtggtcacagtgaacagccagagctccagctgcgcctcttcctcctgttcttaggaatctatgtggtcacagtggtgggcaacttgagcatgatcacactgattgggctcagttctcacctgcatacccccatgtactatttcctcagtggtctgtccttcattgatatctgccattccactatcattacccccaaaatgctggtgaactttgtgacagagaagaacatcatctcctaccctgaatgcatgactcagctttacttcttcctcatttttgctattgcagagtgtcacatgttggctgtaacggcatatgaccgctatgttgccatctgcagccccttgctgtacaatgtcatcatgtcctatcaccactgcttctggctcacagtgggagtttacattttaggcatccttggatctacaattcacaccggctttatgttgagactctttttgtgcaagactaatgtgattaaccattatttttgtgatctcttccctctcttggggctctcctgctccagcacctacatcaatgaattactggttctggtcttgagtgcatttaacatcctgacgcctgccttaaccatccttgcttcttacatctttatcattgccagcatcctccgcattcgctccactgagggcaggtccaaagccttcagcacttgcagctcccacatcttggctgttgctgttttctttgggtctgcagcattcatgtacctgcagccatcatctgtcagctccatggaccaggggaaagtgtcctctgtgttttatactattgttgtgcccatgctgaacccccaatctatagcctaagaaataaggatgtcaaatttgccctgaagaaaaatctggacagcaaagcatgttcatgaatccaattattgccatgttgtcatatcaaaacaggctttcagtttgattagatatgtaatatgttagatttattgtgcaaatttatcaaaatatagtgatgctcttttattaaaagacacagccttcaatattccaaacaccgcatatgaaagaagttttcttcccttttgattcccttttgatataagacaacgcacgctaattatcctattacctttgaatatttccaagttattcacagcttctgtgtccctttcattttgtctatgtccctccttacaaaggacattaataataaaaacaaaactttaaatataatgtataatatatttggaattttactttgacacatgaagtgatttttaaaatcatgtgtttactgcttgacataataagggactgcatttataattcattatcccttattttatgactgcctttcacaccctcctagcatgaagggttgttgaattttgtcaaaggccttttctg

SEQ ID NO: 460586 - DNA, 514 bp, Homo sapiens
cttaaagggaagggatggttgctgtcttgctcttcttcatttttcctgcagatatctaatgtatattcacttgaaaatggaagggatgcagataaaagagaggagggcgcagagcggtttggtcgttcgttggaccagtgtcggttcttcgctcgcgactgcggctcttcctcgggcagcggaagcagcgcggaggtcggagaagtggcctaaaacttcggcgttgggtgaaagaaaatggcccgaaccaagcagactgctcgtaaatccaccggtgggaaagccccccgcaaacagctggccacgaaagctgccaggaaaagcaccccctctacctgcggggtgaagcctcatcgctacaggcctgggaccgtggcgcttcgagagattcgtcgttatcagaagtcgaccgagctgctcatccggaagctgcccttccagaggttggtgagggagatcgcgcaggatttcaaaaccgcccagtataccccggatccgcccgtatggtccgcct

SEQ ID NO: 460587 - DNA, 1633 bp, Homo sapiens
cttaaagggaagggatggttgctgtcttgctcttcttcatttttcctgcagatatctaatgtatattcacttgaaaatggaagggatgcagataaaagagaggagggcgcagagcggtttggtcgttcgttggaccagtgtcggttcttcgctcgcgactgcggctcttcctcgggcagcggaagcagcgcggaggtcggagaagtggcctaaaacttcggcgttgggtgaaagaaaatggcccgaaccaagcagactgctcgtaaatccaccggtgggaaagccccccgcaaacagctggccacgaaagctgccaggaaaagcaccccctctacctgcggggtgaagcctcatcgctacaggcctgggaccgtggcgcttcgagagattcgtcgttatcagaagtcgaccgagctgctcatccggaagctgcccttccagaggttggtgagggagatcgcgcaggatttcaacactgacctgaggtttcagagcgcagccgtcggtgcgctgcaggaggctagcgaagcgtacctggtgggtctgttggaagatactaacctgtgtgccatccacgctaagagagtcaccatcatgcccaaagacatccagttggctcgccggatacggggagagagagcttaagtgaaggcagtttttatggcattttgtagtaaattctgtaaaatactttggtttaattggtgactttttttgtaagaaattgtttatatgttgcatttgtacttaagtcattccatctttcactcaggatgaatgcgaaaagtgactgtttacagacctcagtgatgtcagcactgttgctcaggagtgacaagttgttaatatgcaaaacggatgcgtgatatttcttgcttctcatgatgcatgtttctgtatgttaatgacttgttgggtagctattaaggtactagaattgataaatgtgtacaacagggtccttttgcaataaaactggttatgacttgatccaagtgtttaacaattggggctgttaagtctgaccatacatcactgtgatagaatgtaggctttttcaagggtgaagatacaaaccttaaccacagtgtaacttatagtttcctttaaaaaaaaaaaattaaacctggcagctatagaatacaatatgtgcatttataatagctattttatatattgtagtgtcaacattttcaaattaaatgttttacattcacaagtggtggggagtcttgtcattaaggtgtgtgtaatttagagtccagttggttttcttctgactgcacttgttctcatagtagtaaaatgctatgtgcatttataccttgcataaatcctcattctaccacatgttaactaaccctctagctgataatggaaacactaactgggggattttatttataagggctctagaaaaaaatatgagttattcacaccagcatcatctgttaactaatattctgaactagtgcagcttttcattgtgttgtgtggttggtctcataactaggttgagttttctcctctgctaagaggaaacagtactgaagttctttttcttgtggcatttgtattataaaaacttggtgtaggggaggagcacaaagctctagcccactgaacctctgcc

SEQ ID NO: 460588 - DNA, 1464 bp, Homo sapiens
tcctcctcctcctcctcttcttcttcttcttcttcttctcctccttcttcttctttctccttctccttctcctcctccttctccttcttcacacttgtctgcctcataggccagccttgcctgatttatttaactgcaagttagaaactgggagagaaccaacttggagcttttttggtctgggaaagaaaatccaaaccatgcttctctagggcctcctgacctggctaagcaccttggagggaaccctggccacgagggatccaagcaccgctctggtttcccagaagcctgtggatgactctcatctggcggtggacctcagatggggctcagcagtgaaagaggggaagacaaaaatctggcgagcgagctgcccgggccgagactggccacttcaaacagcccttcaaacaaaaggagacgacgaaaagaaagccccacctgtctccagtgtttgctaaaataataataaatagatttcgtttaataaataattacaagagattgtaaagtggagtgctttggaaaacatctaccgcgggagtccgtgcagccagccgtcacctgctcctaaggcgaacaactttattgttaagccaccccccaactagttcgccctgataaactctccctcattttcacaatgactgtttactcatagttagcacaatattacctttgccgtgataaacccggaggggggagacctggcccctggcccctggacacacctgtcccagaagctgacacatggatttggcaccaagcaggcctccccgcgggggccctgcccccatcccccctccctgctcagggccgcctcccctaggcgtccgcagctcgcgcgcggcgcctggaaacaaagtgtccacattatcctcgccggcggctgagaccaggaaaatcaaccctagtgctcagagcattgcaggggatcatttgatgttaccaccatgcagtgtggctaatgagctaaagactttgacaccagtgggaatagcaataattatggtggcagatgtgaaggagggtagactgttcagccggtcttggcacctgactattgaggatgcaagtaggagtagaaaagatgggagaagaagttggaagcttgtattatttatccagggaaatgccatgtctggcacaccaattattagggggacttgtcagtttgctgaaacccccgattataatgggcataactatgaagaaaattataacaaatgtgagggcagtgacaataacattataagtctgatcatctcctgatagggtccctggttgacccagttctgcttggattagaagacttaaggcagtatttactatcccagctcaggagaactggtttctggctggaatcaacaaaagggagacactggtggagattaaagggtaggatgaagagagaaaccagaatatttcttctctttcccttctgcctaaggcaacatctct

SEQ ID NO: 460589 - DNA, 3014 bp, Homo sapiens
gaaagaaagttagcttctaactctctaggctgttatctgagaaaactggtcatgatgtcaaacgtggaggaaacaaccaataggcctagtgggatgctctctatttatcagcacagttactggaatccaaacaaagaaactttccagaatgacaaccgtgctctgccactgaactgtaggacttcccatgcagcgcgtaagccatgcaggcttattactcacaccacactcacctggacccagagacctccaggcactgaggactgcgtctcccggaagtatttccctgagaaattgcagaggacctcagtcctgcaactcacacagaggctgttcttcgtggccggaaccggaccccacgccctctggggcacatccctgagtgcgagcactcttctctcgccctcctcccacccaggcaccgtcccaactgggcactgccttgctatgccccacatctcccacaagggggagccgccggagggcagctggggctgcggaattttggaagcgcagaagttttctcctcctgtcctgtaactggttttcactcactcaactgagagatttctttgttgcaatgatggggtctaagataacacttctggaggctgcaggcgagaaacacagctgatatcatcttttattgtgtgttgttatttgcctagcattataaattaaggaggaatagtaacaaagagcttgaagacatgcacagctcacaggccccgggtggaggctggcgacatcagacagacagaaccaagacatctgaggggcaaccaggaggtgcgtgtggctgcagagcacacaggtaggtacccgcaagaggacagtcgtgacggggggaggagcggatggagcattcacaaaaggtggtcagcagagattaaaggggaaaggcagtgcagaggagttgggagatggagggagagaagagggaggagtcccaaaggagcgcaaaagaaaaaaatgtttgcagggtgtgatacaaaaggctgaccacggagtgggagagggagggtttggaaagtgaatcagagacataagagggtttgaagttggttccaactcggccaccccagaaacttcacaaggcaggagaggatgggagattgacacaaaaggctcagttgcacaagaaaattcaaaggttctttcaacaaactcatttaattgttgctgccccttagctagtgctgagtcactctcaaacttcacagcattccacgacagctcatccttcttgactttcctttttttttcccttttcctttttccttttttaagttctcttaatattttttattcccaacagacttgtctttggacaaaattgagaagaactcataaacttggcttcctcgcttctgctcctcagacccctgcaaacatgacttaccttggaaactataagaaaggatggccttatgtgaggacactcatcatcctggcgttaatgtgcttctcttctatttggcatttgagtccaacactacctgatctcagtccttctttttagaatcaatatttccatagcaagtgtagcatcatcttaaatggggaatcccactttttttttttaaagctagagatggcagtttggtgggattggccaaaaataatttgaagaaagaatgcactaagggtgaaaatgttatgtttataaaaatattatgaaagctaaatgtgatgcacttgaaaaatgtggcaggatatttcactgtatattcatgaaatctgtatctaaactatatcaataaatactattcaagagaatataaaaatttcttccatgtatgcatttctgttcatctagctcattgcttaaccacagaaggttataataataataataaaaacaaacaaaataaatgtttgttagatggatatttatattacaatgtaaataacttattatttatattttatttatgttatgcccataaggaaaatacaatagtcctctgttcaatatttactgggtgtctttagtgtgtcaggcactggactaagtgccaggatgagtgagatgtggtcccttctcccatggaaggtccagagtgggctgcaagtatcatgttggttctgagtcagtcagccatgcttggtgaatcacaaaccactgtgggtggagccttgaagtggctctttgtgggaggatgcagaggaggaagatattttcctcattcatgaggctctcacagtccataggctagtgaacaaataagtacatgaaatgcataatatatgcctagcaaaaagaaacagtggagtatagtacaaatgacttgggatacttttagagataaaacaatgagattttctacctgatgtgaaatctccctgacttgttcagctaatatgtaatttatttaacaactattttttgtgtacttctgtatgcccgaaagtatgccagggatgggcacatggcagtgaacaagaaatgtgtgagactgcgtctaaggaaggtgcaggccaagatgtctaactcagaggtgaaaatgagaaacattcttattaagacgtagagccttttcttggtgactctaagaaacgcttctgtatctgaagacaaaaggaaaagttaatttggttttggattttgccttctaaaacctttggggtttattgggtgttactatcacttgccattttttgtcctctacacttaaaatatgctatacagctcccttcaactcagccatctgtgttcttggcttttaattttcataaaaatggctggacacattcttcttatttcataaatacccaaggccaaagagagatattttattggcatttttcagtaatctttccctaacattgtttttcatatctgttccaaagcctttatattattctacctttcttatgtgtgtgtgttgtgttgtgtgtgtgtgagagagaatatatttgttatattatttgttatagttattatgttaatatatttattataattatgatacaaatgtattagaaattaaaatggtatgttttaatcattt

SEQ ID NO: 460590 - DNA, 838 bp, Homo sapiens
tgatgtattcgttcagaaacacaaagtgtgaatagtactcttatcatcaggaatactgtatgagttcagtgatctttaaacagctcagaagtaatacttgaacttcatttgagtagcacaaagtttacatagccccttttaaatgttaattcgttccatttaagttttccattttcagatgcaactgggtatttttcctcttggaaatagtacgtactttgctttggtatgtagcaaaaggcttccatttctggaagggttttcttgttcttaaacaaggtcagccaggtaccagattctaaaagaacaaattgtcccccacccctcaagtggccttctgactgcacgagaatgtgctactaccctctgtagtctcccctaacacgagaggtcagtgaaattgatggaggaagtgcaaggcttgcttcccctcacccttaaagcttaaagcagttgtaagattttcagtccagcacatacagtcccagtgcccagcacaccggaagtttgtatactggcctcttatcttgtcttcaaatgtgcaggaaatttgaaactgtcatctggaataggttccatctcttatgtgtgttagatcaaaccaaagaagcccccagccatgcccaaatgctgcttcaaaagcctgccttccagtccttacaaaaaccttgcaggattaaatgtgttaacttttttatttttgtacagtttctaagtgatttttgctagtgatgttaaaatgaattaagtttatttgaggggtgtgagcacctcctccatttaaataaactggtgactttccttttattttttaaaagtggaaacccgttgtgtgcct

SEQ ID NO: 460591 - DNA, 2195 bp, Homo sapiens
ggattgcacgcatgtatgcctttagcagctggatgtctcgtcgacgcggccgcgtcgacgctggatggggagagctgtatggacgctcaggctacaactattttttctcagggggtgcagatgatgcctgggcagatgtggaggacgtcacggaggaggactgtgctcttcgaagtggtgacacgcatctttttgataaggtcagaggctatgacatcaagctgcttcgatacctgtcagtcaaatacatctgtgacctgatggtggagaacaagaaggtgaagtttggcatgaatgtaacctcctctgagaaggtggacaaagcccagcgctatgccgacttcactctcctctccatcccgtatccaggctgtgaatttttcaaggaatataaagatcgggattacatggcagaagggctcatatttaactggaagcaggactacgttgatgccccattgagcatccccgacttcctgactcactctctgaacattgactggagccagtatcagtgttgggatctggtgcaacaaacacaaaactacctgaagctgctgctttccttagttaacagtgatgatgacagcgggctgctggtacactgtatctcaggctgggatcggacccccctcttcatctccctcctgcgcctttccttgtgggctgatgggctcatccacacgtccctgaagcccactgagatcctctacctcactgtggcctatgactggttcctcttcgggcacatgttggtagatcggctcagcaaaggggaggagattttcttcttctgcttcaattttttgaagcatattacctccgaggagttctctgctctgaagacccagaggaggaagagtttgccagcccgggatggaggcttcaccctggaagacatctgcatgctgagacgaaaggaccgtggcagcaccaccagccttggcagcgacttctccctggaggtgcgctcagccttcttggctgcgtacagcagcacagtggggcttcgggcagtagcccccagtccttccggtgccatcgggggcctgctggagcaatttgcccgtggtgttggactccggagcatcagcagcaatgccttgtgaagaagccagcccatgacattttcctgctcctctctcagctgagcccttagcagagaatcaaagccatgcctggccgaaggggtacttccaggtcaggggaaatttcagtcccccatctccatcatgaacatggcagccccaaagctgagcaaggccaaagacagggttttccaacccccagcctcttgactggtgaccaccaccccttcttgtcactgtctcccacccaccccatctttgctgggattcccatcaactctcagaactgtgtggggtttccctggggccttgtggaagccatgacttcacaaagaccctacctgtcagttcttgtttctggggaggagggatcacctgcactgagaatgaggcagtttgacacagatcacaaaataaaatcaaagtctttttgaaaagtcgacgcggccgcgtcgacgtatttttcctcttggaaatagtacgtactttgctttggtatgtagcaaaaggcttccatttctggaagggttttcttgttcttaaacaaggtcagccaggtaccagattctaaaagaacaaattgtcccccacccctcaagtggccttctgactgcacgagaatgtgctactaccctctgtagtctcccctaacacgagaggtcagtgaaattgatggaggaagtgcaaggcttgcttcccctcacccttaaagcttaaagcagttgtaagattttcagtccagcacatacagtcccagtgcccagcacaccggaagtttgtatactggcctcttatcttgtcttcaaatgtgcaggaaatttgaaactgtcatctggaataggttccatctcttatgtgtgttagatcaaaccaaagaagcccccagccatgcccaaatgctgcttcaaaagcctgccttccagtccttacaaaaaccttgcaggattaaatgtgttaacttttttatttttgtacagtttctaagtgatttttgctagtgatgttaaaatgaattaagtttatttgaggggtgtgagcacctcctccatttaaataaactggtgactttccttttattttttaaaagtggaaacccgttgtgtgcct

SEQ ID NO: 460592 - DNA, 2523 bp, Homo sapiens
tcctcagggctctggcgccaagttcagagccgcgcgctgggcgcttggcggtggcggccgcgtctgcacctcctccctgcgcgccgcctgacagcctgggagagaagcgccctcagagagacatgttgggccgcggttctcttcatccacccatccctccgttcatgacatattgctccattatcttcttgggctggctgctaggacaagtcaactcaggggaggcagcagggtgcgggccttggcccgcagccctagccggggccggggccagggctggtgcccggggcctcgctgtgaggtaggcaggcgaggagcgggaagaccatctctgcaagtgcagcatagcctcggcctaggacagcgggagtgcgtggccaaagctgtgagcagaggcacaggtggtggcagacagtagaggcgccccatggggaacatactgacctgtcgtgtgcaccctagcgtcagcctcgagtttgaccagcagcaggggtcggtgtgtccctctgaatctgagatctatgaggcaggagctgaggacaggatggcaggagcgcccatggctgctgctgtacagcctgctgaggtgactgttgaagttggtgaggacctccacatgcaccacgttcgtgaccgggagatgcctgaaggtgaggaggtgataggtgccatctaccctcgtgtgaccttggagatacctcatcatatcacacaaagagatgcagatagatctttgagcatacctgatgaacagttacactcatttgcggtttccaccgtgcacattacgaagaacagaaatggaggtgggagtttaaataactattcctcctccattccatcgactcccagcaccagccaggaggaccctcagttcagtgttcctcccactgccaacacacccacccccgtttgcaagcggtccatgcgctggtccaacctgtttacatctgagaaagggagtgacccagacaaagagaggaaagccccggagaatcatgctgacaccatcgggagcggcagagccatccccattaaacagggcatgctcttaaagcgaagtgggaaatggctgaagacatggaaaaagaaatacgtcaccctgtgttccaatggtgtgctcacctattattcaagcttaggtgattatatgaagtatattcataaaaaagagattgaccttcagacatctaccatcaaagtcccaggaaagtggccatccctagccacattggcctgcacacccatctccagctctaaaagcgatggcctatccaaggacatggacaccgggctgggtgactccatatgcttcagccccagtatctccagcaccaccatccccaagctcaacccgcccccctctcctcatgccaataaaaagaaacacctaaagaagaaaagcaccaacaactttatgattgtgtctgccactggccaaacgtggcactttgaagccacgacatatgaggagcgggatgcatgggtccaagccatccagagccagatcctggccagcctgcagtcatgcgagagcagtaaaagcaagtcccagctgaccagccagagcgaggccatggccctgcagtcgatccaaaacatgcgtgggaacgcccactgtgtggactgtgagacccagaatcctaagtgggccagtttgaacttgggagtcctcatgtgtattgaatgctcaggtatccaccgcagtcttggcacccgcctttcccgtgtgcgatctctggagctggatgactggccagttgagctcaggaaggttatgtcatctattggcaatgacctagccaacagcatctgggaagggagcagccaggggcggacaaaacccacagagctctttctggccccactaccctgcactgagctgtccctgggccagcagctgctgcgggccaccgctgatgaggacctgcagacagccatcctgctgctggcacatggctcccgtgaggaggtgaacgagacctgtggggagggagacggctgcacggcgctccatctggcctgccgcaaggggaatgtggtcctggcgcagctcctgatctggtacggggtggacgtcatggcccgagatgcccacgggaacacagcgctgacctacgcccggcaggcctccagccaggagtgcatcaacgtgcttctgcagtacggctgccccgacaagtgtgtgtagtatctgttttatttgactgcagtctccttggtgcaaaaacaaaatgggaaaaataaggataactcagaatttcaaaaggaaatcacaaattcagctaataatagcattttcagtacttttcgtaaactaagtaaatacacaaaatgttgatttttctgaccataagacgtattttatgtccttttgccaaggtggatttgttagtctcaggccctcctggccacattgcccaagtcacacaggcttctgtattatgtatttagataaaatgtgtgaaaatatatttgaaataaagttcataaatatgcattgattttttacacatggcacct

SEQ ID NO: 460593 - DNA, 2577 bp, Homo sapiens
tcctcagggctctggcgccaagttcagagccgcgcgctgggcgcttggcggtggcggccgcgtctgcacctcctccctgcgcgccgcctgacagcctgggagagaagcgccctcagagagacatgttgggccgcggttctcttcatccacccatccctccgttcatgacatattgctccattatcttcttgggctggctgctaggacaagtcaactcaggggaggcagcagggtgcgggccttggcccgcagccctagccggggccggggccagggctggtgcccggggcctcgctgtgaggtaggcaggcgaggagcgggaagaccatctctgcaagtgcagcatagcctcggcctaggacagcgggagtgcgtggccaaagctgtgagcagaggcacaggtggtggcagacagtagaggcgccccatggggaacatactgacctgtcgtgtgcaccctagcgtcagcctcgagtttgaccagcagcaggggtcggtgtgtccctctgaatctgagatctatgaggcaggagctgaggacaggatggcaggagcgcccatggctgctgctgtacagcctgctgaggtgactgttgaagttggtgaggacctccacatgcaccacgttcgtgaccgggagatgcctgaaggtgaggaggtgataggtgccatctaccctcgtgtgaccttggagatacctcatcatatcacacaaagagatgcagatagatctttgagcatacctgatgaacagttacactcatttgcggtttccaccgtgcacattacgaagaacagaaatggaggtgggagtttaaataactattcctcctccattccatcgactcccagcaccagccaggaggaccctcagttcagtgttcctcccactgccaacacacccacccccgtttgcaagcggtccatgcgctggtccaacctgtttacatctgagaaagggagtgacccagacaaagagaggaaagccccggagaatcatgctgacaccatcgggagcggcagagccatccccattaaacagggcatgctcttaaagcgaagtgggaaatggctgaagacatggaaaaagaaatacgtcaccctgtgttccaatggtgtgctcacctattattcaagcttaggtgattatatgaagtatattcataaaaaagagattgaccttcagacatctaccatcaaagtcccaggaaagtggccatccctagccacattggcctgcacacccatctccagctctaaaagcgatggcctatccaaggacatggacaccgggctgggtgactccatatgcttcagccccagtatctccagcaccaccatccccaagctcaacccgcccccctctcctcatgccaataaaaagaaacacctaaagaagaaaagcaccaacaactttatgattgtgtctgccactggccaaacgtggcactttgaagccacgacatatgaggagcgggatgcatgggtccaagccatccagagccagatcctggccagcctgcagtcatgcgagagcagtaaaagcaagtcccagctgaccagccagagcgaggccatggccctgcagtcgatccaaaacatgcgtgggaacgcccactgtgtggactgtgagacccagaatcctaagtgggccagtttgaacttgggagtcctcatgtgtattgaatgctcaggtatccaccgcagtcttggcacccgcctttcccgtgtgcgatctctggagctggatgactggccagttgagctcaggaaggttatgtcatctattggcaatgacctagccaacagcatctgggaagggagcagccaggggcggacaaaacccacagaaaagtccacgagggaagagaaggaacggtggatccgttccaaatatgaggagaagctctttctggccccactaccctgcactgagctgtccctgggccagcagctgctgcgggccaccgctgatgaggacctgcagacagccatcctgctgctggcacatggctcccgtgaggaggtgaacgagacctgtggggagggagacggctgcacggcgctccatctggcctgccgcaaggggaatgtggtcctggcgcagctcctgatctggtacggggtggacgtcatggcccgagatgcccacgggaacacagcgctgacctacgcccggcaggcctccagccaggagtgcatcaacgtgcttctgcagtacggctgccccgacaagtgtgtgtagtatctgttttatttgactgcagtctccttggtgcaaaaacaaaatgggaaaaataaggataactcagaatttcaaaaggaaatcacaaattcagctaataatagcattttcagtacttttcgtaaactaagtaaatacacaaaatgttgatttttctgaccataagacgtattttatgtccttttgccaaggtggatttgttagtctcaggccctcctggccacattgcccaagtcacacaggcttctgtattatgtatttagataaaatgtgtgaaaatatatttgaaataaagttcataaatatgcattgattttttacacatggcacct

SEQ ID NO: 460594 - DNA, 2683 bp, Homo sapiens
cggctgggaggaatcggtcctccactgtcccagccggccccgcgccggcgtgtcgcctcccgtccccctagcagcacgctgcgtggctgctcgctggctatttaggacggaagctcggttggtgtttctccagaagtttcccccttgggcggtggtggaggtggtaaccgtgatagtagcagctccggcggcagcaacagcgactacgagggatggcggcggctgcagcaggaactgcaacatcccagaggtttttccagagcttctcggatgccctaatcgacgaggacccccaggcggcgttagaggtgagagagcccatttctgcttcctccactcttcttaggggagctgggccacttcgggtccccgctgacccgccttctccccgcaccgccggacagggacccaggctcttgttgatgctgcgtctcagctccggagctgactaaggctttggaacagaaaccagatgatgcacagtattattgtcaaagagcttattgtcacattcttcttgggaattactgtgttgctgttgctgatgcaaagaagtctctagaactcaatccaaataattccactgctatgctgagaaaaggaatatgtgaataccatgaaaaaaactatgctgctgccctagaaacttttacagaaggacaaaaattagatagtgcagatgctaatttcagtgtctggattaaaaggtgtcaagaagctcagaatgggctcagaatctgaggtggtaagtccaaagttttcattcttcatgtttttattattttaaatttcagctaccaaatatatttgagacaagactcaggatgagctgtctgatatttaaatattaagcaattccatttaagtgctggttcctctaggcactgaaataaaatcattttttgataaatatagaagtttccagtcatgaaaattattggcctattttaatgaatttagtgtatgactggtatcaaacagaatctcaagtagtcattacacttatgatcaagaatgttcagaagaatgatgtaaatgtggaattttcagaaaaagagttgtctgctttggttaaacttccttctggagaggattacaatttgaaactggaacttcttcatcctataataccagaacagagcacgtttaaagtactttcaacaaagattgaaattaaactgaaaaagccagaggctgtgagatgggaaaagctagaggggcaaggagatgtgcctacgccaaaacaattcgtagcagatgtaaagaacctatatccatcatcatctccttatacaagaaattgggataaattggttggtgagatcaaagaagaagaaaagaatgaaaagttggagggagatgcagctttaaacagattatttcagcagatctattcagatggttctgatgaagtgaaacgtgccatgaacaaatcctttatggagtcgggtggtacagttttgagtaccaactggtctgatgtaggtaaaaggaaagttgaaatcaatcctcctgatgatatggaatggaaaaagtactaaataaattaatttgctctcatcgtattgtgtatattcacctaatgcccattgtgtattgatattgcattcttgaattttgaacactgaatatctttttgaaagattatacttctttacctctttgtgctttagaaattattttccttcaagtgttcaagtctaatgaagaatgaagataacattttatcacttctgtccttaaagatttcagacatggtgaaactgaataaagcatgtcatttgctcctagatagattcattctatctagttgtggggatggagaaatctttaatggtatattttcggttattgccttatttttgatacagtattctgtcagtaatttattagacctggcagctttgggtgagcttagatttttcaccttcagtgttacattgtgtttgcttttaaaaactgcttttgaatggagttgtaaatacaatttttctatgaagatgtttggtttatttacctttttcttaagtttttaatgagaactttgagaaattatcacagggaattcccatgtagttcttttaatgggaagaatttgtaaatttaattgcactgagatattttggtcgttaccttgcaagtttctgtataaaacatagatacctgagttttaacacactgcaagtttatactaaggataatctgtgaaggattgtgaggatttaataactaagtcctgactcaaattatgttaccaataaatgctacttaaatgtaaagtccttgatttattttttcccctcagtcctgtttagtgttgaaattcttcaaaggaggtgagcctttactttaaggtatgtagtagaataatataggtatctgaaaaagaacttggttcatgacatccactcattcatttatgcacttagcaaatattcattgattgccaaatacgcatcagacactgagctaggtgctaggtactagtcagtcaacactaaacctgttttgtaaatttgatgctagtattatactggactttctcaaaatgaagtacacctatatatgcatatagtatatgagcatgtgtatttgtacaaaagcccttcaaaaggagttcagcttttataaacaccaaaacactctctgcctgtaaaatgtttttgctgaaatttgtatcatt

SEQ ID NO: 460595 - DNA, 651 bp, Homo sapiens
  misc_feature (27)..(27): n is a, c, g, or t
  misc_feature (48)..(48): n is a, c, g, or t
cgcctgagcggccgcaggggagagagntgagtctaggaaaagcactcngttgtatgactggtatcaaacagaatctcaagtagtcattacacttatgatcaagaatgttcagaagaatgatgtaaatgtggaattttcagaaaaagagttgtctgctttggttaaacttccttctggagaggattacaatttgaaactggaacttcttcatcctataataccagaacagagcacgtttaaagtactttcaacaaagattgaaattaaactgaaaaagccagaggctgtgagatgggaaaagctagaggggcaaggagatgtgcctacgccaaaacaattcgtagcagatgtaaagaacctatatccatcatcatctccttatacaagaaattgggataaattggttggtgagatcaaagaagaagaaaagaatgaaaagttggagggagatgcagctttaaacagattatttcagcagatctattcagatggttctgatgaagtgaaacgtgccatgaacaaatcctttatggagtcgggtggtacagttttgagtaccaactggtctgatgtaggtaaaaggaaagttgaaatcaatcctcctgatgatatggaatggaaaaagtactaaataaattaatttgctctcat

SEQ ID NO: 460596 - DNA, 609 bp, Homo sapiens
actaactctgttagaaagctctttaacggaatctcaagtagtcattacacttatgatcaagaatgttcagaagaatgatgtaaatgtggaattttcagaaaaagagttgtctgctttggttaaacttccttctggagaggattacaatttgaaactggaacttcttcatcctataataccagaacagagcacgtttaaagtactttcaacaaagattgaaattaaactgaaaaagccagaggctgtgagatgggaaaagctagaggggcaaggagatgtgcctacgccaaaacaattcgtagcagatgtaaagaacctatatccatcatcatctccttatacaagaaattgggataaattggttggtgagatcaaagaagaagaaaagaatgaaaagttggagggagatgcagctttaaacagattatttcagcagatctattcagatggttctgatgaagtgaaacgtgccatgaacaaatcctttatggagtcgggtggtacagttttgagtaccaactggtctgatgtaggtaaaaggaaagttgaaatcaatcctcctgatgatatggaatggaaaaagtactaaataaattaatttgctctcat

SEQ ID NO: 460597 - DNA, 550 bp, Homo sapiens
  misc_feature (42)..(43): n is a, c, g, or t
  misc_feature (47)..(47): n is a, c, g, or t
atgtaagtaaatcttttacaaatgtgcgaacaacacagaaannctgnttgtctgctttggttaaacttccttctggagaggattacaatttgaaactggaacttcttcatcctataataccagaacagagcacgtttaaagtactttcaacaaagattgaaattaaactgaaaaagccagaggctgtgagatgggaaaagctagaggggcaaggagatgtgcctacgccaaaacaattcgtagcagatgtaaagaacctatatccatcatcatctccttatacaagaaattgggataaattggttggtgagatcaaagaagaagaaaagaatgaaaagttggagggagatgcagctttaaacagattatttcagcagatctattcagatggttctgatgaagtgaaacgtgccatgaacaaatcctttatggagtcgggtggtacagttttgagtaccaactggtctgatgtaggtaaaaggaaagttgaaatcaatcctcctgatgatatggaatggaaaaagtactaaataaattaatttgctctcat

SEQ ID NO: 460598 - DNA, 511 bp, Homo sapiens
ctttcaacaaagatgaaattactttaaacgtgctctgtctggtattataggatgaagaagttccagtttcaaatgtaataccagaacagagcacgtttaaagtactttcaacaaagattgaaattaaactgaaaaagccagaggctgtgagatgggaaaagctagaggggcaaggagatgtgcctacgccaaaacaattcgtagcagatgtaaagaacctatatccatcatcatctccttatacaagaaattgggataaattggttggtgagatcaaagaagaagaaaagaatgaaaagttggagggagatgcagctttaaacagattatttcagcagatctattcagatggttctgatgaagtgaaacgtgccatgaacaaatcctttatggagtcgggtggtacagttttgagtaccaactggtctgatgtaggtaaaaggaaagttgaaatcaatcctcctgatgatatggaatggaaaaagtactaaataaattaatttgctctcat

SEQ ID NO: 460599 - DNA, 373 bp, Homo sapiens
actaactctgttagaaagctctttaacggaatctcaagtagtcattacacttatgatcaagaatgttcagaagaatgatgtaaatgtggaattttcagaaaaagagttgtctgctttggttaaacttccttctggagaggattacaatttgaaactggaacttcttcatcctataataccagaacagagcacgtttaaagtactttcaacaaagattgaaattaaactgaaaaagccagaggctgtgagatgggaaaagctagaggggcaaggagatgtgcctacgccaaaacaattcgtagcagatgtaaagaacctatatccatcatcatctccttatacaagaaattgggataaattggttggtgagatc

SEQ ID NO: 460600 - DNA, 1234 bp, Homo sapiens
cggctgggaggaatcggtcctccactgtcccagccggccccgcgccggcgtgtcgcctcccgtccccctagcagcacgctgcgtggctgctcgctggctatttaggacggaagctcggttggtgtttctccagaagtttcccccttgggcggtggtggaggtggtaaccgtgatagtagcagctccggcggcagcaacagcgactacgagggatggcggcggctgcagcaggaactgcaacatcccagaggtttttccagagcttctcggatgccctaatcgacgaggacccccaggcggcgttagaggagctgactaaggctttggaacagaaaccagatgatgcacagtattattgtcaaagagcttattgtcacattcttcttgggaattactgtgttgctgttgctgatgcaaagaagtctctagaactcaatccaaataattccactgctatgctgagaaaaggaatatgtgaataccatgaaaaaaactatgctgctgccctagaaacttttacagaaggacaaaaattagatagtgcagatgctaatttcagtgtctggattaaaaggtgtcaagaagctcagaatggctcagaatctgaggtgtggactcatcagtcaaaaatcaagtatgactggtatcaaacagaatctcaagtagtcattacacttatgatcaagaatgttcagaagaatgatgtaaatgtggaattttcagaaaaagagttgtctgctttggttaaacttccttctggagaggattacaatttgaaactggaacttcttcatcctataataccagaacagagcacgtttaaagtactttcaacaaagattgaaattaaactgaaaaagccagaggctgtgagatgggaaaagctagaggggcaaggagatgtgcctacgccaaaacaattcgtagcagatgtaaagaacctatatccatcatcatctccttatacaagaaattgggataaattggttggtgagatcaaagaagaagaaaagaatgaaaagttggagggagatgcagctttaaacagattatttcagcagatctattcagatggttctgatgaagtgaaacgtgccatgaacaaatcctttatggagtcgggtggtacagttttgagtaccaactggtctgatgtaggtaaaaggaaagttgaaatcaatcctcctgatgatatggaatggaaaaagtactaaataaattaatttgctctcat

SEQ ID NO: 460601 - DNA, 1266 bp, Homo sapiens
aagcagtggtatcaacgcagagtgcccattacggccggggaagctcggttggtgtttctccagaagtttcccccttgggcggtggtggaggtggtaaccgtgatagtagcagctccggcggcagcaacagcgactacgagggatggcggcggctgcagcaggaactgcaacatcccagaggtttttccagagcttctcggatgccctaatcgacgaggacccccaggcggcgttagaggagctgactaaggctttggaacagaaaccagatgatgcacagtattattgtcaaagagcttattgtcacattcttcttgggaattactgtgttgctgttgctgatgcaaagaagtctctagaactcaatccaaataattccactgctatgctgagaaaaggaatatgtgaataccatgaaaaaaactatgctgctgccctagaaacttttacagaaggacaaaaattagatatagagacggggtttcatcgtgttggccaggctggtctccaactcttgacctcaagtgatccacctgccttggactcccaaagtgctgggattacaggtgcagatgctaatttcagtgtctggattaaaaggtgtcaagaagctcagaatggggtcaagaaatctgagagtgtaggattcatcagtccaaaactcgggtatgactggtatcaaacagaatctcaagtagtcattacacttatgatcaagaatgttcagaagaatgatgtaaatgtggaattttcagaaaaagagttgtctgctttggttaaacttccttctggagaggattacaatttgaaactggaacttcttcatcctataataccagaacagagcacgtttaaagtactttcaacaaagattgaaattaaactgaaaaagccagaggctgtgagatgggaaaagctagaggggcaaggagatgtgcctacgccaaaacaattcgtagcagatgtaaagaacctatatccatcatcatctccttatacaagaaattgggataaattggttggtgagatcaaagaagaagaaaagaatgaaaagttggagggagatgcagctttaaacagattatttcagcagatctattcagatggttctgatgaagtgaaacgtgccatgaacaaatcctttatggagtcgggtggtacagttttgagtaccaactggtctgatgtaggtaaaaggaaagttgaaatcaatcctcctgatgatatggaatggaaaaagtactaaataaattaatttgctctcat

SEQ ID NO: 460602 - DNA, 1335 bp, Homo sapiens
cggctgggaggaatcggtcctccactgtcccagccggccccgcgccggcgtgtcgcctcccgtccccctagcagcacgctgcgtggctgctcgctggctatttaggacggaagctcggttggtgtttctccagaagtttcccccttgggcggtggtggaggtggtaaccgtgatagtagcagctccggcggcagcaacagcgactacgagggatggcggcggctgcagcaggaactgcaacatcccagaggtttttccagagcttctcggatgccctaatcgacgaggacccccaggcggcgttagaggagctgactaaggctttggaacagaaaccagatgatgcacagtattattgtcaaagagcttattgtcacattcttcttgggaattactgtgttgctgttgctgatgcaaagaagtctctagaactcaatccaaataattccactgctatgctgagaaaaggaatatgtgaataccatgaaaaaaactatgctgctgccctagaaacttttacagaaggacaaaaattagatatagagacggggtttcatcgtgttggccaggctggtctccaactcttgacctcaagtgatccacctgccttggactcccaaagtgctgggattacaggccagatgctaatttcagtgtctggcattacacaggtgtccaagaaagctcaggaatgggctcagaatctgaggtgtggactcatcagtcaaaaatcaagtatgactggtatcaaacagaatctcaagtagtcattacacttatgatcaagaatgttcagaagaatgatgtaaatgtggaattttcagaaaaagagttgtctgctttggttaaacttccttctggagaggattacaatttgaaactggaacttcttcatcctataataccagaacagagcacgtttaaagtactttcaacaaagattgaaattaaactgaaaaagccagaggctgtgagatgggaaaagctagaggggcaaggagatgtgcctacgccaaaacaattcgtagcagatgtaaagaacctatatccatcatcatctccttatacaagaaattgggataaattggttggtgagatcaaagaagaagaaaagaatgaaaagttggagggagatgcagctttaaacagattatttcagcagatctattcagatggttctgatgaagtgaaacgtgccatgaacaaatcctttatggagtcgggtggtacagttttgagtaccaactggtctgatgtaggtaaaaggaaagttgaaatcaatcctcctgatgatatggaatggaaaaagtactaaataaattaatttgctctcat

SEQ ID NO: 460603 - DNA, 2388 bp, Homo sapiens
aagcagtggtatcaacgcagagtgcccattacggccggggaagctcggttggtgtttctccagaagtttcccccttgggcggtggtggaggtggtaaccgtgatagtagcagctccggcggcagcaacagcgactacgagggatggcggcggctgcagcaggaactgcaacatcccagaggtttttccagagcttctcggatgccctaatcgacgaggacccccaggcggcgttagaggagctgactaaggctttggaacagaaaccagatgatgcacagtattattgtcaaagagcttattgtcacattcttcttgggaattactgtgttgctgttgctgatgcaaagaagtctctagaactcaatccaaataattccactgctatgctgagaaaaggaatatgtgaataccatgaaaaaaactatgctgctgccctagaaacttttacagaaggacaaaaattagatatagagacggggtttcatcgtgttggccaggctggtctccaactcttgacctcaagtgatccacctgccttggactcccaaagtgctgggattacaggtgcagatgctaatttcagtgtctggattaaaaggtgtcaagaagctcagaatggggtcaagaaatctgagagtgtaggattcatcagtccaaaactcgggtatgactggtatcaaacagaatctcaagtagtcattacacttatgatcaagaatgttcagaagaatgatgtaaatgtggaattttcagaaaaagagttgtctgctttggttaaacttccttctggagaggattacaatttgaaactggaacttcttcatcctataataccagaacagagcacgtttaaagtactttcaacaaagattgaaattaaactgaaaaagccagaggctgtgagatgggaaaagctagaggggcaaggagatgtgcctacgccaaaacaattcgtagcagatgtaaagaacctatatccatcatcatctccttatacaagaaattgggataaattggttggtgagatcaaagaagaagaaaagaatgaaaagttggagggagatgcagctttaaacagattatttcagcagatctattcagatggttctgatgaagtgaaacgtgccatgaacaaatcctttatggagtcgggtggtacagttttgagtaccaactggtctgatgtaggtaaaaggaaagttgaaatcaatcctcctgatgatatggaatggaaaaagtactaaataaattaatttgctctcatcgtattgtgtatattcacctaatgcccattgtgtattgatattgcattcttgaattttgaacactgaatatctttttgaaagattatacttctttacctctttgtgctttagaaattattttccttcaagtgttcaagtctaatgaagaatgaagataacattttatcacttctgtccttaaagatttcagacatggtgaaactgaataaagcatgtcatttgctcctagatagattcattctatctagttgtggggatggagaaatctttaatggtatattttcggttattgccttatttttgatacagtattctgtcagtaatttattagacctggcagctttgggtgagcttagatttttcaccttcagtgttacattgtgtttgcttttaaaaactgcttttgaatggagttgtaaatacaatttttctatgaagatgtttggtttatttacctttttcttaagtttttaatgagaactttgagaaattatcacagggaattcccatgtagttcttttaatgggaagaatttgtaaatttaattgcactgagatattttggtcgttaccttgcaagtttctgtataaaacatagatacctgagttttaacacactgcaagtttatactaaggataatctgtgaaggattgtgaggatttaataactaagtcctgactcaaattatgttaccaataaatgctacttaaatgtaaagtccttgatttattttttcccctcagtcctgtttagtgttgaaattcttcaaaggaggtgagcctttactttaaggtatgtagtagaataatataggtatctgaaaaagaacttggttcatgacatccactcattcatttatgcacttagcaaatattcattgattgccaaatacgcatcagacactgagctaggtgctaggtactagtcagtcaacactaaacctgttttgtaaatttgatgctagtattatactggactttctcaaaatgaagtacacctatatatgcatatagtatatgagcatgtgtatttgtacaaaagcccttcaaaaggagttcagcttttataaacaccaaaacactctctgcctgtaaaatgtttttgctgaaatttgtatcatt

SEQ ID NO: 460604 - DNA, 1094 bp, Homo sapiens
cggctgggaggaatcggtcctccactgtcccagccggccccgcgccggcgtgtcgcctcccgtccccctagcagcacgctgcgtggctgctcgctggctatttaggacggaagctcggttggtgtttctccagaagtttcccccttgggcggtggtggaggtggtaaccgtgatagtagcagctccggcggcagcaacagcgactacgagggatggcggcggctgcagcaggaactgcaacatcccagaggtttttccagagcttctcggatgccctaatcgacgaggacccccaggcggcgttagaggagctgactaaggctttggaacagaaaccagatgatgcacagtattattgtcaaagagcttattgtcacattcttcttgggaattactgtgttgctgttgctgatgcaaagaagtctctagaactcaatccaaataattccactgctatgctgagaaaaggaatatgtgaataccatgaaaaaaactatgctgctgccctagaaacttttacagaaggacaaaaattagatatagagacggggtttcatcgtgttggccaggctggtctccaactcttgacctcaagtgatccacctgccttggactcccaaagtgctgggattacaggtgcagatgctaatttcagtgtctggattaaaaggtgtcaagaagctcagaatggctcagaatctgaggtgtggactcatcagtcaaaaatcaagtatgactggtatcaaacagaatctcaagtagtcattacacttatgatcaagaatgttcagaagaatgatgtaaatgtggaattttcagaaaaagagttgtctgctttggttaaacttccttctggagaggattacaatttgaaactggaacttcttcatcctataataccagaacagagcacgtttaaagtactttcaacaaagattgaaattaaactgaaaaagccagaggctgtgagatgggaaaagctagaggggcaaggagatgtgcctacgccaaaacaattcgtagcagatgtaaagaacctatatccatcatcatctccttatacaagaaattgggataaattggttggtgagatc

SEQ ID NO: 460605 - DNA, 998 bp, Homo sapiens
cggctgggaggaatcggtcctccactgtcccagccggccccgcgccggcgtgtcgcctcccgtccccctagcagcacgctgcgtggctgctcgctggctatttaggacggaagctcggttggtgtttctccagaagtttcccccttgggcggtggtggaggtggtaaccgtgatagtagcagctccggcggcagcaacagcgactacgagggatggcggcggctgcagcaggaactgcaacatcccagaggtttttccagagcttctcggatgccctaatcgacgaggacccccaggcggcgttagaggagctgactaaggctttggaacagaaaccagatgatgcacagtattattgtcaaagagcttattgtcacattcttcttgggaattactgtgttgctgttgctgatgcaaagaagtctctagaactcaatccaaataattccactgctatgctgagaaaaggaatatgtgaataccatgaaaaaaactatgctgctgccctagaaacttttacagaaggacaaaaattagatagtgcagatgctaatttcagtgtctggattaaaaggtgtcaagaagctcagaatggctcagaatctgaggtgtggactcatcagtcaaaaatcaagtatgactggtatcaaacagaatctcaagtagtcattacacttatgatcaagaatgttcagaagaatgatgtaaatgtggaattttcagaaaaagagttgtctgctttggttaaacttccttctggagaggattacaatttgaaactggaacttcttcatcctataataccagaacagagcacgtttaaagtactttcaacaaagattgaaattaaactgaaaaagccagaggctgtgagatgggaaaagctagaggggcaaggagatgtgcctacgccaaaacaattcgtagcagatgtaaagaacctatatccatcatcatctccttatacaagaaattgggataaattggttggtgagatc

SEQ ID NO: 460606 - DNA, 1343 bp, Homo sapiens
cccccccccgcggggggcgagcccgctttaaacagattatttcagcagatctattcagatggttctgatgaagtgaaacgtgccatgaacaaatcctttatggagtcgggtggtacagttttgagtaccaactggtctgatgtaggtaaaaggaaagttgaaatcaatcctcctgatgatatggaatggaaaaagtactaaataaattaatttgctctcatcgtattgtgtatattcacctaatgcccattgtgtattgatattgcattcttgaattttgaacactgaatatctttttgaaagattatacttctttacctctttgtgctttagaaattattttccttcaagtgttcaagtctaatgaagaatgaagataacattttatcacttctgtccttaaagatttcagacatggtgaaactgaataaagcatgtcatttgctcctagatagattcattctatctagttgtggggatggagaaatctttaatggtatattttcggttattgccttatttttgatacagtattctgtcagtaatttattagacctggcagctttgggtgagcttagatttttcaccttcagtgttacattgtgtttgcttttaaaaactgcttttgaatggagttgtaaatacaatttttctatgaagatgtttggtttatttacctttttcttaagtttttaatgagaactttgagaaattatcacagggaattcccatgtagttcttttaatgggaagaatttgtaaatttaattgcactgagatattttggtcgttaccttgcaagtttctgtataaaacatagatacctgagttttaacacactgcaagtttatactaaggataatctgtgaaggattgtgaggatttaataactaagtcctgactcaaattatgttaccaataaatgctacttaaatgtaaagtccttgatttattttttcccctcagtcctgtttagtgttgaaattcttcaaaggaggtgagcctttactttaaggtatgtagtagaataatataggtatctgaaaaagaacttggttcatgacatccactcattcatttatgcacttagcaaatattcattgattgccaaatacgcatcagacactgagctaggtgctaggtactagtcagtcaacactaaacctgttttgtaaatttgatgctagtattatactggactttctcaaaatgaagtacacctatatatgcatatagtatatgagcatgtgtatttgtacaaaagcccttcaaaaggagttcagcttttataaacaccaaaacactctctgcctgtaaaatgtttttgctgaaatttgtatcatt

SEQ ID NO: 460607 - DNA, 850 bp, Homo sapiens
gtatattcagtagatggtaaataaatgaccaattcttcagtgagacactgactttctatacctgcatttatgtaccttgatttttaaaaatttttggataaacttgcatgtgtttggcacaaagagagcacaaagtagaggcccttcaagttctcttcagctggtacaagaagagattattttgactggtctttacggtcttcagcaaaagagattataataatcattttttttgggagctaataatattttcaattgaaggtagtttttccacatgcacatctatgctcattagcaaaggatgtagtgcacctccctgactactttaggatttccttttcagattttatggaacttgttaacctctggaatgcctaagtttaaataaaaatattgttttgagtttatattgagctatatattttatctgtataatctattatatatgtattgcatagagtttatattgagctgtatataatagccaatatttggggctctatgcttggaacattttaagaaaaatattctattttgattatatggtccaggaattaatctatttttatttttcattgcagatggagtcgggtggtacagttttgagtaccaactggtctgatgtaggtaaaaggaaagttgaaatcaatcctcctgatgatatggaatggaaaaagtactaaataaattaatttgctctcatcgtattgtgtatattcacctaatgcccattgtgtattgatattgcattcttgaattttgaacactgaatatctttttgaaagattatacttctttacctctttgtgctttagaaattattttccttcaagtgttcaagtctaatgaa

SEQ ID NO: 460608 - DNA, 659 bp, Homo sapiens
ggacgcgttgggctcagattctcagaatctgaggtgtggactcatcagtcaaaaatcaagtatgactggtatcaaacagaatctcaagtagtcattacacttatgatcaagaatgttcagaagaatgatgtaaatgtggaattttcagaaaaagagttgtctgctttggttaaacttccttctggagaggattacaatttgaaactggaacttcttcatcctataataccagaacagagcacgtttaaagtactttcaacaaagattgaaattaaactgaaaaagccagaggctgtgagatgggaaaagctagaggggcaaggagatgtgcctacgccaaaacaattcgtagcagatgtaaagaacctatatccatcatcatctccttatacaagaaattgggataaattggttggtgagatcaaagaagaagaaaagaatgaaaagttggagggagatgcagctttaaacagattatttcagcagatctattcagatggttctgatgaagtgaaacgtgccatgaacaaatcctttatggagtcgggtggtacagttttgagtaccaactggtctgatgtaggtaaaaggaaagttgaaatcaatcctcctgatgatatggaatggaaaaagtactaaataaattaatttgctctcat

SEQ ID NO: 460609 - DNA, 553 bp, Homo sapiens
gcttcgagttatgagctcacaatgtgacgaaaaaaaaaaaaaaacttttgttgtctgctttggttaaacttccttctggagaggattacaatttgaaactggaacttcttcatcctataataccagaacagagcacgtttaaagtactttcaacaaagattgaaattaaactgaaaaagccagaggctgtgagatgggaaaagctagaggggcaaggagatgtgcctacgccaaaacaattcgtagcagatgtaaagaacctatatccatcatcatctccttatacaagaaattgggataaattggttggtgagatcaaagaagaagaaaagaatgaaaagttggagggagatgcagctttaaacagattatttcagcagatctattcagatggttctgatgaagtgaaacgtgccatgaacaaatcctttatggagtcgggtggtacagttttgagtaccaactggtctgatgtaggtaaaaggaaagttgaaatcaatcctcctgatgatatggaatggaaaaagtactaaataaattaatttgctctcat

SEQ ID NO: 460610 - DNA, 548 bp, Homo sapiens
gtgtcataaccttattttacccagaccacacccaaaaaaaccctgttgtctgctttggttaaacttccttctggagaggattacaatttgaaactggaacttcttcatcctataataccagaacagagcacgtttaaagtactttcaacaaagattgaaattaaactgaaaaagccagaggctgtgagatgggaaaagctagaggggcaaggagatgtgcctacgccaaaacaattcgtagcagatgtaaagaacctatatccatcatcatctccttatacaagaaattgggataaattggttggtgagatcaaagaagaagaaaagaatgaaaagttggagggagatgcagctttaaacagattatttcagcagatctattcagatggttctgatgaagtgaaacgtgccatgaacaaatcctttatggagtcgggtggtacagttttgagtaccaactggtctgatgtaggtaaaaggaaagttgaaatcaatcctcctgatgatatggaatggaaaaagtactaaataaattaatttgctctcat

SEQ ID NO: 460611 - DNA, 1330 bp, Homo sapiens
cggctgggaggaatcggtcctccactgtcccagccggccccgcgccggcgtgtcgcctcccgtccccctagcagcacgctgcgtggctgctcgctggctatttaggacggaagctcggttggtgtttctccagaagtttcccccttgggcggtggtggaggtggtaaccgtgatagtagcagctccggcggcagcaacagcgactacgagggatggcggcggctgcagcaggaactgcaacatcccagaggtttttccagagcttctcggatgccctaatcgacgaggacccccaggcggcgttagaggagctgactaaggctttggaacagaaaccagatgatgcacagtattattgtcaaagagcttattgtcacattcttcttgggaattactgtgttgctgttgctgatgcaaagaagtctctagaactcaatccaaataattccactgctatgctgagaaaaggaatatgtgaataccatgaaaaaaactatgctgctgccctagaaacttttacagaaggacaaaaattagatatagagacggggtttcatcgtgttggccaggctggtctccaactcttgacctcaagtgatccacctgccttggactcccaaagtgctgggattacaggtgcagatgctaatttcagtgtctggattaaaaggtgtcaagaagctcagaatggctcagaatctgaggtgtggactcatcagtcaaaaatcaagtatgactggtatcaaacagaatctcaagtagtcattacacttatgatcaagaatgttcagaagaatgatgtaaatgtggaattttcagaaaaagagttgtctgctttggttaaacttccttctggagaggattacaatttgaaactggaacttcttcatcctataataccagaacagagcacgtttaaagtactttcaacaaagattgaaattaaactgaaaaagccagaggctgtgagatgggaaaagctagaggggcaaggagatgtgcctacgccaaaacaattcgtagcagatgtaaagaacctatatccatcatcatctccttatacaagaaattgggataaattggttggtgagatcaaagaagaagaaaagaatgaaaagttggagggagatgcagctttaaacagattatttcagcagatctattcagatggttctgatgaagtgaaacgtgccatgaacaaatcctttatggagtcgggtggtacagttttgagtaccaactggtctgatgtaggtaaaaggaaagttgaaatcaatcctcctgatgatatggaatggaaaaagtactaaataaattaatttgctctcat

SEQ ID NO: 460612 - DNA, 1464 bp, Homo sapiens
cggctgggaggaatcggtcctccactgtcccagccggccccgcgccggcgtgtcgcctcccgtccccctagcagcacgctgcgtggctgctcgctggctatttaggacggaagctcggttggtgtttctccagaagtttcccccttgggcggtggtggaggtggtaaccgtgatagtagcagctccggcggcagcaacagcgactacgagggatggcggcggctgcagcaggaactgcaacatcccagaggtttttccagagcttctcggatgccctaatcgacgaggacccccaggcggcgttagaggagctgactaaggctttggaacagaaaccagatgatgcacagtattattgtcaaagagcttattgtcacattcttcttgggaattactgtgggaaaaactgaataccttgagtaaaattacatagaaaatgttaatgagacaaggaggtgaattttgtgacacagctgtattcattgaagagctttaagaaggaagctaaatgttaagccaaaaggaagttgctgttgctgatgcaaagaagtctctagaactcaatccaaataattccactgctatgctgagaaaaggaatatgtgaataccatgaaaaaaactatgctgctgccctagaaacttttacagaaggacaaaaattagatatagagacggggtttcatcgtgttggccaggctggtctccaactcttgacctcaagtgatccacctgccttggactcccaaagtgctgggattacaggtgcagatgctaatttcagtgtctggattaaaaggtgtcaagaagctcagaatggggtcaagaaatctgagagtgtaggattcatcagtccaaaactcgggtatgactggtatcaaacagaatctcaagtagtcattacacttatgatcaagaatgttcagaagaatgatgtaaatgtggaattttcagaaaaagagttgtctgctttggttaaacttccttctggagaggattacaatttgaaactggaacttcttcatcctataataccagaacagagcacgtttaaagtactttcaacaaagattgaaattaaactgaaaaagccagaggctgtgagatgggaaaagctagaggggcaaggagatgtgcctacgccaaaacaattcgtagcagatgtaaagaacctatatccatcatcatctccttatacaagaaattgggataaattggttggtgagatcaaagaagaagaaaagaatgaaaagttggagggagatgcagctttaaacagattatttcagcagatctattcagatggttctgatgaagtgaaacgtgccatgaacaaatcctttatggagtcgggtggtacagttttgagtaccaactggtctgatgtaggtaaaaggaaagttgaaatcaatcctcctgatgatatggaatggaaaaagtactaaataaattaatttgctctcat

SEQ ID NO: 460613 - DNA, 1362 bp, Homo sapiens
cggctgggaggaatcggtcctccactgtcccagccggccccgcgccggcgtgtcgcctcccgtccccctagcagcacgctgcgtggctgctcgctggctatttaggacggaagctcggttggtgtttctccagaagtttcccccttgggcggtggtggaggtggtaaccgtgatagtagcagctccggcggcagcaacagcgactacgagggatggcggcggctgcagcaggaactgcaacatcccagaggtttttccagagcttctcggatgccctaatcgacgaggacccccaggcggcgttagaggagctgactaaggctttggaacagaaaccagatgatgcacagtattattgtcaaagagcttattgtcacattcttcttgggaattactgtgggaaaaactgaataccttgagtaaaattacatagaaaatgttaatgagacaaggaggtgaattttgtgacacagctgtattcattgaagagctttaagaaggaagctaaatgttaagccaaaaggaagttgctgttgctgatgcaaagaagtctctagaactcaatccaaataattccactgctatgctgagaaaaggaatatgtgaataccatgaaaaaaactatgctgctgccctagaaacttttacagaaggacaaaaattagatagtgcagatgctaatttcagtgtctggattaaaaggtgtcaagaagctcagaatggctcagaatctgaggtgtggactcatcagtcaaaaatcaagtatgactggtatcaaacagaatctcaagtagtcattacacttatgatcaagaatgttcagaagaatgatgtaaatgtggaattttcagaaaaagagttgtctgctttggttaaacttccttctggagaggattacaatttgaaactggaacttcttcatcctataataccagaacagagcacgtttaaagtactttcaacaaagattgaaattaaactgaaaaagccagaggctgtgagatgggaaaagctagaggggcaaggagatgtgcctacgccaaaacaattcgtagcagatgtaaagaacctatatccatcatcatctccttatacaagaaattgggataaattggttggtgagatcaaagaagaagaaaagaatgaaaagttggagggagatgcagctttaaacagattatttcagcagatctattcagatggttctgatgaagtgaaacgtgccatgaacaaatcctttatggagtcgggtggtacagttttgagtaccaactggtctgatgtaggtaaaaggaaagttgaaatcaatcctcctgatgatatggaatggaaaaagtactaaataaattaatttgctctcat

SEQ ID NO: 460614 - DNA, 1363 bp, Homo sapiens
cggctgggaggaatcggtcctccactgtcccagccggccccgcgccggcgtgtcgcctcccgtccccctagcagcacgctgcgtggctgctcgctggctatttaggacggaagctcggttggtgtttctccagaagtttcccccttgggcggtggtggaggtggtaaccgtgatagtagcagctccggcggcagcaacagcgactacgagggatggcggcggctgcagcaggaactgcaacatcccagaggtttttccagagcttctcggatgccctaatcgacgaggacccccaggcggcgttagaggagctgactaaggctttggaacagaaaccagatgatgcacagtattattgtcaaagagcttattgtcacattcttcttgggaattactgtgttgctgttgctgatgcaaagaagtctctagaactcaatccaaataattccactgctatgctgagaaaaggaatatgtgaataccatgaaaaaaactatgctgctgccctagaaacttttacagaaggacaaaaattagatatagagacggggtttcatcgtgttggccaggctggtctccaactcttgacctcaagtgatccacctgccttggactcccaaagtgctgggattacaggtgcagatgctaatttcagtgtctggattaaaaggtgtcaagaagctcagaatggctcagaatctgaggtgtggactcatcagtcaaaaatcaagtatgactggtatcaaacagaatctcaagtagtcattacacttatgatcaagaatgttcagaagaatgatgtaaatgtggaattttcagaaaaagagttgtctgctttggttaaacttccttctggagaggattacaatttgaaactggaacttcttcatcctataataccagaacagagcacgtttaaagtactttcaacaaagattgaaattaaactgaaaaagccagaggctgtgagatgggaaaagctagaggggcaaggagatgtgcctacgccaaaacaattcgtagcagatgtaaagaacctatatccatcatcatctccttatacaagaaattgggataaattggttggtgagatcaaagaagaagaaaagaatgaaaagttggagggagatgcagctttaaacagattatttcagcagatctattcagatggttctgatgaagtgaaacgtgccatgaacaaatcctttatggagtcgggtggtacagttttgagtaccaactggtctgatgtaggtaaaaggaaagttgaaatcaatcctcctgatgatatggaatggaaaaagtactaaataaattaatttgctctcataaaaacaagaaaaagatggcctcgttggcctca

SEQ ID NO: 460615 - DNA, 1030 bp, Homo sapiens
aagcagtggtatcaacgcagagtgcccattacggccggggaagctcggttggtgtttctccagaagtttcccccttgggcggtggtggaggtggtaaccgtgatagtagcagctccggcggcagcaacagcgactacgagggatggcggcggctgcagcaggaactgcaacatcccagaggtttttccagagcttctcggatgccctaatcgacgaggacccccaggcggcgttagaggagctgactaaggctttggaacagaaaccagatgatgcacagtattattgtcaaagagcttattgtcacattcttcttgggaattactgtgttgctgttgctgatgcaaagaagtctctagaactcaatccaaataattccactgctatgctgagaaaaggaatatgtgaataccatgaaaaaaactatgctgctgccctagaaacttttacagaaggacaaaaattagatatagagacggggtttcatcgtgttggccaggctggtctccaactcttgacctcaagtgatccacctgccttggactcccaaagtgctgggattacaggtgcagatgctaatttcagtgtctggattaaaaggtgtcaagaagctcagaatggggtcaagaaatctgagagtgtaggattcatcagtccaaaactcgggtatgactggtatcaaacagaatctcaagtagtcattacacttatgatcaagaatgttcagaagaatgatgtaaatgtggaattttcagaaaaagagttgtctgctttggttaaacttccttctggagaggattacaatttgaaactggaacttcttcatcctataataccagaacagagcacgtttaaagtactttcaacaaagattgaaattaaactgaaaaagccagaggctgtgagatgggaaaagctagaggggcaaggagatgtgcctacgccaaaacaattcgtagcagatgtaaagaacctatatccatcatcatctccttatacaagaaattgggataaattggttggtgagatc

SEQ ID NO: 460616 - DNA, 2186 bp, Homo sapiens
gaggagagccacgtgggtcgagctggggcgcagctcgcatgggggagtctatcccgctggccgccccggtcccggtggaacaggcggtgctggagacgttcttctctcacctgggtatcttctcttacgacaaggctaaggacaatgtggagaaggaacgagaggccaacaagagcgcgtgaggaggtcacgcctcgggtcgtgtacgcttgcgtggccgagccctttgatgcgccacgctgcgcctgctgcgcacgagaatacggtcgtattcgacacgcagctcagcgctatcgcatgcgcggtcagcaaacctagtggggccagtctttcttcagcaggaaggattccatccgcaccatctatacttcattgcataatgagctgaagaaggtggtgactggccgtggtgccctgggtgggactgctcctcacgtggaagaactcctttcccacctgtcagagcagctctgcttctttgttcaggctcggatggagatagcagacttctatgagaagatgtacaccctcagcacacagaagttcatcaatgctgaagagctcgttggccttttggatgccatcatgaaaaaatacagctccagatttcaccacccaatcctcagtcctttggaaagcagtttccagctggaagttgacgtcctgtgtcatctcctgaaagcccaggcccaggtctcagagtggaagttcctcccatctctggttaatttacacagtgcgcacaccaaactgcagacgtggggccagatctttgagaaacagcgggagaccaagaaacatctgtttggagggcagtctcagaaggccgtgcagcctccacaccttttcctttggctgatgaaactcaaaaacatgcttcttgccaagtttagcttttactttcatgaggctctgagccgacaaacgactgcttcagaaatgaaaacgttgacagcaaaagctaacccagacttttttggaaagatttccagcttcatcagaaaatatgatgctgccaatgtgtccttaatttttgacaacagaggttctgagagttttcagggtcatggttatcaccacccccattcctacagagaggcccccaagggtgtggaccagtatccagctgtagtgtctctgcccagcgacaggccagtcatgcactggcccaatgtcatcatgatcatgacggaccgcacatctgatctgaacagcttggagaaagtggtccacttctatgatgacaaagttcagagtacctacttcctaacccgcccggaacctcactttaccattgtcatcatttttgagtcaaagaaatctgagagagactcccactttatttccttcctcaatgaggtctcacttgcccttaagaaccccaaagtgtttgcaagtctgaaacctggatccaaaggttagcaggtgatttgcgtggaggggtttcaagactagaaactgttcttaattgccctaatgatctacggtggtctgtgaatagagtttacatccattcatgcctctttcagaactaaattaaagacaaatcctccctgtgttgcacactttataagcaattaaggccaattgaattaagtttccaaagagtaatctaggaagtggtcatgggctaccatgtgtctccatggtacagcaaagtagtttcagtattttcccctattttgctatatttcttgtagattgaatatttattgggctttttttttcccatatgtttttctgttgttctaaacattgtgttctactgcaattccaaacagcctctctgtttccctccttcttggaagagtaatagggatgagatattaaatggcctttttagaattaagaactatatgttttctgtctcataaattagcaaatgaatatggagttagtagatttatgattctgatctacaaattaacatttttgatgccaaaattagggtcttggggtcctgaccgcaaaggagggaggagggacaattgacatctaagggcactatattctttcttcctccttctgttccttaagttataggaggaaaggattagcaacctctcctttcattaatcaacaaaaaagtctttaattgtattacgtgctgcgggcttgctgatgcataagatggtggttgtgacttacgtttatcacccatatgtattgattttataggaaggtga

SEQ ID NO: 460617 - DNA, 2585 bp, Homo sapiens
gaggagagccacgtgggtcgagctggggcgcagctcgcatgggggagtctatcccgctggccgccccggtcccggtggaacaggcggtgctggagacgttcttctctcacctgggtatcttctcttacgacaaggctaaggacaatgtggagaaggaacgagaggccaacaagagcgcggggggcagctggctgtcgctgctggcggccttggcgcacctggccgcggccgagaaggtctatcacagcctcacctacctggggcagaaactagggggccagtctttcttcagcaggaaggattccatccgcaccatctatacttcattgcataatgagctgaagaaggtggtgactggccgtggtgccctgggtgggactgctcctcacgtggaagaactcctttcccacctgtcagagcagctctgcttctttgttcaggctcggatggagatagcagacttctatgagaagatgtacaccctcagcacacagaagttcatcaatgctgaagagctcgttggccttttggatgccatcatgaaaaaatacagctccagatttcaccacccaatcctcagtcctttggaaagcagtttccagctggaagttgacgtcctgtgtcatctcctgaaagcccaggcccaggtctcagagtggaagttcctcccatctctggttaatttacacagtgcgcacaccaaactgcagacgtggggccagatctttgagaaacagcgggagaccaagaaacatctgtttggagggcagtctcagaaggccgtgcagcctccacaccttttcctttggctgatgaaactcaaaaacatgcttcttgccaagtttagcttttactttcatgaggctctgagccgacaaacgactgcttcagaaatgaaaacgttgacagcaaaagctaacccagacttttttggaaagatttccagcttcatcagaaaatatgatgctgccaatgtgtccttaatttttgacaacagaggttctgagagttttcagggtcatggttatcaccacccccattcctacagagaggcccccaagggtgtggaccagtatccagctgtagtgtctctgcccagcgacaggccagtcatgcactggcccaatgtcatcatgatcatgacggaccgcacatctgatctgaacagcttggagaaagtggtccacttctatgatgacaaagttcagagtacctacttcctaacccgcccggaacctcactttaccattgtcatcatttttgagtcaaagaaatctgagagagactcccactttatttccttcctcaatgaggtctcacttgcccttaagaaccccaaagtgtttgcaagtctgaaacctggatccaaaggttagcaggtgatttgcgtggaggggtttcaagactagaaactgttcttaattgccctaatgatctacggtggtctgtgaatagagtttacatccattcatgcctctttcagaactaaattaaagacaaatcctccctgtgttgcacactttataagcaattaaggccaattgaattaagtttccaaagagtaatctaggaagtggtcatgggctaccatgtgtctccatggtacagcaaagtagtttcagtattttcccctattttgctatatttcttgtagattgaatatttattgggctttttttttcccatatgtttttctgttgttctaaacattgtgttctactgcaattccaaacagcctctctgtttccctccttcttggaagagtaatagggatgagatattaaatggcctttttagaattaagaactatatgttttctgtctcataaattagcaaatgaatatggagttagtagatttatgattctgatctacaaattaacatttttgatgccaaaattagggtcttggtaagaaatttctatcagttattgaaactgaaagtgagtcagattggtagcatgacgtaaggttttaacagttcagaagatcctcatggcagctttaatagccatgggttcttttggggtaatgtacacacctaactgcatttgttttgacttctttaatgtttgaatgtttcactctgttgtaaagtcagcataagccatcatgtgggctttcttcattcttcagcatattatccgcttcgctttctgtttatcacttttctgctgaaatgtacatgtttggctctactccttggttatttttaggcttaaaagcatgcagtcggtttttcagccacttttagatactcatgcaacatagcctacttttataaaatcaaaatgaaggtcttcatacgctgtacttgctaaaaatcaactgtgcgcttgaaagacctcttcatagttgagtaatcacctcagtacttaagcacttctgaacttgggtttcatgcctgccccccacaaattatgtttagaagcagcactgcatcttagcacatgctgccttatttctttccttcggcaggtgttcatgggaagtaggtggatcagtgaaggcataatgggctgtggagaccttcacttctagattattgattcaaaataaaaagaagccacaaagagtaattgagtt

SEQ ID NO: 460618 - DNA, 1805 bp, Homo sapiens
gaggagagccacgtgggtcgagctggggcgcagctcgcatgggggagtctatcccgctggccgccccggtcccggtggaacaggcggtgctggagacgttcttctctcacctgggtatcttctcttacgacaaggctaaggacaatgtggagaaggaacgagaggccaacaagagcgcggggggcagctggctgtcgctgctggcggccttggcgcacctggccgcggccgagaaggtctatcacagcctcacctacctggggcagaaactagggggccagtctttcttcagcaggaaggattccatccgcaccatctatacttcattgcataatgagctgaagaaggtggtgactggccgtggtgccctgggtgggactgctcctcacgtggaagaactcctttcccacctgtcagagcagctctgcttctttgttcaggctcggatggagatagcagacttctatgagaagatgtacaccctcagcacacagaagttcatcaatgctgaagagctcgttggccttttggatgccatcatgaaaaaatacagctccagatttcaccacccaatcctcagtcctttggaaagcagtttccagctggaagttgacgtcctgtgtcatctcctgaaagcccaggcccaggtctcagagtggaagttcctcccatctctggttaatttacacagtgcgcacaccaaactgcagacgtggggccagatctttgagaaacagcgggagaccaagaaacatctgtttggagggcagtctcagaaggccgtgcagcctccacaccttttcctttggctgatgaaactcaaaaacatgcttcttgccaagtttagcttttactttcatgaggctctgagccgacaaacgactgcttcagaaatgaaaacgttgacagcaaaagctaacccagacttttttggaaagatttccagcttcatcagaaaatatgatgctgccaatgtgtccttaatttttgacaacagaggttctgagagttttcagggtcatggttatcaccacccccattcctacagagaggcccccaagggtgtggaccagtatccagctgtagtgtctctgcccagcgacaggccagtcatgcactggcccaatgtcatcatgatcatgacggaccgcacatctgatctgaacagcttggagaaagtggtccacttctatgatgacaaagttcagagtacctacttcctaacccgcccggaacctcactttaccattgtcatcatttttgagtcaaagaaatctgagagagactcccactttatttccttcctcaatgaggtctcacttgcccttaagaaccccaaagtgtttgcaagtctgaaacctggatccaaaggttagcaggtgatttgcgtggaggggtttcaagactagaaactgttcttaattgccctaatgatctacggtggtctgtgaatagagtttacatccattcatgcctctttcagaactaaattaaagacaaatcctccctgtgttgcacactttataagcaattaaggccaattgaattaagtttccaaagagtaatctaggaagtggtcatgggctaccatgtgtctccatggtacagcaaagtagtttcagtattttcccctattttgctatatttcttgtagattgaatatttattgggctttttttttcccatatgtttttctgttgttctaaacattgtgttctactgcaattccaaacagcctctctgtttccctccttcttggaagagtaatagggatgagatattaaatggcctttttagaattaaga

SEQ ID NO: 460619 - DNA, 2140 bp, Homo sapiens
gaggagagccacgtgggtcgagctggggcgcagctcgcatgggggagtctatcccgctggccgccccggtcccggtggaacaggcggtgctggagacgttcttctctcacctgggtatcttctcttacgacaaggctaaggacaatgtggagaaggaacgagaggccaacaagagcgcggggggcagctggctgtcgctgctggcggccttggcgcacctggccgcggccgagaaggtctatcacagcctcacctacctggggcagaaactagggggccagtctttcttcagcaggaaggattccatccgcaccatctatacttcattgcataatgagctgaagaaggtggtgactggccgtggtgccctgggtgggactgctcctcacgtggaagaactcctttcccacctgtcagagcagctctgcttctttgttcaggctcggatggagatagcagacttctatgagaagatgtacaccctcagcacacagaagttcatcaatgctgaagagctcgttggccttttggatgccatcatgaaaaaatacagctccagatttcaccacccaatcctcagtcctttggaaagcagtttccagctggaagttgacgtcctgtgtcatctcctgaaagcccaggcccaggtctcagagtggaagttcctcccatctctggttaatttacacagtgcgcacaccaaactgcagacgtggggccagatctttgagaaacagcgggagaccaagaaacatctgtttggagggcagtctcagaaggccgtgcagcctccacaccttttcctttggctgatgaaactcaaaaacatgcttcttgccaagtttagcttttactttcatgaggctctgagccgacaaacgactgcttcagaaatgaaaacgttgacagcaaaagctaacccagacttttttggaaagatttccagcttcatcagaaaatatgatgctgccaatgtgtccttaatttttgacaacagaggttctgagagttttcagggtcatggttatcaccacccccattcctacagagaggcccccaagggtgtggaccagtatccagctgtagtgtctctgcccagcgacaggccagtcatgcactggcccaatgtcatcatgatcatgacggaccgcacatctgatctgaacagcttggagaaagtggtccacttctatgatgacaaagttcagagtacctacttcctaacccgcccggaacctcactttaccattgtcatcatttttgagtcaaagaaatctgagagagactcccactttatttccttcctcaatgaggtctcacttgcccttaagaaccccaaagtgtttgcaagtctgaaacctggatccaaaggttagcaggtgatttgcgtggaggggtttcaagactagaaactgttcttaattgccctaatgatctacggtggtctgtgaatagagtttacatccattcatgcctctttcagaactaaattaaagacaaatcctccctgtgttgcacactttataagcaattaaggccaattgaattaagtttccaaagagtaatctaggaagtggtcatgggctaccatgtgtctccatggtacagcaaagtagtttcagtattttcccctattttgctatatttcttgtagattgaatatttattgggctttttttttcccatatgtttttctgttgttctaaacattgtgttctactgcaattccaaacagcctctctgtttccctccttcttggaagagtaatagggatgagatattaaatggcctttttagaattaagaactatatgttttctgtctcataaattagcaaatgaatatggagttagtagatttatgattctgatctacaaattaacatttttgatgccaaaattagggtcttggggtcctgaccgcaaaggagggaggagggacaattgacatctaagggcactatattctttcttcctccttctgttccttaagttataggaggaaaggattagcaacctctcctttcattaatcaacaaaaaagtctttaattgtattacgtgctgcgggcttgctgatgcataagatggtggttgtgacttacgtttatcacccatatgtattgattttataggaaggtga

SEQ ID NO: 460620 - DNA, 1453 bp, Homo sapiens
aacctacggctaggtacgaggcctgggtgtgacagatctttgagaaacagcgggagaccaagaaacatctgtttggagggcagtctcagaaggccgtgcagcctccacaccttttcctttggctgatgaaactcaaaaacatgcttcttgccaagtttagcttttactttcatgaggctctgagccgacaaacgactgcttcagaaatgaaaacgttgacagcaaaagctaacccagacttttttggaaagatttccagcttcatcagaaaatatgatgctgccaatgtgtccttaatttttgacaacagaggttctgagagttttcagggtcatggttatcaccacccccattcctacagagaggcccccaagggtgtggaccagtatccagctgtagtgtctctgcccagcgacaggccagtcatgcactggcccaatgtcatcatgatcatgacggaccgcacatctgatctgaacagcttggagaaagtggtccacttctatgatgacaaagttcagagtacctacttcctaacccgcccggaacctcactttaccattgtcatcatttttgagtcaaagaaatctgagagagactcccactttatttccttcctcaatgaggtctcacttgcccttaagaaccccaaagtgtttgcaagtctgaaacctggatccaaaggttagcaggtgatttgcgtggaggggtttcaagactagaaactgttcttaattgccctaatgatctacggtggtctgtgaatagagtttacatccattcatgcctctttcagaactaaattaaagacaaatcctccctgtgttgcacactttataagcaattaaggccaattgaattaagtttccaaagagtaatctaggaagtggtcatgggctaccatgtgtctccatggtacagcaaagtagtttcagtattttcccctattttgctatatttcttgtagattgaatatttattgggctttttttttcccatatgtttttctgttgttctaaacattgtgttctactgcaattccaaacagcctctctgtttccctccttcttggaagagtaatagggatgagatattaaatggcctttttagaattaagaactatatgttttctgtctcataaattagcaaatgaatatggagttagtagatttatgattctgatctacaaattaacatttttgatgccaaaattagggtcttggggtcctgaccgcaaaggagggaggagggacaattgacatctaagggcactatattctttcttcctccttctgttccttaagttataggaggaaaggattagcaacctctcctttcattaatcaacaaaaaagtctttaattgtattacgtgctgcgggcttgctgatgcataagatggtggttgtgacttacgtttatcacccatatgtattgattttataggaaggtga

SEQ ID NO: 460621 - DNA, 1075 bp, Homo sapiens
aatcctgcataaattggagacatgggcaaggaaaactgcaccactgtggctgagttcattctccttggactatcagatgtccctgagttgagagtctgcctcttcctgctgttccttctcatctatggagtcacgttgttagccaatctgggcatgactgcactgattcaggtcagctctcggctccacacccccgtgtactttttcctcagccacttgtcctttgtagatttctgctactcctcaataattgtgccaaagatgttggctaatatctttaacaaggacaaagccatctccttcctagggtgcatggtgcaattctacttgttttgcacatgtggagtcactgaggtcttcctgctggccgtgatggcctatgaccgctttgtggccatctgtaaccccctgctgtacatggtgaccatgtctcagaagctgcgtgtggagctgacctcttgctgctacttctgtgggacggtgtgttctctgattcactcgtccttagctcttaggatcctcttctatagatctaatgtgattaaccacttcttctgtgatctaccccctctcctaagtcttgcttgctctgatgtcactgtgaatgagacactgctgttcctggtggccactttgaatgagagtgttaccatcatgatcatcctcacctcctacctgctaattctcaccactatcctgaagatacactctgcagagagcaggcacaaagctttctccacctgtgcctcccacctcacagccatcactgtctcccatggaacaatcctttacatttattgcaggccgagttcaggcaacagtggagatgttgacaaagtggccaccgtgttctacacagttgtgattcccatgctgaaccccctgatctacagcctgagaaataaggatgtgaacaaagctctcagaaaagtgatgggctccaaaattcactcctagggaagattttattcacagaattcaggatccccaagttgtggcaagtgaagaaagcggacacaattggagaaagtggttattttaccaaggctttgactggaagggtatgcttcccttt

SEQ ID NO: 460622 - DNA, 2426 bp, Homo sapiens
tgcacgcatgcacgcacacacggacctcccacccacccatcagaagcgtatcagaggcctctgcctcccgccaggattcccggctgcaggacacagcccagcaggagaagcttttccctccattctttcaaggaatctcgctctgttacccaggctggagtgaagtggcccaatctcggcttaccacaacctctgcctcccaggttcaagcgattctcctgcctcagcctcccaagtagctgagattacagagagatatatgcccaggatggggctgaataaaaagctaataataatagccaccacctgtggagagcttctcttggaccacgcattctgctaagtccttctcttgtatgaggaccagttgtgcccagagaaccttctctgtctcctctaaccatgggataaaaggagatttccacaagagcggctcagggacgcagcccatctcttaagaaggaggctctgagagggacaagaccatggatgcagcacatggccacaaggcagtttcaagatgcccatgtcaggcagaggatggctcagtggtctctaacccacctaacatttcatgaactttactcctggtcccgctcccaaattagacactggagataatggatcactatactgcactgaagactcggaggggttgagccgctggagccacgcaaattcagacacctcttccgccccaggtcactctactcgcccacgctgcctgccacacccatccggttgtgcgggacactccccgcgtttcttcagcgattcttatcgggctccctccttgttcaataaaggtgaagggtcctctgcagacagaggcaccctgagctcctgggatctggggcagcagcctcagggctgtcctggatttgaacggcaagtacagaattgcacccatcctctcaaggctcgtcaggactgtactgggcacggccctggcctcctcactcactgcccacagcagccctcccaggggactgcactggtggaggaggggcagacccagtctgccctcggatgggacgcagggattcaaagtccatttttccatctgaaacactgactgcatcacacgttacctttaactggaaaaagacaacatgcactttgcaatgttctgcgttaagatgaatacatgatgaacagtgacagcttaactgtctggttgaccttgaagaaaaaaagacaaccattctgttttaatgtagtcaaataaacatcaagtggcttgcaagtaaaaagcaggaaaaggcagcactttgtgaaaaaggaggtttgggatttgtaaacgttttaacgagtcatctgggaaaacccgaggtgtgtctcctgtgcaaaagactcacatccggaattacaaaggttttgcatttagcacagaagtgatgcgtcgaaacacccgattgtttaaattttaatgacaaacaaaaaacgtgctttaataagatttcactttcatttccctgagtagctatgttctggggcctgtgaatcttcttggagcattaaatgcatttgtcaatttggggggtagcctttcaattaatatgaagtcaaaataaaaggacactcacaggtcctttctttcccaggtgggggttcttcctggtgttgtactattgagaactgaattgacaggtgtgtggacatccctggtcattgtcttctgctgtctaaccacgtcgtctttcccataggctttccatctactgagaaaggggagaaggaagagaatgaaatggaaaatgagtgattggtcttatgtaaacccttctaggcaaaacaggaaccagagggggtctgatattttggatcaaatgagttgctggttttatttagagatcctgcttagaattaatgcgtccatgctgttggagaagagagcaaagtagtgacaacatcaggctcattgttcattcattcattcattcatacattgagcattcctaggggctgaggagtcaagagccattaaattttatccagtaatcttcccttatctgcggattcgcctttggcagttccagtagcctgtggtcaactgatgtcccaaaataggtgtcatttctgagcagggaaggtgtgatctggggccagaatgaatggccctggtgacttcttacctgattcatcccacaccagtcagaaggggctgtgaaggcagcagcgaaggagccacacatggacgtggaatgggcacgctgaccatcatggtcacgactgcaagaaagcagggctgcgtgggttaattggctgtgtctgagggtcacccctgcacaaggaggatgatgacgactgccctgtgcaaccctgggtcatctcaggggagagccattcccaggttcacagcaagcactcttttactcagatgggccacctgcatcaggccccaaggaagcacttattagtagaag

SEQ ID NO: 460623 - DNA, 591 bp, Homo sapiens
tccctcatcatgcattgtcaacaatacataaaagctgaaaggcgcctcacactcgggctcacgctccgcaagtagccaacatgcaagaagagacagaggggcttccagcatggtgcctgacacctggagacacccactacttactgtgtgggtgaatgaagaaaatgcgtacctggctccagaatggcccattgctggttggcatggggttccgttgcttagaggtgagagggtgagtatgggctccactggaagacaatagggcatagatgtggttcggccacatatttcatcaaggtgcacctgtgacttctgcagcatctaatttgagaaattgataaaatggctaaacagtgtatattatggtagtcggagagatgagttggttataaccccggctctttcttgcagggctgcgtgggttaattggctgtgtctgagggtcacccctgcacaaggaggatgatgacgactgccctgtgcaaccctgggtcatctcaggggagagccattcccaggttcacagcaagcactcttttactcagatgggccacctgcatcaggccccaaggaagcacttattagtagaag

SEQ ID NO: 460624 - DNA, 1517 bp, Homo sapiens
ccagccagtgtccacatgctgctgagtctccctgtgagagctcagctgttccctgactggcagaggcagaaggctgtccagaacaacccgtacccgtctgccttcctgcagggagaacaggacaccgtcggcgttttggaccaggtctctcccccgccgcctcgtcctttctgggagccagcccctcccccttccagtctccatctgcccccacccaggctctggggcgcccacggcctgcgagaggagcccgagtttgtgacggcaagagctggggagagcgtggtcctgcgatgcgacgtgatccacccagtgacgggacagcccccaccctatgtcgtagagtggttcaagttcggggtccccatccctatcttcatcaagtttggctactacccgccgcacgtggaccctgagtatgcaggccgggccagtcttcatgataaggcatctctgcggctggaacaagttcgctctgaggaccagggctggtatgagtgcaaagtgctcatgctggaccagcagtatgacaccttccacaatggcagctgggtccacctcaccatcaacgagacctggctagggaggggagttcgtcacgtgcaggtgggaagtggagtagggtcctccagccagagtggacaagcgtgctcggaagcccagagcgaggagagcggcgcattcagggaacacgggtaggctgttcatagggaaatgctgggcgggaaagctggggatggtgcaccatctgctccaggcttgagaaccagggctgataataaaagacgcttttccataatcaaggcacctacctgcgcacaggcagaacagaaccaacccttctgcggtgagagatctcctttctcctcttctgcctttctcttcttcccaagttcgaggctccttccagcataaaaatttccgttactgaaggaaggaatccaagcacctgcattacgttgctttcaaactagaatgtttaatgtcaggcattttctgacggggatcacctttggaaaatgaaaggccagtgaacaattagaattacaaattgtctcattttccttcggtgttttctttgaagaccagttgggtggaaacagacccaattatttctttatcacatataaaataccccaaaagcctgagccaagccttcctttaggttggtgaattacatggaggagagggcagcctatttctaacctgcactattaattacagggctcttgtaaaaaagaattaagcctggaaatgcagctggcaagctgacatctagttccgtaaataattgacagtcaagccattattttcctgaaaactagaaattgttcaacgtactttcctgattagcacctaaataataaagtaattatgtaattagtaagtaatttgtcacttcaggatgtaaatttaatttattatcttttcttttaagcttggcaccagaggtaatagaggcagtatctgtgttcactgtatttcaaggggcaggccgggcaggcaggggctgtgtc

SEQ ID NO: 460625 - DNA, 1415 bp, Homo sapiens
tgaagctcagctcatcatgctcctgcccctcatagtcatacagggcccggactcgcacttccgtccccgaggtgtcgacgcggccgcgtcgacacgagaagtagtcgtttatgctccactttcaaagaagcaggagatcttttatacagccattgtgaaccgtacaattgcaaacatgtttggatccagtgagaaagaaacaattgagttaagtcctactggtcgaccaaaacgacgaactagaaaatcaataaattacagcaaaatagatgatttccctaatgaattggaaaaactgatcagtcaaatacagccagaggtggaccgagaaagagctgttgtggaagtgaatatccctgtagaatctgaagttaatctgaagctgcagaatataatgatgctacttcgtaaatgttgtaatcatccatatttgattgaatatcctatagaccctgttacacaagaatttaagatcgatgaagaattggtaacaaattctgggaagttcttgattttggatcgaatgctgccagaactaaaaaaaagaggtcacaaggtgctgcttttttcacaaatgacaagcatgttggacattttgatggattactgccatctcagagatttcaacttcagcaggcttgatgggtccatgtcttactcagagagagaaaaaaacatgcacagcttcaacacggatccagaggtgtttatcttcttagtgagtacacgagctggtggcctgggcattaatctgactgcagcagatacagttatcatttatgatagtgattggaacccccagtcggatcttcaggcccaggatagatgtcatagaattggtcagacaaagccagttgttgtttatcgccttgttacagcaaatactatcgatcagaaaattgtggaaagagcagctgctaaaaggaaactggaaaagttgatcatccataaaaatcatttcaaaggtggtcagtctggattaaatctgtctaagaatttcttagatcctaaggaattaatggaattattaaaatctagagattatgaaagggaaataaaaggatcaagagagaaggtcattagtgataaagatctagagttgttgttagatcgaagtgatcttattgatcaaatgaatgcttcaggaccaattaaagagaagatggggatattcaagatattagaaaattctgaagattccagtcctgaattaatgcagttcatgggctttaggtacttcagttatgaagtaggcttttcatggggagagattgggattatgctctctgttgtttaagaaactgtttgattttagagtctatttctatgagatagtttaccaaataaatgttccttataagaaaaaaaaaaaaaaaaaaaaaaaaaaaaaaaagtcgacgcggccgcgtcgactc

SEQ ID NO: 460626 - DNA, 1430 bp, Homo sapiens
cttcagtcaacgagtggataaagaaaatgtggtttattcatactactcacccataaaaaggaacgaaataatggcattggcagcaacctggatggaggtggagaccataattcttagtgaaaataaaagcaggcagaggaacttggaaggactagactggctgagtcttccagcctacatctttttcctgtgtgggatgctttctgccttccaacatcatactccaagttcttcagattttggactcttggaccttcgatacagactggagtctgaagtctgcactattggcttccctacatttgaggttttgggactcagactggcttcctggcttctcaccttgcagatcgcctattgtgggacttcacctggtgattgtcagagacccattggtaaagattccctcaaaatcttgtcctcactttcacaccttttgcctggatccagcctgtgggcagaacacacctgtggctggagaagagccacagcagaagagttaattactcacattggcatcacaattttccaaactgtgacacatgtgtccttgtagaaacctctgagacactaaaggctgccaccgccatcattgtcaaacctcacaccattcattatcccttcacttcagaaaagcagcagcaggcttagggaggtgaattgctttattagtcttggtatcaatagatggtgaggatgggcttgaaatccaggacccctttccttctccctattttcatctctcctgttccccatgcccatttgggttttggtgtagaaccttcttatttagaattgattctctttcacatttgaaatctatggaaaggtgaagcaactcttcctccatggctgcctctcaagtggctgtgtggggaggaaggccacgttctgcttccctgcactttctccttaggcatggcaaagatgtttgatctcaggacgaagatcatgatcggcatcggaagcagcttactggttgccgcgatggtgctcctaagtgttgtgttctgtctttacttcaaagtagctaaggcactaaaagctgcaaaggaccctgatgctgtggctgtaaaaaatcacaacccagacaaggtgtgttgggccacgaacagccaggccaaagccaccaccatggagtcttgtccatctctccagtgctgtgaaggttgtagaatgcatgccagttctgattccctgccaccttgctgttgtgacataaatgagggcctctgacttgggaaagctgggcacaaaaatcttcatgagcaatatttctttcttaatagaatgttttattattcaagtcaagttctagagtgtttacatactattatataatgtacagtgttattttctgtacttctgaataaatgtgcaatattggaaataatcctctgcctccagtatttttgttagttataaacatc

SEQ ID NO: 460627 - DNA, 1374 bp, Homo sapiens
tttgtgaaatgagggggcggagggagcagcgccgaggccccttccggctctgcagtgcctcgaattctaggctgctggtgcgtcttttcctgaggggaaacggggagaaagtgcagcctcaggtgctggcctttcccgggaagagctcccagccgccttccgccggccccacgcctccgcccagctcccgcccaccgccctcccctccgcggcgcaggaggccggcctggctccaggatgaagcggaggttgccgcggcgctggccggttacggcttcataaatcccagttccacgggggagggcccagcacggcccagcacccagacgctgaggagaagtggggcttttccgtgcgagagtgtgggcgtgccgggcgcacgtccgggaaggggtgctgagggccgccctgctcggaggagacccgcccctgcaccgcccctcctcccgctcccctcccgggccctctggttgggtggagaagagtcgagaagagtggagaagagtcgagaagagtggagaagagtcgagaagagtcgagaagagtggacaaggcgaaccgtctgcagcgaggcggggctggggggcgcggggaggacggggttcaggccggtgtcgctctcaaggggcagccctggtgtcacccccaccccctcccacgctgaagccttccggccgagctgtggcatccacgcaaatggggccgcctcggcacctccaggccagaatttaaatgttatcagcggcaattgatctgctcgggactgaggtttcgggtcctctgcggaattgggaggagcgtggatggtgaaggagctgctgcactgtggcacgggcttggccggggctgcctggctctgagcaggctcgtgggacggccctgtaaggaccccactgcaagaagggcacagaagcacctgagttggcgtctcagcagggacccccccaggaaatgcccttctacagctggtactcaagctctttacacacttagccatcgctatacacagtccacgcttgtgcacccacacccacaagcttatgctcacgtgcacttttttttttttttggaaacggattttcgctcttgtcgcccaggctggagtgcaagggcgccatctcagctcactgcaacctccgcctccggggttcaaaaaattctcctccctcagcctctaaagtaacgtgggattacaggcgcgcgccaccacaccgggctacatgctgggcatagaacgcaaagatggaggcttgccaagctggggccggcaggacacaaagtcctgacctacagtgaccgccacggctggggtccacaagtgatgggtacaggcatgaccaacgacgcgcctcaagggcgattcggatcggggtc

SEQ ID NO: 460628 - DNA, 3042 bp, Homo sapiens
gcagcacagttgagtctccagccttgactcttctcaagagcctgtgactttcctccctggacaaaggcatcatgagttgtcagatctcttgcaaatctcgaggaagaggaggaggtggaggaggattccggggcttcagcagcggctcagctgtggtgtctggtggaagccggagatcaacttccagcttctcctgcttgagccgccatggtggtggtggcgggggcttcggtggaggcggctttggcagtcggagtcttgttggccttggagggaccaagagcatctccattagtgtggctggaggaggtggtggctttggcgccgctggtggatttggtggcagaggaggtggttttggaggcggcagcagctttggaggtggcagcggcttcagtggtggtggtttcggtggaggcggctttggtggaggccgctttggaggttttgggggccctggtggtgttggaggtttagggggtcctggtggctttgggcctggaggataccctggtggcatccacgaagtctctgtcaaccagagcctcctgcagcctctcaacgtgaaagttgacccagagatccagaatgtgaaggcccaagagcgtgagcagatcaaaactctcaacaacaaatttgcctccttcattgacaaggtgcggttcttggagcagcagaaccaggtgttacagaccaaatgggagctgctacaacaaatgaatgttggcacccgccccatcaacctggagcccatcttccaggggtatatcgacagcctcaagagatatctggatgggctcactgcagaaagaacatcacagaattcagagctgaataacatgcaggatcttgtggaggattataagaagaagtatgaggatgaaatcaataagcgcacagctgctgagaatgattttgtgacgcttaaaaaggacgtggacaatgcctacatgataaaggtggagttgcagtccaaggtggacctgctgaaccaggaaattgagtttctgaaagttctctatgatgcggagatatcccagatacatcagagtgtcactgacaccaacgtcatcctctccatggacaacagccgcaacctggacttggatagcatcatcgccgaggtcaaggcccagtatgaggagatcgcccagaggagcaaggaagaagcggaggccctgtaccacagcaaggcaagtagagggaatgtaggaagagccacagctccctgccatgagctgggttgcacccccagctggaaagtgtacagtaagtatgaggagctccaggtgactgtcgggagacatggagacagcctgaaagagatcaagatagagatcagcgagctgaaccgcgtgatccagaggctgcagggggagatcgcacatgtgaagaagcagtgtaagaatgtgcaagatgccatcgcagatgccgagcagcgtggggagcatgccctcaaggatgccaggaacaagttgaatgacctggaggaggccctgcagcaggccaaggaggacttggcgcggctgctgcgtgactaccaggagctgatgaacgtgaagctggccctagatgtggagatcgccacctaccgcaaactgctggagggcgaggagtgcagcatcttgggtgacttaatctggctgaagcaattggaaggggaaaagctaccccaggccatcagcaagccagcatgacaaacagggagtggctttcttcaggaggttgctctgtccctgtctagaggcaatgcctcctatgcccagcttgatgtctggagacctcagcagcaatgtgactgtgtctgtgacaagcagcaccatttcatcaaatgtggcatccaaggctgcctttggaggttctggaggtagagggtccagttccggaggaggatacagctctggaagcagcagttatggctctggaggccgacagtctggctccagaggcggtagtggaggaggaggttctatctctggaggaggatatggctctggcggtggttctggaggaagatacggatctggtggtggctctaagggagggtccatctctggaggaggatatggctctggaggtggaaaacacagctctggaggtggctctagaggaggctccagctctggaggaggatatggctctggaggtgggggttctagctctgtaaagggtagctcaggtgaagcttttggttccagcgtgaccttctcttttagataaagatgagcccccaccaccaccgactctcccaacccagactctcccactccagaatgtagaagcctgtctctgtacctctaactggcagcaagttaaatttttgtcatttatctctgatggcactttgagggaaaagaatgtccacatacagtttttgaaagatcttctctccaaaccagttagttagagccagtgacgcctctgtgttctggggcggaatctgtgctgtctaggtttgtgcttctagccatgcccattcccgcccccaccatgcctctttgcattgcccattttccagatgtgtattctgttgaggacccaggcccatccagggatttcatctctaagcctggcagtgctggggggaaatgtgtttctgtgtatatagctcctcttgtccactctgctttcggaagtgctgtggtctgggggtcttcataataaacctcatttgcaattcatatcatgtgctgtctgcgtgatgtcaaaccttggtggaagtgggcagccatggacaagggaggtttgggcattaaggaggggctcctggaagatggaagaagaaacaccttccatcttgttttataaggccagcattaatggaagaaactaaagaacaaatccctcatggatatatatatatatatatatatatatatatatatatatattcaaaaattatcagcaagatatgagcaaattcaatctagaaagatataaaaaggataatacatcatgaccatgtgtttaaaaatattgtttaaaaatagtgaggtatatgtttaaaatgtatcccagaaataaaaagcttgctcaacattc

SEQ ID NO: 460629 - DNA, 1369 bp, Homo sapiens
  misc_feature (19)..(19): n is a, c, g, or t
  misc_feature (44)..(44): n is a, c, g, or t
gcccgcaggctgctgctgnagtttggggtgctcttctgcaccancctccttttgctctgggtgtctgtcttcctctatggctccttctactattcctatatgccgacagtcagccacctcagccctgtgcatttctactacaggaccgactgtgattcctccaccacctgactcctctcccctcgtttttccttcaataaactattttgtgtcagcttcttccttgactctgaaatgggttcagggccatttgaacaccctgtgtcccccatgcatctctcactttccgccattagaggggagctggtggattcccgctgcatcaaggcctacccactgcccttggcccctcaagactttgaagaagaggaggcagatgagactgagacggcgtggccgcctttgccggctgtcccctgcgactacgaccactgccgacacctgcaggtgccctgcaaggagctacagagggtcgggccggcggcctgcctgtgcccaggactctccagccccgcccagccgcccgacccgccgcgcatgggagaagtgcgcattgcggccgaagagggccgcgcagtggtccactggtgtgcccccttctccccggtcctccactactggctgctgctttgggacggcagcgaggctgcgcagaaggggcccccgctgaacgctacggtccgcagagccgaactgaaggggctgaagccagggggcatttatgtcgtttgcgtagtggccgctaacgaggccggggcaagccgcgtgccccaggctggaggagagggcctcgagggggccgacatccctgccttcgggccttgcagccgccttgcggtgccgcccaacccccgcactctggtccacgcggccgtcggggtgggcacggccctggccctgctaagctgtgccgccctggtgtggcacttctgcctgcgcgatcgctggggctgcccgcgccgagccgccgcccgagccgcaggggcgctctgaaaggggcctgggggcatctcgggcacagacagccccacctggggcgctcagcctggcccccgggaaagaggaaaacccgctgcctccagggagggctggacggcgagctgggagccagccccaggctccagggccacggcggagtcatggttctcaggactgagcgcttgtttaggtccggtacttggcgctttgtttcctggctgaggtctgggaaggaatagaaaggggcccccaatttttttttaagcggccagataataaataatgtaacctttgcggtttaagaggataaaatggaggatattattatgtgggtatttatatgacctttgtaaccatttaaaaatgtaaaaacgacctgacttagtaatgc

SEQ ID NO: 460630 - DNA, 2054 bp, Homo sapiens
catggggatctggcatgcacctgtccccagcctctgcttcccacccccggcaggtgatgctgcattaccgctcagacctgctccagatgctggacacactggtcttctctagcctcctgctatttggctttgcagagcagaagcagctgctggaggtggaactctacgcagactatagagagaactcgtacgtgccgaccactggagcgatcattgagatccacagcaagcgcatccagctgtatggagcctacctccgcatccacgcgcacttcactgggctcagatacctgctatacaacttcccgatgacctgcgccttcataggtgttgccagcaacttcaccttcctcagcgtcatcgtgctcttcagctacatgcagtgggtgtgggggggcatctggccccgacaccgcttctctttgcaggttaacatccgaaaaagagacaattcccggaaggaagtccaacgaaggatctctgctcatcagccagggcctgaaggccaggaggagtcaactccgcaatcagatgttacagaggatggtgagagccctgaagatccctcagggacagagggtcagctgtccgaggaggagaaaccagatcagcagcccctgagcggagaagaggagctagagcctgaggccagtgatggttcaggctcctgggaagatgcagctttgctgacggaggccaacctgcctgctcctgctcctgcttctgcttctgcccctgtcctagagactctgggcagctctgaacctgctgggggtgctctccgacagcgccccacctgctctagttcctgaagaaaaggggcagactcctcacattccagcactttcccacctgactcctctcccctcgtttttccttcaataaactattttgtgtcagcttcttccttgactctgaaatgggttcagggccatttgaacaccctgtgtcccccatgcatctctcactttccgccattagaggggagctggtggattcccgctgcatcaaggcctacccactgcccttggcccctcaagactttgaagaagaggaggcagatgagactgagacggcgtggccgcctttgccggctgtcccctgcgactacgaccactgccgacacctgcaggtgccctgcaaggagctacagagggtcgggccggcggcctgcctgtgcccaggactctccagccccgcccagccgcccgacccgccgcgcatgggagaagtgcgcattgcggccgaagagggccgcgcagtggtccactggtgtgcccccttctccccggtcctccactactggctgctgctttgggacggcagcgaggctgcgcagaaggggcccccgctgaacgctacggtccgcagagccgaactgaaggggctgaagccagggggcatttatgtcgtttgcgtagtggccgctaacgaggccggggcaagccgcgtgccccaggctggaggagagggcctcgagggggccgacatccctgccttcgggccttgcagccgccttgcggtgccgcccaacccccgcactctggtccacgcggccgtcggggtgggcacggccctggccctgctaagctgtgccgccctggtgtggcacttctgcctgcgcgatcgctggggctgcccgcgccgagccgccgcccgagccgcaggggcgctctgaaaggggcctgggggcatctcgggcacagacagccccacctggggcgctcagcctggcccccgggaaagaggaaaacccgctgcctccagggagggctggacggcgagctgggagccagccccaggctccagggccacggcggagtcatggttctcaggactgagcgcttgtttaggtccggtacttggcgctttgtttcctggctgaggtctgggaaggaatagaaaggggcccccaatttttttttaagcggccagataataaataatgtaacctttgcggtttaagaggataaaatggaggatattattatgtgggtatttatatgacctttgtaaccatttaaaaatgtaaaaacgacctgacttagtaatgc

SEQ ID NO: 460631 - DNA, 1837 bp, Homo sapiens
ggaagaaaatcttagtcccctgccctggacactttcgccagtcaagggcagaaggtggctaaacaataggacgccgcaggtagggggacaggttgatgaaagccccgctgtgtcccgtgatttgtgacagatatctgttttcttcctcattccaatgcatcatcttggattttggaatatttgcattatacttatcagttgagcatcacaaattcaaaaatccaaaatctgaaatgctccaaataagaatttcctttcagcctcatggcaaggatgcaattgaaataaagaaggaaacagatacctgtcacaagtcactggatacagctgagcttctatcaacacaactcaagtgtgtgcatctggtacctgtcaagttagagaaattggttgttgtacaacatgacctcataatcaaaatattgtatcagagtgcctgctgctcatttgattcagtttggagatcatttggttccatggacaacctctattggtgttatatctggggaagtgcttgccttggtcctggacttgataccactaaagctgataatgagaacagagtagggttctattagactttcggggaagagcagcttctgggctcatgtagggccctgcactttcattctgggggcactgacaaatacaaacagaattcagagcattaggaagacaagcagggccttcagtaggcataaggtgatgaggttcatgccgttggatcccacgggtgccctggggaagagatggttgggaagtctgagaggaagcaggagagctttcggagcacatggatgccgtccagaatggagatggttgtggctcggaagaaaaagaaatcacccagctcggagtcaggatacatttggaggtccaggccgccgagtttgctggtggggaagataggcaccagaaaggaaagaggacatccagggcaatttcttctgccccccagccaatccgtacattgtccagaggccaagcctactgctgttagaaaacatatttagaaatcacttggttcttccttgcctgaacatcatctatttagttagcttgtgttgtttagatgtgcttcagatctcaaaaaaataaattatgttatttgaaagcttgctctctgcttgtttacactattaatttagagtccagaggaatctctaaatttgcctctagaaaccacataatcacctaataatacctttcctgactccactttctgacacaaagtgacttttgaaacgcttccatcttccctttctatttaatgtactgcactccactcttttttcctttcgttttttctacagtccgtcatggagtatttgtttaccaaatgttacttttcttggatccaatctatttttgaagagcgcaaaagcaaacaactgtttgaagctgtcaagcttcattttatttatgcatgaataacacaaataacttgaaaatgacctagtctgtttttctcagatttagatagaaaaactgcttccggccaatgtttatgccaatttgttcatgccaagtttccagtttcggtgccaaccggtttttacagccaagttgtaaaccttcggtaaacatggcttataatgaaaagtgcaacacagcctgaaccctggcaccaggggacggatgtaaatttattctaagaacaaaattctaacaggaacaggaggggagctaggctggctacaaagtgttcccaccgtaatatggaaaatgtacagatgatgatatatttgattactaagatcccattaggccaatttaggcactttatgtatttcctttgctctggacgctgagtggtttcatgctcaatttgaagcaa

SEQ ID NO: 460632 - DNA, 1356 bp, Homo sapiens
aaagtagtgatgtaaggtagaatatagaacaaaaaaaaaggttggtcttgcctctgtcatccaggctggcgcgatctcggctcactttgacctctgcctcctgggttcaagcgattctcctgtcacagcctcctgagcagctgggattacaggcaggcaccaccatgctgagctaatttttgtatttttagtagagaccaggtttcgccatgttgcccaggctactctcgaactcctggcctcatgtgatccgcccacctcagcctcccaaagtgctgggattacaggcgtgagccactgcaaccagctggaacaatcttgatattagggtgaacaagtgatttcatagctttctctgaaggaggaaacactgggagcatccacccgagaatcaacactgtggatcattctggggagttaatagttttgagatgtgtcccaagataattgttagcttgaattaccacgtggatggaaccatgctgatcctaagagccaggccaagcctactgctgttagaaaacatatttagaaatcacttggttcttccttgcctgaacatcatctatttagttagcttgtgttgtttagatgtgcttcagatctcaaaaaaataaattatgttatttgaaagcttgctctctgcttgtttacactattaatttagagtccagaggaatctctaaatttgcctctagaaaccacataatcacctaataatacctttcctgactccactttctgacacaaagtgacttttgaaacgcttccatcttccctttctatttaatgtactgcactccactcttttttcctttcgttttttctacagtccgtcatggagtatttgtttaccaaatgttacttttcttggatccaatctatttttgaagagcgcaaaagcaaacaactgtttgaagctgtcaagcttcattttatttatgcatgaataacacaaataacttgaaaatgacctagtctgtttttctcagatttagatagaaaaactgcttccggccaatgtttatgccaatttgttcatgccaagtttccagtttcggtgccaaccggtttttacagccaagttgtaaaccttcggtaaacatggcttataatgaaaagtgcaacacagcctgaaccctggcaccaggggacggatgtaaatttattctaagaacaaaattctaacaggaacaggaggggagctaggctggctacaaagtgttcccaccgtaatatggaaaatgtacagatgatgatatatttgattactaagatcccattaggccaatttaggcactttatgtatttcctttgctctggacgctgagtggtttcatgctcaatttgaagcaa

SEQ ID NO: 460633 - DNA, 1452 bp, Homo sapiens
aaatagaggacaagatccattttgccaagaacaaccatatggatttaactgctgctaacaaccgttaggaaggaacatcaataaaaagcaagcctgtgagacaactccttccccaaggggcgcttgttacagagcgcgggccccagcaggcctggtccatcctccacattctttcctctctgacttatttttactttctgtttgaattggcttggttttattttgccctaaactgtgtctgtagtcatcccccgacagagttttgagagtgaaagtccgatctgcccacgcttcacagaactcaatgcggagccttctcaggagtcacttgacgtcaaggctgacttttaaatttgccaaaaaggcattctttggggagcggtcggcaccatcactttccctctttagagagctgctactggctgctggaattcaaaacccacaaattgcatttctaaacttaattcgatacatagatgagcggaaagatcagacattgatgctattgttttcaaccaagatgttttactatatcatttatattttgtttttttcttcccccagtttttaaactttttgtttgtttgttttacaggccaagcctactgctgttagaaaacatatttagaaatcacttggttcttccttgcctgaacatcatctatttagttagcttgtgttgtttagatgtgcttcagatctcaaaaaaataaattatgttatttgaaagcttgctctctgcttgtttacactattaatttagagtccagaggaatctctaaatttgcctctagaaaccacataatcacctaataatacctttcctgactccactttctgacacaaagtgacttttgaaacgcttccatcttccctttctatttaatgtactgcactccactcttttttcctttcgttttttctacagtccgtcatggagtatttgtttaccaaatgttacttttcttggatccaatctatttttgaagagcgcaaaagcaaacaactgtttgaagctgtcaagcttcattttatttatgcatgaataacacaaataacttgaaaatgacctagtctgtttttctcagatttagatagaaaaactgcttccggccaatgtttatgccaatttgttcatgccaagtttccagtttcggtgccaaccggtttttacagccaagttgtaaaccttcggtaaacatggcttataatgaaaagtgcaacacagcctgaaccctggcaccaggggacggatgtaaatttattctaagaacaaaattctaacaggaacaggaggggagctaggctggctacaaagtgttcccaccgtaatatggaaaatgtacagatgatgatatatttgattactaagatcccattaggccaatttaggcactttatgtatttcctttgctctggacgctgagtggtttcatgctcaatttgaagcaa

SEQ ID NO: 460634 - DNA, 1580 bp, Homo sapiens
gcaggcatcatagatggtattacaggcggctggtctctcctctctcagccaactatgagaactatttgggattgaaggagataagctacagcaagtcgttacttgtcctgaatgcacgaccttctttctttgagcaagaggacaaacctggatggagtccattgcccaggctggagtgtagtggcacgatctcggctcactgcgacctccacctcccgggttcaagtgattctcctgcctcagccttctgagtagctgagactacagggtcttgcctctgtcatccaggctggcgcgatctcggctcactttgacctctgcctcctgggttcaagcgattctcctgtcacagcctcctgagcagctgggattacaggcaggcaccaccatgctgagctaatttttgtatttttagtagagaccaggtttcgccatgttgcccaggctactctcgaactcctggcctcatgtgatccgcccacctcagcctcccaaagtgctgggattacaggcgtgagccactgcaaccagctggaacaatcttgatattagggtgaacaagtgatttcatagctttctctgaaggaggaaacactgggagcatccacccgagaatcaacactgtggatcattctggggagttaatagttttgagatgtgtcccaagataattgttagcttgaattaccacgtggatggaaccatgctgatcctaagagccaggccaagcctactgctgttagaaaacatatttagaaatcacttggttcttccttgcctgaacatcatctatttagttagcttgtgttgtttagatgtgcttcagatctcaaaaaaataaattatgttatttgaaagcttgctctctgcttgtttacactattaatttagagtccagaggaatctctaaatttgcctctagaaaccacataatcacctaataatacctttcctgactccactttctgacacaaagtgacttttgaaacgcttccatcttccctttctatttaatgtactgcactccactcttttttcctttcgttttttctacagtccgtcatggagtatttgtttaccaaatgttacttttcttggatccaatctatttttgaagagcgcaaaagcaaacaactgtttgaagctgtcaagcttcattttatttatgcatgaataacacaaataacttgaaaatgacctagtctgtttttctcagatttagatagaaaaactgcttccggccaatgtttatgccaatttgttcatgccaagtttccagtttcggtgccaaccggtttttacagccaagttgtaaaccttcggtaaacatggcttataatgaaaagtgcaacacagcctgaaccctggcaccaggggacggatgtaaatttattctaagaacaaaattctaacaggaacaggaggggagctaggctggctacaaagtgttcccaccgtaatatggaaaatgtacagatgatgatatatttgattactaagatcccattaggccaatttaggcactttatgtatttcctttgctctggacgctgagtggtttcatgctcaatttgaagcaa

SEQ ID NO: 460635 - DNA, 551 bp, Homo sapiens
ggtgacgggcaacacagctgtgcggagatgggaaccctacctgagtccagcccttctgtggttctgttaacattgatcagtttagcaatcagtacttactccattttaagagtcttccaagaggacgcgcaggagtcagcgctccggggaaagaagatgagaaacaccaggtggaccaccctggccaggctgctgggaacaagcctacgtgcacagctgccggaggagaggcggaaaagctgccagcaggaccccgtctcctgttggcggtggctccgcacaggcttcctcttgtcaagctctgctgcttccagccacaagactgctgttcctgtccttgacctcaaagcctgtgaaacgatgatggagcccagttctgctcctccttggagtgcccgctttgtgctgattctcttccagagtcgacatctgaataaccgtcagtgagcctgccttgctctgttatagggtctcagggcacctgctcacgttgacaatgatattagtgaaacggcagagcctcaccggactgccagaaaaggacaggccac

SEQ ID NO: 460636 - DNA, 2523 bp, Homo sapiens
ctgactatattttggttcctcccactacttcagagaacaatgagatggtggagctacagagaatacggatgaaggatgaaatccgagaatataagttccgggaggcacggctccttcaggactatactgaattggaagaagaaaatatcacattgcagaaactagtgtccacgttgaagcagaaccaggttgaatacgaaggcttaaagcatgagattaagcgatttgaggaggagacggtactgctgaacagccagctggaagatgccatccgattgaaagagattgctgagcaccaactggaagaagccctcgagactttaaaaaatgaaagagagcaaaagaacaacctgcggaaggagctctcccagtatatcagcctcaatgataaccatatcagcatctcagtagatggactcaaatttgccgaggatgggagtgaaccaaacaatgatgacaaaatgaacggtcatatccatgggcctcttgtgaaactgaatggagactatcggactcccaccttaaggaaaggagagtctctgaaccctgtctctgacttattcagtgagctgaacatttcagaaatacagaagttgaagcagcagcttatgcaggtagagcgggaaaaggccattcttttggccaacctacaggagtcacagacacagctggaacacaccaagggggcactgacggagcagcatgagcgggtgcaccggctcacagagcacgtcaatgccatgaggggcctgcaaagcagcaaggagctcaaggctgagctggacggggagaagggccgggactcaggggaggaggcccatgactatgaggtggacatcaatggtttagagatccttgaatgcaaatacagggtggcagtaactgaggtgattgatctgaaagctgaaattaaggccttaaaggagaaatataataaatctgtagaaaactacactgatgagaaggccaagtatgagagtaaaatccagatgtatgatgagcaggtgacaagccttgagaagaccaccaaggagagtggtgagaagatggcccacatggagaaggagttgcaaaagatgaccagcatagccaacgaaaatcacagtacccttaatacggcccaggatgagttagtgacattcagtgaggagttagctcagctttaccaccatgtgtgtctatgtaataatgaaactcccaacagggtcatgctggattactataggcagagcagagtcacccgcagtggcagcctgaaagggcccgatgatcccagaggacttttgtccccacgattagccaggcggggtgtgtcatccccggtagaaacaaggacctcatctgaaccagttgcaaaagaaagcacagaggccagcaaagaaccaagtccaactaagacccccacaatctctcctgttattactgccccaccgtcatctccagtattggatacaagtgacatccgcaaagagccaatgaatatctacaaccttaatgccataatccgggaccaaatcaagcatctgcagaaagctgtggaccggtccttgcaactgtctcgtcaaagagcagcggctcgggagctagcccccatgattgataaagacaaggaagccttaatggaagagatcctcaagctaaagtccctgctgagcaccaaacgggagcagatcgccacattgagggcggtgttgaaagccaacaagcagacagctgaggtggcgctagctaatctcaagaacaaatatgaaaatgaaaaagcaatggtgactgaaaccatgacgaagcttagaaatgaactgaaggctttgaaagaagatgctgcaaccttctcatccctgagagcaatgtttgcaacaagatgtgatgaatatgtcacccagttggatgagatgcagagacagttagcagctgcagaggatgagaagaagactctgaacactttgttacgaatggctatccagcaaaaactcgccctgacccagaggctggaggacttagagtttgaccatgagcagtcccgacgcagcaaaggcaaacttggaaagagcaagatcggcagccctaaaagccgtcccaggacttcaggggcttcctacctacagaatttattaagagttccccctgatcccacctccacagaatcatttcttctgaagggccccccttccatgagtgaattcatccaagggcaccggctcagcaaggaaaaaaggttaaccgtggctccaccagagaaaattattcttgcaaataaaaatcatccttttaaggaatccctgcatgaaaggaggtcaacttgccccagtgccatgagctcagcactacaacctggtgcaggacttcgaagtaatagaaagcgaggctgcaaaggtggacagggacctgaagacagagggccaggttagtgagagcagacttaccacgggcatagcttagcagttttaagaataggatcagattttcatttgataaaatcaccctgatgacaaggtggagagtggattagatgtgggtaacatc

SEQ ID NO: 460637 - DNA, 619 bp, Homo sapiens
ctgacctcgtgatctgcccgcctcggcctcccaaagtgctggggttacaggcgtgagccaccgcgcccggccaagaatgactttgtaaatcagtgttgacattcaggacctttttcatttcgtgttaaagactgatcaccctgggaaaatcaaggcagtccagccaaaccccaactcccaatcaaatgcagtttgtatcgaaccccacgactgcccagcacctttgggaagcccattgctttctatgcagacgcagagctcccagaaagcacaggtggatgtgctcagcttgccttgtgacgtgaatgcctgaaaacagaacaggactaaaaattcactgtctcagagcctgcagcttgggagtctgagttctcagggacaagaagagaagagttcccagtgtggcaaggaccaggcggaccagccttaggccgggctctggttcctcccctctctgtggattccctttgatcctcccctcctgccccactttgcagcctccacagcttagctgctaaatcactggggattaagacgctaggggccggaggggagggcaactcgtcctgggacagaaagggctcctttcctgggaggggtgagaggaagctggggttct

SEQ ID NO: 460638 - DNA, 2459 bp, Homo sapiens
gcggccgcccatgtccagctcaggctgggccagagctccgaagaggactcacaggcagttggggggacagaaggtggggccagagacaagtgcccccatgggcaaagagtaggtgagacggggcagggaaggtagggctggggcctgcctctcagctctgatcccccagaaactcccttaggaaggaaatagagtttctcatccctgtgtttctgaggggaaaaggagacagagaaaggttgggcaggctgacttgggtcacgtaccaatacctaacgtttatgaagtgcttgtcagacactgttttaagctctgtagatgtcaaaggaccccatgacgtaggtattattattccctttgacagttgaagagatgaaggcgcagaggcatgaactcccgtagccagagagtgtgagctggactctacctggagcagcctcggtgcagagcccatgcccccaaccatgtccgtggtcgaggcccagcccagacagggcacaaaggggctgaggaagaggaagtaagatgccagggttgccatgcaggagggcaaccccaagtgagatgggcatcgtggcctagggcccatcttccggaagagctcatcagaacttcggacacactgcatgggcctagacccagggctcgttgagctcctccctcggattggcttcgaattttaggtgaatcctctctagcagccacattcacccttgcaagcctgcactttgtcatcttctgaaaaggtgcaggaacatgatgcccagctgactcccagggagcgggagccccagaggccagcggagcacagccgcagcaggcagatctgttgggaaaccacgggagtataggagcagggctgggggcacctgagggactgtggagcctgaattattgaaacgcttagagtaaagcagatttagatttcacaaagacagaggtgaaggtgggtgaagacggagggaaggatttaaagggaaagagaaagaggaaagataagaatgaggggatcctctagaccgggagagagggagaaaggagagcgagctcggattgccatctgcctaggtgcagtgtggggcaggcggggagcggagctcggactgccgtctgcctaggtgcaacgtggggcaggcagggagcggacagcactcttcaaggctctagaacgctggtgggttcctggaccttgactctgtgtgacaggactgtgtatgcaacccagtgtcaagagcagaaatgcgcaaatgctgcctatgaccagtgcctcagtgatgcggcacgcctgggaaagggcacccacagcctctctttccacacagcacacatgctgtgcactcacgcacagcagcacgtgcctgcatgcacacactcttagaagcctgcgtgagagagaacacgagccttcgttactccagacaccaaagcaagctctgagctgcatcatccctcaagtctgcagtttaggcatggctcagaggccccagccaaggcggccaaaacccagccatgtgttgctccttaagccatgtcttctgctgagagtctgcgtcagcccagaggaggggccctcggtctcccttgcctgccgggaggccctgtggttcctggtgtccagtgggctcagcgtcacgtcctggaaggagccactacccgcctactgccccactgcattccactccacacacatttggggatccagcgctctgtgcaaggcactccatgtcatcatgatgaaggaggaccagccggatccatctgctcccactcaaggggggaccacccttcaagagaccctcacccagcccatcagtgcccaagagaggcaggcatccaactgcaccatctccctctccttccccatgcagctccctctgaatgatgatcagtgaggccctgcaagacagcctcccgaggccgagccaccgagctacaggacgaagatgatctttctgggctcctgatgtccagaccctgtcttgtctttcagcatgttcagaatacctgtggctgctgtgggcagagaggaggtaccggggaagtcctggcagacttatctatcggcagagagactgagtctccatgccaccccaattccccctgcccttttgactgagctctgaacacaagttagaggagctgggggaaagctccaagcagtcaatacatcaaccagtgagcacgtgacatgtcctgtctcgtgctcagcgctggggaggacatccccacaaatatcacagctcaaattcactggttgggaaggcaagactcacaggcagagaagagtcaaaaaactattaaagaggcccctggcatagtctgaggagccctggatagaggtaagaccagagttctatccccaggcctcaggcctgaagcaggtccctgtacttccaaaagctccagctacaccaagttatagacaacttctcatggcctggattgtggatggcagtggc

SEQ ID NO: 460639 - DNA, 2369 bp, Homo sapiens
ctgacctcgtgatctgcccgcctcggcctcccaaagtgctggggttacaggcgtgagccaccgcgcccggccaagaatgactttgtaaatcagtgttgacattcaggacctttttcatttcgtgttaaagactgatcaccctgggaaaatcaaggcagtccagccaaaccccaactcccaatcaaatgcagtttgtatcgaaccccacgactgcccagcacctttgggaagcccattgctttctatgcagacgcagagctcccagaaagcacagttgaagagatgaaggcgcagaggcatgaactcccgtagccagagagtgtgagctggactctacctggagcagcctcggtgcagagcccatgcccccaaccatgtccgtggtcgaggcccagcccagacagggcacaaaggggctgaggaagaggaagtaagatgccagggttgccatgcaggagggcaaccccaagtgagatgggcatcgtggcctagggcccatcttccggaagagctcatcagaacttcggacacactgcatgggcctagacccagggctcgttgagctcctccctcggattggcttcgaattttaggtgaatcctctctagcagccacattcacccttgcaagcctgcactttgtcatcttctgaaaaggtgcaggaacatgatgcccagctgactcccagggagcgggagccccagaggccagcggagcacagccgcagcaggcagatctgttgggaaaccacgggagtataggagcagggctgggggcacctgagggactgtggagcctgaattattgaaacgcttagagtaaagcagatttagatttcacaaagacagaggtgaaggtgggtgaagacggagggaaggatttaaagggaaagagaaagaggaaagataagaatgaggggatcctctagaccgggagagagggagaaaggagagcgagctcggattgccatctgcctaggtgcagtgtggggcaggcggggagcggagctcggactgccgtctgcctaggtgcaacgtggggcaggcagggagcggacagcactcttcaaggctctagaacgctggtgggttcctggaccttgactctgtgtgacaggactgtgtatgcaacccagtgtcaagagcagaaatgcgcaaatgctgcctatgaccagtgcctcagtgatgcggcacgcctgggaaagggcacccacagcctctctttccacacagcacacatgctgtgcactcacgcacagcagcacgtgcctgcatgcacacactcttagaagcctgcgtgagagagaacacgagccttcgttactccagacaccaaagcaagctctgagctgcatcatccctcaagtctgcagtttaggcatggctcagaggccccagccaaggcggccaaaacccagccatgtgttgctccttaagccatgtcttctgctgagagtctgcgtcagcccagaggaggggccctcggtctcccttgcctgccgggaggccctgtggttcctggtgtccagtgggctcagcgtcacgtcctggaaggagccactacccgcctactgccccactgcattccactccacacacatttggggatccagcgctctgtgcaaggcactccatgtcatcatgatgaaggaggaccagccggatccatctgctcccactcaaggggggaccacccttcaagagaccctcacccagcccatcagtgcccaagagaggcaggcatccaactgcaccatctccctctccttccccatgcagctccctctgaatgatgatcagtgaggccctgcaagacagcctcccgaggccgagccaccgagctacaggacgaagatgatctttctgggctcctgatgtccagaccctgtcttgtctttcagcatgttcagaatacctgtggctgctgtgggcagagaggaggtaccggggaagtcctggcagacttatctatcggcagagagactgagtctccatgccaccccaattccccctgcccttttgactgagctctgaacacaagttagaggagctgggggaaagctccaagcagtcaatacatcaaccagtgagcacgtgacatgtcctgtctcgtgctcagcgctggggaggacatccccacaaatatcacagctcaaattcactggttgggaaggcaagactcacaggcagagaagagtcaaaaaactattaaagaggcccctggcatagtctgaggagccctggatagaggtaagaccagagttctatccccaggcctcaggcctgaagcaggtccctgtacttccaaaagctccagctacaccaagttatagacaacttctcatggcctggattgtggatggcagtggc

SEQ ID NO: 460640 - DNA, 1571 bp, Homo sapiens
gagaaaaatctgaaggagacgaaaatgtttcaggagaaagaagacaaggagcgcttggctgggctgaaaacgcaaggggaggataggacctttgccgagggcaggacgacttacagtgacacgaggaaggcacgagtgagggaagaagagattgtggtggacaggcctggggcctgcaaagctgacattctggtagcagcgtttggagtcacagaagggaagttattggaggtaaagaggcccatgggccctggcgggactcatggagagcctggaaagaagctctacctcatgaacaccaacctttgcatctggcacgctcctttttcaaaggcatgtcatagcgtccttttccagcgttgcctgaagacacaaactactgatggctgcatccacatgactgacttcaaacacagcacgctgcaggagaaaagccggatacgcgcgtggaaagtgggtggctccaccaccctgctgttcaggttttctttctgaaagttcttttggctttattatggaatagaggttacagaaaggcaaaagctttggccgtagcgggtgggaagatcttccttaccctggaggaggaagtagggtctccgtaatgtatgtgtggtactcagggctcccggcagcccgaagccagagtgtgtcctcaccctgccccgggtcagccctgtgacctggagggagcaactgaaaagctctgggcctcggattcctcatctgtgaaatggggatgctaacagtgctacctcctctggttggtttgtggcagaggacacatgaggcaacctgtgtaaaatgcttggagggtggccagtgtggttaccatggagattgactggtaccgtcttccacatcctgtgttgactaagcgcgcacaccagaatacagttccaaacgattatcaaacatgaatacaattcagaaaataaacatgcagcaaaacttgccataaagattgcatgaaactatcactttaagaaaaatacattaaaaattaccttaaataccgaaaagtacttttgtaagtaaggatcagtccaataaatttaacctgtatttgaatcagtgtaaaacaacttggtttataattttgtcttcatcgagtgggggtgacttttgtagcttctgtcactgctgcctggagtatagaattaaacacctttttgcagaaaaagcctccagctgttttttttttttttttttttttttttactctcagataatatggggtgatttttaaaagacctgagacacacaaaatgctaccttttgtaatgctttaggaggaggtcttcagaaagtatgaaccaaacgcaaaataaaagatttttttttttaaacgttataagcactgcacacggatgaactctgccaggctggtgggattctttctgattagatgactgaattttatttttggattttccccttttgctgtatcctttttatttcttaaaaaaggaaaaagggttagctgcctgctagtgcacagttctgccttttacagagaaatctgaaatccaggccagggagaaaaagatgcttttatccctccagtgttc

SEQ ID NO: 460641 - DNA, 6508 bp, Homo sapiens
ggtgtgagttctgacttggttggtttccacatgaaaggcgtgttactctctctaggaatcgggtaatcctgggaggggcagtcctgtcagtgtcaacaaggccttaagatgcctaaaatcaaaaatacttaataaaaagacgtgcttaatacatcattctaggcaacataaccaggagccaatgtctttcctctgtctttgcctttcagttgctaggatcattttcctttctcctcttcctcattaatgtgacagcctctgcagttaaactctgagctctgggtctaaccaattgcctcggcctaattttcacttctgggagttgttttggaaagaggtttctgttgaatatcttgaggcagagctgaattaaacagctctttggagtccaggtggcaaagaaccttggggaaagtggcagtcagtgactgaggaaaagacccctcctgttccagttactttaagccatcaaacatatgccgttgcctcccaggagaatgaggtcacatggcaggaattttaggagagccacatttattctttgaagaccatcttagaaacatttccagtgtcatgttggttcttttcatccaccctctccagtgctgtgcttgtcacagaatcttgccttgccagtgcacatttattcccatggaacctcttgttcttttacttgtagaaacttcagaagcaccatttttattttcttttctctctagaaagttcaacaacatgttgctgtactgtgtgcccaaattcagcttggtaggctctaaattcacagttcgaaccagggttggcattgatggaatgaaaattgtagagactcaaaatgaagaatatccacatactttccaggtgtctgggaaagagagaacactggaactgcaggccagttctgcgcaagacaaagaagaatggatcaaggcccttcaagaaaccatcgatgcttttcatcaaaggcatgaaaccttcagaaatgcaattgcaaaggataatgacattcactcagaggtttctactgctgagctagggaaaagagccccaagatggatccgagataatgaagtgacaatgtgtatgaaatgtaaagaacctttcaatgcactgacacgaaggaggcatcattgtcgagcatgtggatatgtggtttgttggaaatgctccgactacaaagctcaacttgaatatgatggtggtaaattgagcaaagtttgtaaagactgttatcaaatcataagtggattcacagacagtgaagaaaagaaaagaaaaggaattttagagattgaatcagcagaagtatctggaaacagtgtggtgtgcagctttcttcagtatatggagaagtcaaaaccttggcagaaagcttggtgtgtgatccccaagcaagaccctcttgtgctgtacatgtatggtgccccccaggacgtcagagcccaggccaccattccacttctgggctatgtggtggatgaaatgccaaggagcgcagacctgccacacagtttcaaactgacccagtctaagtccgtgcacagctttgctgcagacagtgaggaactgaagcagaagtggctgaaagtcatccttttagctgtcacaggtgagacaccaggtggtccaaatgagcatccagccaccttggatgatcatcctgaacctaagaaaaaatcagaatgctgaactcctccaggaccagccatggtgtggaggtctcaggacttacagctcaagacattcccagctcttcttacacatctgctagcactttatgttgaaaaatataggcccataaatgcatcttttgaggactattttcctatgtttatgtactcttagtgaaattagtgtgcagagtcattctaccgataaagttttgaaataatgtgaaaactggagcattttttgagctattccttgaatatgtgcttttttgtcttgaagaaatggtgtatcaattgattctgtcaccgtcaggttagaatgagcacttccatttaagaaatcctttcatgtcttcttctctttcacatgtaggacctggaacagtttgaaagatatacctccatgttgccaaaatagatccatggtgaaaaatacagggacagttgaggctattgtattaacttatttaatttagtttataaatctctagctgcataaatgatgtctgttcttttaaaacaaaagaaaaaggacaaattgttggtgttcagatttccgatttataaagaaaagataacttgtttttgtagaaatactcctaagaatgtcttaagtatatagcaattatgtatatatagtattaaatatatatattatacatgcttttaggttcacattcatctctaatttattttttaaatataaagcatggtttatcgtggaattgagcaatgttctaaactgaagaaatgttttggtgatttatgttttgctgattggcatttgagggtattgatatttttataataagcggtaatttatgtggcatgggatatatttgtgaattccaacagtacttttaaagtaccattttttgtttctgtgcctatttaaaacagtgcctctcttagaaggtgctattaatataagatgagggttcagttaatgcttcagtcttgattattctaagattaaagtgcattttggtcactgggacagtcaaagtcatacaggttattttaccgtttacaatcctataattattgcagtagttaacatcagcatgtacaaacattttcaccaaaacccaaactttatgagacacctgaccttttacagaactaggatatgtggaaaccacatttatcgtaatgtttttcttttccgtaagataatcgagcatggttaaataaggtctctatataatgaacacttaagataactgtatgggccttttcctttgtcggaatgaaacaaaatccacatgtgataacctatgtttggggtgggggctggtcacatgattccttgtcatgaaggctgctcttcactcttttgtacttgtgattaaaatctcacactaagtttactatttaacttaatcctttttctcaaattaaacctttttttatactgtcataccccaaacattgtcactttttaatgtaccagtctgctagaaatctacaagaatgatcccactatctttagtatgtaaggattacaccttagatatagaatagaatttgagactgccacacatttattcaggccttgttactttaagaaatatcttattttttccaccccaaaggagcaagtgaaccaattattgctgacataataggttcccttcctccataaaaggattatcagccatgatcattaacattaaaccaaatagatggagccaaaaagagataaaagtagcttcttaggccctattaaatcagggaaagactagaagaaaatttacattgcttctcttttttaatggccagcggggtatgtgtgtgatgtatactcagagtggttttttggaaaattaaactgtagctatagatgatgctttggttttcttaatctcaagaaaagagaagcaatggaaatacagaatgattaactggggaagaggacttttgtaagtgtgactagaacaatggtaatgtatgggccaatgggaagatttataagtcagattatttttgaaaactatttttaaaagcaagaagactacactttccctaccaaaacagaagtaacatggacacacttaagttttggctcaataaatatcaatgttatttaacttagatcattgaaagaatactcatgtaaagataatgtttattatcatgctcttaacagtcattatctttaattttttaaatgagaagcattaatactagaagagaatttctggttatccggtcaccatattcactttccaccccacattcttcagctaaacgcaaagagaagcagtgaaacagccttacccgcttctctcttattaaagaatcactgatgtttttactcaatgaaaggtaaagtaatacccttagccatttattaaacaattcaaccaagagacctcaaagtgtgattgatgataagaataatcaatgccttttcccttccaacatacttgagcagtcatgacaacctaaaaatatcattggttgctttcccattaaaaccaacgttccctgtgggtcttaattctttattttcactcatttggtgctttccaagtcatcttttctttaaagtgcccttcctccaaactttaaaaagtacttccttgacaaaatttctattcattataaaacatttcaatattttaagcttaaattttgcttttgctgaaagcctaccatttggcgtgttaagtatgaaatatagtgcagacttttatcttggttttaagtggggctcaataaaaaacaccagccacttttgtaataatggcatcacagtgtcatcatgtatgcaagcaataaaactctttagggtatggttttatactgaaaatttaatatgaaggccccttcccacaagaatatagataattattaactttctagatgtgatacggtaattcgaattgcagagtataaggaagggaaatgggaaggggcatcattccttggattttaaataacaagaacatttttactttaacaaagaaaatggatagaaaaagcacattttgttttccctgaagtttaatttgacatcaggtttgtgtacttatcttcactaggtgacttaacttaccccaatttttttaaaaattattaaactttttacagaaactaaccttttaaatgtaccctttccccatatatatatacgcacacgtttggattttttttttttaagaacacttgttctagttataaatatataaagaaaacgataaagtttgtggtactgcagggttgttaaagattctttgatgccttctaaaaacttttgtcaaaaatacttttgagttcacaattctgttttacttttccttgtccttactttttggaaacagggtggttgcttttatttgttttctggttatattcaaagccttaagttcttaatctgagcatattgtctgtgataaatttctgatgatctttctggactagatacaacctgagtagcaagcaccaaccggagcaagtaaacttctagggaacaagcgtcttgggttttataggtatctttgctataatgcagaatagattaatgaagatttcctatatcatatgatatttgtgttagtgggtctaagattaagcacatgatatttataagctaaaattaactcaaaagtcaagaatgtcttaatgttttcattcttaaattttgtattctccaagaatgtattagtatatgaactgtggccaaccagttcctattcttcagactgtattgacatctgtagtggatcatgttgcttcttcattcttaccaattttattagaatcaaacttcttgttatttgcatactattatctactatagattctcagctttagaaaatgactatgatacataaagaccactaggtcaacttaaaaaaccctttctgtgaatttatacatgtatgtatatatgtaaaaacactgttgatttgcaattctgtctttccatagaaatgaactttttctatcgaaattgtttaacttaaatattttaacataaattatttacatggatctttatgtataattcatccttatatataccccttaatcacgtagtcatgagaagataactttgctttctttacagaaagggcagagaggaataagataagaaactgaaacaagcaagaatgaagagagatgtgggggagagactgctggtctccagaccacagcaatgtgttttaagataagatgaaatattttaactgcagaagggatataaaatctatgtaattacatgctgatgggatccattgcacccaggtttttgaccttggcctgtaaatgctagactatgatatcttgttattctttttctcctttgggcttttaaaaaataatttcattctcagatcattttctgtactgtttactgaggcaaaaaaaaaaaaaatctgaagtcaatcatggtcttctactttctggactgagcatttggcagaatgcagtatcttttcctgtattttgacatgaaatagcacatggcttctacaagatagttttaacttgttggggtcaccgggagttatatgatggtcaaccccttttcccaaaattcattgtggtagttttagtggaaaacgtaaatcaagaaatctcatatcatactttaataaataaataccaaatacatagtgacatataggtttgggaagaaactagtctgtggggaccattataagagaatcacattatatattacacagtatatggatattggaatgtatcacttgtggggggttctcttcattagcaaaacagtcatgtctgtctgtatataagacttttttttttttaaccaaactagcatttcattttgtgagtgacaattgacattttaaaataagcat

SEQ ID NO: 460642 - DNA, 829 bp, Homo sapiens
ggatcaacacagtggctgaacactgggaaggaactggtacttggagtctggacatctgaaacttggtgaaattcatcttagcttctgggattggctcctactcaacatgcaagcactaatcctctaacatgcagagacagagtctcactctgttgccaggctggagtgcaatgatgccatctcgactcgccgcaacctccacctcccgggttccagtgattttcctgcatcagcctcccaagtagctgggactacaggcacgtgccaccacgcccagctaatttttgtatttttagtggggacagagtttcaccatgttggccaagatggtcttgatctcttgaccttgtgatccacccacctcagcttcccaaagtgctgggattacaggcatgagccactgcgcccagcccatacataagaattttaagtccagcatgctaccataatataaaaaacatctaggaaagagaatcagatattttcgttgagtgcttacaatgtatgaatcctttagcatcattatctcatttaatttgcaagcaatttttaagataggcatcatggaacacctacaacatgcaaagcagttttcattcatgacttcatttaatcttcccaatgaatttatgaagaaagtattattttggcaaatacacacatgacaacactaaaactcaaattagagaattttctaaagatcaaacaagtttaaagtgccaaatttaggattccaactatttctctgtgtcaggcctttgagcccaagctaagccatcatatcccctgtgacctgcacgtacacatccagatggccagttcctgcctt

SEQ ID NO: 460643 - DNA, 1407 bp, Homo sapiens
taaagtcccttttggctaagaacgggtttgacaccacgggctatgctgttcgtattcatcagccttgttctctttgctgcaccaatcaatttcttggttgctgtctctgtttcacttttaggggcacttttgggtggagcagagcctccttctgtcagctctgaaggttcagatgtgttggtcctttctcccttcagcccacctgaatgttctattggaaacccattgtcccctattccttacccatctagtcccacactatacccaccactccctgaggaactcagcccagcaagtactacttgtagtggagcctcctatcaacctccaaagggaaacctttgtccacttagagaggtgacaaatggggaagaagtcactgtgagagtacatgttcccttttctatgtctgatttggctgtatataaagaggagtttggtcatttctctgaagacccgggaaaattcatagataagtttgagaaattaactctgacgtatagtttaacttggcaggatctgcatgttttattgtctctgtgttgtacagtggaagagaaacaacacattttgggggcagctaggacccatgcacacgaggtattggcttgcaacccaaaccatgatatatatcaggcaggaggtgaaattcatcttagcttctgggattggctcctactcaacatgcaagcactaatcctctaacatgcagagacagagtctcactctgttgccaggctggagtgcaatgatgccatctcgactcgccgcaacctccacctcccgggttccagtgattttcctgcatcagcctcccaagtagctgggactacaggcacgtgccaccacgcccagctaatttttgtatttttagtggggacagagtttcaccatgttggccaagatggtcttgatctcttgaccttgtgatccacccacctcagcttcccaaagtgctgggattacaggcatgagccactgcgcccagcccatacataagaattttaagtccagcatgctaccataatataaaaaacatctaggaaagagaatcagatattttcgttgagtgcttacaatgtatgaatcctttagcatcattatctcatttaatttgcaagcaatttttaagataggcatcatggaacacctacaacatgcaaagcagttttcattcatgacttcatttaatcttcccaatgaatttatgaagaaagtattattttggcaaatacacacatgacaacactaaaactcaaattagagaattttctaaagatcaaacaagtttaaagtgccaaatttaggattccaactatttctctgtgtcaggcctttgagcccaagctaagccatcatatcccctgtgacctgcacgtacacatccagatggccagttcctgcctt

SEQ ID NO: 460644 - DNA, 6357 bp, Homo sapiens
agtagacacctccagcggggccgtcctacccaaggggcactgtggggactgtctgcagccaccccagctcatacctctctgcctccccgctctcaaggagggtctgccgcatgtgatgaaagtgtctactctcagggaaagctcagccatggcttccccactgccccgggagatggaggaggagctggtgcctactggctctgagccaggtgacactcgggccaaaccccctgtcaagcccaaaccccgggccctgcctgccaagccagccctgcctgccaaacccagcctgctggtgcctgttgggcctcggcctccccggggtcccctggctgagttgccttctgccaggaagatgaacatgctggcaggaccccagccctatggtggcagcaagcgcccccttccctttgcaccaaggcctgcggttgaggcctccactggaggagaagccacccaagagactgggaaagaggaggctgggaaagaggagccaccccctttgacacccccagctcgatgtgcagccccagggggtgtacggaaggcccctgcccctttccgcccagcctcagagcgcttcgcggccaccacggtggaagagatcctggccaagatggagcagcctcggaaggaggtccttgccagccccgaccgcctgtggggttcccgcctcacctttaaccacgatggcagctcgcgatatggccccaggacctatggcacgaccactgctcccagggatgaggatggcagcaccctcttcaggggatggtcccaggaggggccagtaaagtctccagcagagtgccgggaagagcacagcaagacccctgaggagaggagccttccttccgacctggccttcaacggggacctggctaaggcagccagctcggagctacctgctgatatttccaagccctggattccctcaagtccagccccctcctcagagaatggaggccctgccagcccaggcctccccgcagaagcctcaggctcaggccctggctctccccatcttcacccgcctgataagagttctccctgccactcacagcttctggaagcccagactcctgaagcttcccaggcttctccctgccccgctgtgactccatcagctccaagtgcagccctgcctgacgagggctcccgccacacccccagcccggggctccctgccgagggggctccagaggcccccagacccagcagcccaccccctgaggtcttggagccccatagcctggatcagccccctgccacctcaccccggcccctgatcgaggtgggtgagttgctggatctcactcggacgtttccatctggcggggaggaggaggccaagggtgacgcacacctccgccccaccagcctggttcagcgccgattctctgaaggtgtgctccagtcacccagtcaggaccaggagaagctggggggctcgctggctgccctgccccaaggccaggggagccagttggccctggatcgtccctttggggcagagtccaactggagcttatcacagtccttcgaatggaccttccccacgaggccctcgggtctgggcgtgtggcggctggactccccgcctccctcccccatcactgaagccagtgaggccgccgaggctgctgaggctggcaacttggccgtttccagcagggaagaaggagtgtctcagcaggggcaaggggctgggtcagctccaagtgggtcaggaagttcctgggtgcagggggatgatccaagcatgtccctcacccagaagggcgatggggagagtcaacctcaattcccagctgttccccttgagcccctgcctacaactgagggcacacctggattacctttgcagcaggcagaggagagatacgagtcgcaggagcccttggctggacaggagtcccctctccccctggctaccagggaggcagccttgcccatcctggagccagtcctggggcaggagcagccagcagcccctgaccagccctgtgttctctttgctgatgcccctgagcctggacaggcactgcctgttgaggaggaggccgtgaccctagcccgggctgagaccacccaagccaggacagaggctcaagacttgtgtagggcatcccccgagcctccaggccctgaaagcagctcccgctggctggacgacctcctggcttcaccaccacccagtggtggcggtgcaaggcggggagctggagctgagctgaaggacacacagtccccaagtacctgctctgagggactccttggctggtcccagaaagatctgcagagtgaatttgggatcacaggagacccacagcccagcagtttcagtccttccagctggtgtcaaggtgcttctcaggactatggccttgggggtgcaagccctagaggagacccaggtctcggagagagggactggaccagcaagtatgggcaaggagcaggggaagggagcaccagggagtgggccagcaggtgtggcatcggccaggaggagatggaggccagcagcagccaagaccagagtaaagtgtctgccccaggggtgctcacagcccaggaccgggtagttggaaagccagcccagcttggcactcagcggagccaggaggcagatgttcaggactgggagttcagaaagagggattcccagggcacttactccagccgggatgcagaactccaggaccaggaattcggaaagagagattcactgggtacctacagtagtcgagatgtaagccttggggactgggaatttgggaagagagattctctgggtgcttatgccagccaagatgccaacgagcagggccaagatttggggaagagggaccaccatggtaggtacagcagccaggatgccgatgagcaggactgggagtttcagaagagagatgtgtcactcggcacctatggcagccgggctgcggagccacaggaacaggagtttgggaagagcgcttggataagggactacagcagtggtggcagctccaggacccttgacgcccaggacagaagctttggaacgagacccctgagctctgggttcagccccgaggaagcccagcaacaggatgaggaatttgagaagaagattccaagtgtggaagacagccttggagagggcagcagggatgctggccggccaggagagagaggatccgggggcttgttcagtcctagcactgcccacgtgccggatggggcactcgggcagagagaccagagcagctggcaaaacagtgatgctagccaggaggtgggagggcatcaggagagacagcaggcaggggctcagggccctggcagtgctgacctggaagatggggagatgggaaagcgaggctgggtcggtgagtttagcctcagtgttggcccccagcgagaggcagcatttagcccagggcagcaggactggagccgggacttctgcatcgaggccagtgagaggagctatcagtttggcatcattggcaacgacagagtgagtggtgctggctttagcccttctagcaagatggaaggtggtcactttgtgcctcctgggaagaccacagctggctcggtggactggactgaccagctgggtctcaggaacttggaagtgtccagctgtgtgggttctgggggctcgagcgaggccagggagagtgccgtgggacagatgggctggtcaggtggcctgagcttgagagacatgaacctgaccggctgtttggaaagtggagggtctgaagagccggggggaatcggagttggggagaaggactggacttctgatgttaatgtgaagagcaaagatttggctgaggtcggggagggaggaggccacagccaggccagagagagtggcgtggggcagactgactggtcaggtgtggaggccggagagttccttaaatcaagggagcgtggagttggacaggcagactggacacctgaccttgggctgagaaacatggccccaggggcagtctgcagtcctggagagtccaaagagcttggggtgggccagatggactggggtaacaatctgggcctgagggatttggaggtgacctgtgacccagactctggaggttctcaggggctacggggatgtggagtggggcagatggactggacccaggacttggcgccccagaatgtggagctctttggggctccaagtgaagccagggagcatggggtgggcggggtgagccagtgcccagagcccggcctgaggcacaatggcagcttgtctcctggcctggaggccagagaccccttggaggccagggagctgggggttggtgagacaagtgggccagagacccagggtgaagattactcctcgtcttccttggagccacaccctgcagaccctggaatggagacaggagaagccctcagcttcggagcaagccctggcaggtgcccggcccgccccccaccctccggctcccagggcctgctggaggagatgctggcagccagcagctccaaggcggtggctcggagggagtcagcggcctcgggccttgggggcctgttggaggaggaaggagccggggcaggtgctgcccaagaggaggtgctggagcctggcagggactctccaccctcctggaggccgcagcctgatggtgaggccagccagacagaagacgtggatggcacctggggctcttcagcagccaggtggagcgatcaggggccagcacagacttctcggcgaccctcccaaggccctcctgccagatcccccagtcaggacttctccttcattgaggacaccgagatcctcgacagtgccatgtatcggagccgtgccaacttggggcgcaagcgtgggcaccgggccccggtcattcggcctgggggtaccttgggcctgtcggaggcagcagactcggatgcacacctgttccaggactctacagagccacgggcatctcgggtgccatcttcagatgaagaggtagtggaggaacctcagagccgccggacacggatgtcgttgggcaccaaggggctgaaagtcaacctctttcctggcctgagcccctcagccctgaaggccaagctgcgcccccggaatcgctcagctgaggagggagagctggctgagagcaagtcgagccagaaggagtccgcggtccagcgttcgaaatcctgcaaggtcccaggactgggaaagcccctcacgttacctcccaagccagagaaatcctcagggtcagaaggatcgtcgcccaactggcttcaagccctgaaactgaagaagaagaaggtctgagaagtcactgaggttcttcccacctggcagtctcaggcagtgcccattcctgtggggtccctgggtgaggagacggctggagccccaccatgccccaggctgcagcctctgtcccctccacctctgaggagcgtctggggaggcacatttatgcactttgtatcaccctccgaactccccccacaccttcccttccctggatttcatcactagtggttgaaggttttgtcccttcctctcctccttccctctccctctctgcttcctcctccagcctcccttgggttttcttttgataccaatttatagcattttttataaaagcctttgatttttataatgggtgggactgtatccctgcctcaccccaggtctccgtctgccccgccaggtaccccacagagaccaatgacattttgccacttgaaacaataaataaagttttttgggaattggtgctgtccaggtggtggtacgtggtcatggctgcccatttcctcttccaaggctgtggttggaaaatgctgattcccactctgccccaccaggggctcactctgacactggatgtgtcacttcccttttactgacatcactgagaagggtatattgtttacaataggctgatcaagaattcagacaccctctaaatcttagtagtttaacacaaaaaggtttatatttcatccatgacacagtccagggtgggctggtgataggggcactctgcaccttgatgtcattgagagcccaggctctttccctgttgtggctcggccatcttcagggcttggagtcttctgccccatctaatggagaaagggggaatcttttgtgggagatactctgagtccattcaggctgctgtaacaaaatactgtagacttggatggcttataaacaacagacgcctatttctcacagttctggaggccaggaagctgaagaacaaagcactgacagattcagtgtctgatcaactactagcattttgaaagccaatactcttttttagaatagatttagatttacagaaaagctgaaatgatggt

SEQ ID NO: 460645 - DNA, 5543 bp, Homo sapiens
tcctcgcgcttgggcagtgggaagtccaggggtttgtcgttctggtgacttcccccacctggctcagccctgcttcctgcatgtctccttcccttccaataaggctaacaaaactttccctagctaagccgacctttccctcccgccttgggcccttggccacctgctgggacggtgaatgggagagtctcagaattgaaccttgaaaacttgctgggggcaccagacagaagagaagggaggagggcaccttgctgcttgtgattgtggaatcaagggctccagctgaagctgaaaggggacttagcaatggggacctcatgccatgttgttttataaattcagtcccaaaaattcaaggtctcttttgctgttaaggtgacactatattaagaaatgtcgatttattgaagagtcagagaagtgaagaggtcagaaaggtaccactagagttggcaaaagccacaggcatgaatttgtaaatgctgctggctttcagcaggctgaagccatcctctcttgtgactgatgggggttcagagctcctcaggccttactcttcttttgtaaaatccagcccagagccatctcctagtattcatagcctgttttctggagcctggacttctgccagagtgtcacctcttaccggcagccccaacacctctcccttgttgaacatcctgtggcagcttcccccagaaccgggaaggaggaccactctctgtggcaccctggactacctgcccccgccccccgcccaagatgattggaggtcagatgcatggtgagaagaaagctccacatcaataaacatgacactctgaagtgaaagtagccacaagaattgtgctacttatactggttcgtaatctggaggcaaggttccgctgcagctgccccctcagcctgggccaggcatggtttcttcccaggagacaaatccagagtgtggctgtggggaaagtgaccactttgccctgactcgatcggttaaggagctgtgcaataaccttcccagtacctgattattacacctgacctgacacctcacccccctccccgcttattacacctgaccagggacaaaagttttcagaatcacagactctctagaaccccactgtgtgttagttttattctttgtcttcaaactacccacatttaaatacaaagatacctcatagaagtgagtgatgtggtgctcggctgcagtggacatcatgtttctgttagatgggtctaacagcgtcgggaaagggagctttgaaaggtccaagcactttgccatcacagtctgtgacggtctggacatcagccccgagaggatcctcatcatcgtcactgatgggaagtcccagggggatgtggcactgccatccaagcagctgaaggaaaggggtgtcactgtgtttgctgtgggggtcaggtttcccaggtgggaggagctgcatgcactggccagcgagcctagagggcagcacgtgctgttggctgagcaggtggaggatgccaccaacggcctcttcagcaccctcagcagctcggccatctgctccagcgccacgccagactgcagggtcgaggctcacccctgtgagcacaggacgctggagatggtccgggagttcgctggcaatgccccatgctggagaggatcgcggcggacccttgcggtgctggctgcacactgtcccttctacagggaagaccctgccctagaggagcacctgattggcctgcccctgtgtgggcagcccagggtgaggccatcccaggagctgctgccaacccagagtggggctttctgcccccagatgaggaaccgctcctgtgacagcagggcacatggccccggagacgcaggagaggcgaggcggttaatgggcatctctctgataggcccctgtgactcgcagccctgccagaatggaggcacatgtgttccagaaggactggacggctaccagtgcctctgcccgctggcctttggaggggaggctaactgtggtagtttctctgcaccatctccctcctgggagatgttcggcatctcgggtgggacagctcgcatgccgcatgaccatggcttgacagtgggtgttgctgtgatccccgcagccctgaagctgagcctggaatgcagggtcgacctcctcttcctgctggacagctctgcgggcaccactctggacggcttcctgcgggccaaagtcttcgtgaagcggtttgtgcgggccgtgctgagcgaggactctcgggcccgagtgggtgtggccacatacagcagggagctgctggtggcggtgcctgtgggggagtaccaggatgtgcctgacctggtctggagcctcgatggcattcccttccgtggtggccccaccctgacgggcagtgccttgcggcaggcggcagagcgtggcttcgggagcgccaccaggacaggccaggaccggccacgtagagtggtggttttgctcactgagtcacactccgaggatgaggttgcgggcccagcgcgtcacgcaagggcgcgagagctgctcctgctgggtgtaggcagtgaggccgtgcgggcagagctggaggagatcacaggcagcccaaagcatgtgatggtctactcggatcctcaggatctgttcaaccaaatccctgagctgcaggggaagctgtgcagccggcagcggccagggtgccggacacaagccctggacctcgtcttcatgttggacacctctgcctcagtagggcccgagaattttgctcagatgcagagctttgtgagaagctgtgccctccagtttgaggtgaaccctgacgtgacacaggtcggcctggtggtgtatggcagccaggtgcagactgccttcgggctggacaccaaacccacccgggctgcgatgctgcgggccattagccaggccccctacctaggtggggtgggctcagccggcaccgccctgctgcacatctatgacaaagtgatgaccgtccagaggggtgcccggcctggtgtccccaaagctgtggtggtgctcacaggcgggagaggcgcagaggatgcagccgttcctgcccagaagctgaggaacaatggcatctctgtcttggtcgtgggcgtggggcctgtcctaagtgagggtctgcggaggcttgcaggtccccgggattccctgatccacgtggcagcttacgccgacctgcggtaccaccaggacgtgctcattgagtggctgtgtggagaagccaagcagccagtcaacctctgcaaacccagcccgtgcatgaatgagggcagctgcgtcctgcagaatgggagctaccgctgcaagtgtcgggatggctgggagggcccccactgcgagaaccgattcttgagacgcccctgaggcacatggctcccgtgcaggagggcagcagccgtacccctcccagcaactacagagaaggcctgggcactgaaatggtgcctaccttctggaatgtctgtgccccaggtccttagaatgtctgcttcccgccgtggccaggaccactattctcactgagggaggaggatgtcccaactgcagccatgctgcttagagacaagaaagcagctgatgtcacccacaaacgatgttgttgaaaagttttgatgtgtaagtaaatacccactttctgtacctgctgtgccttgttgaggctatgtcatctgccacctttcccttgaggataaacaaggggtcctgaagacttaaatttagcggcctgacgttcctttgcacacaatcaatgctcgccagaatgttgttgacacagtaatgcccagcagaggcctttactagagcatcctttggacggcgaaggccacggcctttcaagatggaaagcagcagcttttccacttccccagagacattctggatgcatttgcattgagtctgaaagggggcttgagggacgtttgtgacttctggcgactgccttttgtgtgtggaagagacttggaaaggtctcagactgaaatgtgaccaattaaccagcttgtttgatgatgggggaggggctgagtgtgcaatgggcccaggtctggaggggccacgtaaaatcgttctgagtcgtgagcagtgtccacctgaagggtcttcctttcaaaagaggctgcggccagagactgtggctcatgcctgtaatcccagcactttggaggctgaggcaggtggatcacccgaggtcaggagtttgagaccagcctggccaacgtggtgaaagtttgtctttactaaaaatacaaaagcaaactgtgggctctcgacttacatagtaagggcctttactgtttctttgtaggaaatgggtttctcgcctttgaaacattttttccccttttgtagtgacagtgccactaaatagttcagcttttgtcagtcccccaggaaagtgctatcctatggcctaactagccaagccttttttctttcatttaaaagaaattagctttaatttttacctttaattacttattcaaataagacagaaatatattttccttgcaataattaaaacattgcatataggccataaatttccttattttctctgaacgatcctgattccagtcatcttgttgaataccctagttctaataattgactcttgcttttctagagaaatatttccaaatgatgctagttttgtctcttcctttcaaagttgtataccacttctttttcttgtcattttgcattgcctgggacctccagaataatgtttcatgaagtagcatgtatccatatctggttcttgactttttcatcataataattgttttctatgggttacttatcagtttaagaatgcttaattcctagatgaactaagagtgtttattacatgttgagatttatggtatgctttttcttcctcaagataatgcattttttgtattatctgttaatgtgataggttatccatttgtgtattttcaatcattgaacaacccttgatttttttggataaactctatttggtcattatgcatcattctataaaccctgctgaatttttcatttgccaacatcttatttcagattcttttaatctgtgtccaacaatgagatttgttttcttttgcaatttgttttgaatttttggtatcagagctatactaaccttataatggaaaatacatatttctcaaacttttacactgatatattcatagtatttttttataatttgaaaaatcttgtcagtatctgtattaaggcctccatttcagttctgctatttcatattgccttaggttgtctatttgtctctttaatgaacccgattttgattttgtcatttttaaaataaacacatttatgctataaacttccttaattactacttaggcaaccttcccagtattggtatgtttcttttttcccaagaattctttaggagtatatttaacttctgggaggagtactgatttttcattcacttatatatgatcaatttctgcagatgtttcctgtgtctttggtatgttgttaactgtacaactaaaa

SEQ ID NO: 460646 - DNA, 5464 bp, Homo sapiens
ttgaggatccccgcgttaatccgagctaacaaaactttccctagctaagccgacctttccctcccgccttgggcccttggccacctgctgggacggtgaatgggagagtctcagaattgaaccttgaaaacttgctgggggcaccagacagaagagaagggaggagggcaccttgctgcttgtgattgtggaatcaagggctccagctgaagctgaaaggggacttagcaatggggacctcatgccatgttgttttataaattcagtcccaaaaattcaaggtctcttttgctgttaaggtgacactatattaagaaatgtcgatttattgaagagtcagagaagtgaagaggtcagaaaggtaccactagagttggcaaaagccacaggcatgaatttgtaaatgctgctggctttcagcaggctgaagccatcctctcttgtgactgatgggggttcagagctcctcaggccttactcttcttttgtaaaatccagcccagagccatctcctagtattcatagcctgttttctggagcctggacttctgccagagtgtcacctcttaccggcagccccaacacctctcccttgttgaacatcctgtggcagcttcccccagaaccgggaaggaggaccactctctgtggcaccctggactacctgcccccgccccccgcccaagatgattggaggtcagatgcatggtgagaagaaagctccacatcaataaacatgacactctgaagtgaaagtagccacaagaattgtgctacttatactggttcgtaatctggaggcaaggttccgctgcagctgccccctcagcctgggccaggcatggtttcttcccaggagacaaatccagagtgtggctgtggggaaagtgaccactttgccctgactcgatcggttaaggagctgtgcaataaccttcccagtacctgattattacacctgacctgacacctcacccccctccccgcttattacacctgaccagggacaaaagttttcagaatcacagactctctagaaccccactgtgtgttagttttattctttgtcttcaaactacccacatttaaatacaaagatacctcatagaagtgagtgatgtggtgctcggctgcagtggacatcatgtttctgttagatgggtctaacagcgtcgggaaagggagctttgaaaggtccaagcactttgccatcacagtctgtgacggtctggacatcagccccgagaggatcctcatcatcgtcactgatgggaagtcccagggggatgtggcactgccatccaagcagctgaaggaaaggggtgtcactgtgtttgctgtgggggtcaggtttcccaggtgggaggagctgcatgcactggccagcgagcctagagggcagcacgtgctgttggctgagcaggtggaggatgccaccaacggcctcttcagcaccctcagcagctcggccatctgctccagcgccacgccagactgcagggtcgaggctcacccctgtgagcacaggacgctggagatggtccgggagttcgctggcaatgccccatgctggagaggatcgcggcggacccttgcggtgctggctgcacactgtcccttctacagggaagaccctgccctagaggagcacctgattggcctgcccctgtgtgggcagcccagggtgaggccatcccaggagctgctgccaacccagagtggggctttctgcccccagatgaggaaccgctcctgtgacagcagggcacatggccccggagacgcaggagaggcgaggcggttaatgggcatctctctgataggcccctgtgactcgcagccctgccagaatggaggcacatgtgttccagaaggactggacggctaccagtgcctctgcccgctggcctttggaggggaggctaactgtggtagtttctctgcaccatctccctcctgggagatgttcggcatctcgggtgggacagctcgcatgccgcatgaccatggcttgacagtgggtgttgctgtgatccccgcagccctgaagctgagcctggaatgcagggtcgacctcctcttcctgctggacagctctgcgggcaccactctggacggcttcctgcgggccaaagtcttcgtgaagcggtttgtgcgggccgtgctgagcgaggactctcgggcccgagtgggtgtggccacatacagcagggagctgctggtggcggtgcctgtgggggagtaccaggatgtgcctgacctggtctggagcctcgatggcattcccttccgtggtggccccaccctgacgggcagtgccttgcggcaggcggcagagcgtggcttcgggagcgccaccaggacaggccaggaccggccacgtagagtggtggttttgctcactgagtcacactccgaggatgaggttgcgggcccagcgcgtcacgcaagggcgcgagagctgctcctgctgggtgtaggcagtgaggccgtgcgggcagagctggaggagatcacaggcagcccaaagcatgtgatggtctactcggatcctcaggatctgttcaaccaaatccctgagctgcaggggaagctgtgcagccggcagcggccagggtgccggacacaagccctggacctcgtcttcatgttggacacctctgcctcagtagggcccgagaattttgctcagatgcagagctttgtgagaagctgtgccctccagtttgaggtgaaccctgacgtgacacaggtcggcctggtggtgtatggcagccaggtgcagactgccttcgggctggacaccaaacccacccgggctgcgatgctgcgggccattagccaggccccctacctaggtggggtgggctcagccggcaccgccctgctgcacatctatgacaaagtgatgaccgtccagaggggtgcccggcctggtgtccccaaagctgtggtggtgctcacaggcgggagaggcgcagaggatgcagccgttcctgcccagaagctgaggaacaatggcatctctgtcttggtcgtgggcgtggggcctgtcctaagtgagggtctgcggaggcttgcaggtccccgggattccctgatccacgtggcagcttacgccgacctgcggtaccaccaggacgtgctcattgagtggctgtgtggagaagccaagcagccagtcaacctctgcaaacccagcccgtgcatgaatgagggcagctgcgtcctgcagaatgggagctaccgctgcaagtgtcgggatggctgggagggcccccactgcgagaaccgattcttgagacgcccctgaggcacatggctcccgtgcaggagggcagcagccgtacccctcccagcaactacagagaaggcctgggcactgaaatggtgcctaccttctggaatgtctgtgccccaggtccttagaatgtctgcttcccgccgtggccaggaccactattctcactgagggaggaggatgtcccaactgcagccatgctgcttagagacaagaaagcagctgatgtcacccacaaacgatgttgttgaaaagttttgatgtgtaagtaaatacccactttctgtacctgctgtgccttgttgaggctatgtcatctgccacctttcccttgaggataaacaaggggtcctgaagacttaaatttagcggcctgacgttcctttgcacacaatcaatgctcgccagaatgttgttgacacagtaatgcccagcagaggcctttactagagcatcctttggacggcgaaggccacggcctttcaagatggaaagcagcagcttttccacttccccagagacattctggatgcatttgcattgagtctgaaagggggcttgagggacgtttgtgacttctggcgactgccttttgtgtgtggaagagacttggaaaggtctcagactgaaatgtgaccaattaaccagcttgtttgatgatgggggaggggctgagtgtgcaatgggcccaggtctggaggggccacgtaaaatcgttctgagtcgtgagcagtgtccacctgaagggtcttcctttcaaaagaggctgcggccagagactgtggctcatgcctgtaatcccagcactttggaggctgaggcaggtggatcacccgaggtcaggagtttgagaccagcctggccaacgtggtgaaagtttgtctttactaaaaatacaaaagcaaactgtgggctctcgacttacatagtaagggcctttactgtttctttgtaggaaatgggtttctcgcctttgaaacattttttccccttttgtagtgacagtgccactaaatagttcagcttttgtcagtcccccaggaaagtgctatcctatggcctaactagccaagccttttttctttcatttaaaagaaattagctttaatttttacctttaattacttattcaaataagacagaaatatattttccttgcaataattaaaacattgcatataggccataaatttccttattttctctgaacgatcctgattccagtcatcttgttgaataccctagttctaataattgactcttgcttttctagagaaatatttccaaatgatgctagttttgtctcttcctttcaaagttgtataccacttctttttcttgtcattttgcattgcctgggacctccagaataatgtttcatgaagtagcatgtatccatatctggttcttgactttttcatcataataattgttttctatgggttacttatcagtttaagaatgcttaattcctagatgaactaagagtgtttattacatgttgagatttatggtatgctttttcttcctcaagataatgcattttttgtattatctgttaatgtgataggttatccatttgtgtattttcaatcattgaacaacccttgatttttttggataaactctatttggtcattatgcatcattctataaaccctgctgaatttttcatttgccaacatcttatttcagattcttttaatctgtgtccaacaatgagatttgttttcttttgcaatttgttttgaatttttggtatcagagctatactaaccttataatggaaaatacatatttctcaaacttttacactgatatattcatagtatttttttataatttgaaaaatcttgtcagtatctgtattaaggcctccatttcagttctgctatttcatattgccttaggttgtctatttgtctctttaatgaacccgattttgattttgtcatttttaaaataaacacatttatgctataaacttccttaattactacttaggcaaccttcccagtattggtatgtttcttttttcccaagaattctttaggagtatatttaacttctgggaggagtactgatttttcattcacttatatatgatcaatttctgcagatgtttcctgtgtctttggtatgttgttaactgtacaactaaaa

SEQ ID NO: 460647 - DNA, 4377 bp, Homo sapiens
ggattagagagaaaaatgtggtcagcgcttaatatggagggcacagtgggtgtgctgctttctcttttccatccctctgtcaacttcattctcttttgggggcaaacaagactcagatctaaacagagtttatggtttgttttgcattttgtatttattaatatttatgccgactttgaaggtgctgaccagaaggcatcagtaacacacacacgcacacgcacacacaccacacaccatgtctgtttggtttgattctgagcctgagatcctggaaatatttcagctgttgttaagaggctggagttaggacccaggaaggacacagcagtggggatataaatagaaaaggagaacagaacaaagtttgaggagagagacttacatcactcactccccctccacccagagagcaggacggaggtgtgaacttgagccagaccagaaggagctcgagagcggccgcaggacaagcccgaggagcaggcgggcgctccaggggaaaaccacgcacaaaaccttcttcagagaaaagggaagctccaaacctgactgagacaaacggaggctcttgaaataaaaagaaaataccgcaggacaaacagcctcccgtccccgggcgcaggtcgcggtcacagtggtgacctgggattgctttcccaggactgcgagtcgggtttgggtttctcctccctgcattccacagctgctctggtcatcgcaacgtgtttattgatcactgaagaatctcaagttttgagacgaggaagaaacacccattaggtctccaagacagctgtgtttcacaaactttaaggagacagaaattttctcccctggaacctgtgaaaatgtcccttttccaaggaagtgaaggttaagaggtcccgttctcacagaccctcaggaatttcacttggctccgagctttgacctccgagagagccatggaaaagctgctgcggctgtgctgctggtactcctggctgctgctattttattacaactttcaggtgcgtggcgtctactccagatcgcaggaccatccaggatttcaggtgttggcgtctgcttcccattactggccactggagaatgtggatgggatccatgaacttcaggatacaactggagcgtcccgaacccacaagctcactgtgcttccttcccgtaatgctacttttgtgtattccaatgattctgcctactcaaatctctctgcaactgtagatattgtggaagggaaggtcaacaaaggcatttacctgaaagaggaaaagggagtcacgcttctctattacggcaggtacaacagctcctgcatcagcaagccagagcagtgtggccctgaagatttccagtttttcttgataaatctctcctgacttctctggctggctggagctaagtcgcggtggccctggacttccgtctccagttcccctcagtccccaccagacttctcgactcttcaataatcttcaggtcgaacagagcctgtccgcagcatgagctctggggccagaaggcgtgggttccacttccggttccgacctgtttgtggggatcttgggcaaccactgcttccctttgaaaagcctcatctgtaaaagcctctctgctgcttgtctgcctgccttcattctaggagctactgtgggtcctgtcttttggcaaatggtgccttctggggacatgttcttaaggtcacttgctgctaatggggcaagctttggaggacattggagagaaaaaggctgtttggatccctggccattcttgaatgttaagcttagaaaacacagtctgttccctcaatactcaggattctgtctttcaactcccctgaccagtgagcacacagggtttgctgcaccttcacttgaatactgaacaagggccattcacgactcctagagaaatcatttcccctacattgaacctatagtcaatactgactggacactcaagcatgttgctaggaggtagatctcatgtgaagtctgtgaccataataaagttaaatgaaagggaactgattgcataaaatccaaaaaaggtcatttccagcatcaaggtgcagattattaggtaattcttccttgcttactctcatttctacctctgatttattgctgtgtcggttaagatgatgttatttgatataacaagtaaaaacacagacaacggcagaaaaagaagcccattccgctattggactcctctgacttttagtgtgttatttctgatattgggctaaattccgtctcgagtaacttcggcccattgcttctagttccagctctcctgtgaatggctttggcagctcctgggaaaggcagcctccccgattagcccctcagcttcaccttcctccctctgtgaatgtttcctttgctttttcctcacatgcattaagaacttcttctgcttataaaccccagagaggctgctgaggtcccgaggcagcagctggagcatctccgcacggccatttccctcttctcagctttgagttgactttttccccctttgcatttgtttcctaaatttaaaacgctgtcaacaatttgctaagatacttgcaggtggagttttaggatagaaatttccagaggggcctgggggacacgggcctggcagggatctagctactctcttactcaggcgatctggggggtaaggagtgactgccccttaaggcagggccagcattttccagttttcctcagcctgcaggactctctgctgtctgtcgctgtgactgaaggtggtggccattccccaggatggcctgcgtgtggctttgttagaggagcagggaaaggggaaagggaagaatttcttattcccatggggaaagtgggtgtcctacagccccagtcatttcaggaagcgattagagtggggctttggggtgggggtgtggagtgagaattttaaaggctcgatatgcaaacgagtgtctcctcctggccacaccaggcacagggcccatgaggcagccgggaaacgggctctgagtcttgcgtgaaagcgtatgggacgcgcatcctcgtggctctttgggaaacgtggtgggccacaggctggtccgggtgccagaacggccatcagaccctgtccctgccttgctccagctctgttctcaaggctgctttcctggtgtgggagcagcatccgctcagaagctccaagttctggttttgtcagatttttccttgttgtattgatggcccaactccatgaggcaaagttccttaaaaggctaatatggaaggcacattgtgaatttgttatgactctatgaagacgtgaattgatacttaaatataagctgttgctcaggtagaagtcattgttttgtgcgttgagttaactaaatgaaaagcttggttaccggcaccatggatggccttcgatctacccttacctaacaccacatggaatttttttatttttatttttcttcctgaacagaaagacatttggccaagacaggctcattttgaattgagtgaaagaaattttaaaatgcagcaaagtttttggaaaaaattaacttccatgaatcctactgggaatttgtttcataacaaaaatttcacaacgcactgtgctgacttccttgtgaaacgggttgtttctgagtgtgcagggaagtggcgggaggcttgggggtttgtcctggcttctgtacccctcagcgcccaaggcagggaagtggcgggaggctcggggggttgtcctggcttctgtacccctcagcgcccaaggcaggtgttgcaggaagcccgttcatgaggtgggtgtgggtggtgccagccaggtctggggacaccagcgtcagctgccccaggcctctgtgcaacccccacagtcgcacccttttgcggtaacccacattactgggcactcgggaaggctgttttctttcccaggagccctaaggacagatgccgcagggcttggagttgtaccccgtagcctctcagaggtccagaaaggtccaggcctcttccaatttttttgaggttcttcttctcttaaaaaataaaatggggaaattccataccagggttataaaatgtatgctgtgtttttcctgaatcctgcgagggctttgaactcacaaaggtatagttgtcttgatatattgtcacaagacatttgaaggacttctaacagatatgttaattcataaggcatcacagaaagcatggtgggcaatgagacactgccttatacacgaatgacaaatgtcttctttgaattcagtgactctctaagactgtgtccataacctcatgtgaaattcagtgactctctaagactgtgtccataacctcatgtgaaggtaaggtctaaagtctaaat

SEQ ID NO: 460648 - DNA, 1419 bp, Homo sapiens
ggacctgtctcggcctttgccccagcctgaccgtcaccatggctcgtgggcgctattcaaggtgtttctgcccccagggagaaggctctggccctcacagggaaccagggcatcgaggctgcgatggactggctgatggagcacgaagacgaccccgatgtggacgagcctttagagactccccttgtgacatatcctgggacggtgagcccacttcctcagagcaaggcggccttgaaggatctggttctgctgccggagaaggcaaacccgctttgagtgaagaggaaagacaggaacaaactaagaggatgttggagctggtggcccagaagcagcgggagcgtgaagaaagagaggaacgggaggcattggaacgggaacggcagcgcaggagacaagggcaagagttgtcagcagcacgacagcggctacaggaagatgagatgcgccgggctgctgaggagaggcggagggaaaaggccgaggagttagcagccagacaaagagttagagaaaagatcgagagggacaaagcagagagagccaagaagtatggtggcagtgtgggctctcagccacccccagtggcaccagagccaggtcctgttccctcttctcccagccaggagcctccacccaagcgggagtatgaccagtgtcgcatacaggtcaggctgccagatgggacctcactgacccagacgttccgggcccgggaacagctggcagctgtgaggctctatgtggagctccaccgtggggaggaactaggtgggggccaggaccctgtgcaattgctcagtggcttccccagacgggccttctcagaagctgacatggagcggcctctgcaggagctgggactcgtgccttctgctgttctcattgtggccaagaaatgtcccagctgagggcctttgtcccattgtccctctgtgaccccttcatctttgataaagcactgacatctccttcctaataaatagaacctgagttctgtacatgcctgactccttcgatgggatggtgggcgagctacaatagctaagggcagaggaagatgtctgagtgcggatacagtagatgcctcttcagtgatgctttagatttacaaatcaaagtatctatgttgtattttaatgctgtgggttgctgattagagtgtataggggaagttaagacggatggatgagagtgtctataaaggggggtggaagtagtactatgtgtgatggacaacctctttgatctctatagtgtgtatagtactagtaaatataataagtccgcattctttctgcttttatttagtttattagttttgtgacgacaggatgtctttgacatctgtttgtcgctgggtctacgacgtgacagtcgcgcgcaaatctacgagtctcatctcacaactctctc

SEQ ID NO: 460649 - DNA, 955 bp, Homo sapiens
ggacctgtctcggcctttgccccagcctgaccgtcaccatggctcgtgggcgctattcaaggtgtttctgcccccagggagaaggctctggccctcacagggaaccagggcatcgaggctgcgatggactggctgatggagcacgaagacgaccccgatgtggacgagcctccacccaagcgggagtatgaccagtgtcgcatacaggtcaggctgccagatgggacctcactgacccagacgttccgggcccgggaacagctggcagctgtgaggctctatgtggagctccaccgtggggaggaactaggtgggggccaggaccctgtgcaattgctcagtggcttccccagacgggccttctcagaagctgacatggagcggcctctgcaggagctgggactcgtgccttctgctgttctcattgtggccaagaaatgtcccagctgagggcctttgtcccattgtccctctgtgaccccttcatctttgataaagcactgacatctccttcctaataaatagaacctgagttctgtacatgcctgactccttcgatgggatggtgggcgagctacaatagctaagggcagaggaagatgtctgagtgcggatacagtagatgcctcttcagtgatgctttagatttacaaatcaaagtatctatgttgtattttaatgctgtgggttgctgattagagtgtataggggaagttaagacggatggatgagagtgtctataaaggggggtggaagtagtactatgtgtgatggacaacctctttgatctctatagtgtgtatagtactagtaaatataataagtccgcattctttctgcttttatttagtttattagttttgtgacgacaggatgtctttgacatctgtttgtcgctgggtctacgacgtgacagtcgcgcgcaaatctacgagtctcatctcacaactctctc

SEQ ID NO: 460650 - DNA, 1718 bp, Homo sapiens
ctcctcaagtgccgccagagtgggagcccaggcagaggaggcgccaagagcgagcgagggctgtgaggactgccggcacgctttccggtctggcagagagcgcggagagacgcagaacgcagccagctcctccagggccctccaggccctccggacccgggccggcgggtgaactggggggccccgggacaggccgaggcctctgccctgcagataccggaggcctctgctgtggctgcccactggctgtgcccaggccttgaagccgcagcgaacctctctttcccaccccacctggatgactgatggcggcggctgcgtctccccgacgggaccccgccggccgccgcgtctcccgacccaagcctgccgggcctcgacgaaacccccgcagagtcgctgggacgcagcgcctttgggcggcgccgggcgtggtgggccggaaagtatggcggccgcttgaacgccgcgcggcggaggccattaaggcgtggagggcccgggaaggcggcctagggacgcaagcaggctcggccacctctttaggccacggagccgcgcagatccggttcccgggtgaccactctgtcgccattgggcgagaccgacctagtcctgacgacaacggacaaaggccttcaggggcctggaaggtgagtgaagtcccgaaagacgacgggtggaacggttagcggctatcgggcggttggtctttgttctaccagactttgctgtcagaagagagaaatggtagaatgacaggccacgtttggcccgttggaaatgcccaccaccctctgggaagatttactggccgtttatgtaaggcctgtgtatataatatgaaaaagctgctctcaacttcaccccaaccttttaatagaaaacatttgtcacatctagcccttctagatggaaagagacttggcccctactacacccaaatcaccacccagggaagtcacaatagcgattgtgtcagcaacaaaattaatggccagcagatcaaagttgttcctatccaaaagtataacttaatgaaagcagaacctttagaccaatattcatatttctgtgacagactttggcatctagacttctggctcagggaccttcctcagttcctccctgattcttggctacagcttagaggggtagggggattgagacaacctgagtctcagataaattaaataccttataaacaaatgaaatatcctaaaatgttaaggtcaattgacgtgcctgataaataatctcttaaatgtccactgctcatcacaattgtgaaactggcagggacctttcctatctatttgtgctcacagcagtttctggcctgtatccctgtgagtaaagttaagaattatatggatttaataatattgcccttctgatcttccagtgtttgccaaagtagaaaaaaacagtacaattgtatataatggtattcaaaatatacagcatacacatggtatgcaagatatgaattgaatgattcaaactgtaagttcccaggaggcatgaaacaacattaactttctgtgaccaatgtttaatattgaatgtacaaacacaccaacaccaacctctgcaatgataatgatgggcggaagtgacactgaatatttcagcactgaaaagacattcatttttcaggtgtactgttatgcatttcttttcccatttgtaatcacagttgtaccacactgctcttt

SEQ ID NO: 460651 - DNA, 711 bp, Homo sapiens
gaggcgcgtccctagctaggagtgctgggagttatggtgtcttaacggtttccagcccattggtcgccgacctgctaactacaaaaccagcatgcgctgtctgtcctcccccgtggtgcgcagccctggagggagggacagggcggtgtggactcgtcctttcctaagcgatgccacatgctgattctgtgccaccccctcgccaagggagtccgcagaaggacttgaggggcaggtctaggctgggcgatgaggacggtgtgaccctgcgaagtgcacctcccttgctcaaatcggaggggtctggtcctcatgaacagcccgctgaacatctcggtgtcctctcacatacacacccgcggggggtttccagagcatcgcacctcttccagcccagggagccgcctgctctgctaaactctatgggaactgagacatccacctgctgcgtgacccacccgtgcgcaacttcagagctttcagggggtgatgcgggctgtggctccttcgtgaaaatgtcaccgtctgcagcgcctttcttgtgatatagaacttgacgggttcctgcgaatgaagttgcaaatattgatgaagataatactactgccttgctgtcaaacagtaacagtcacctttttttgtatctccaattataaatgcaatacatactgtaaaaagaaaagaaaacatcataaatatctttataaagta

SEQ ID NO: 460652 - DNA, 500 bp, Homo sapiens
ggaaactcactggcatttgtccttctctctgctccttcttaccctggcaggcatgagacttatcaagtgagatggagcagtggtagatcctgaccagtcctcacctggaatatttgttattataaaaacatagtcctctcattttttacaagtgtaacttctttgccttaaagttttgtctgggctttctcttacaggttcctgcgaatgaagttgcaaatattgatgaagataatactactgccttgctgtcaaacagtaacagtcacctttttttgtatctccaattataaatgcaatacatactgtaaaaagaaaagaaaacatcataaatatctttataaagtaaaagtcttggctggtctctgggagcagtgactcatgcctgtaatctcggcctcccaaattgctggaattacaggtgtgagccaccacaacttacccagcctttttactttgtgtaagaatagcatcagtgtattaaaaatacgacggaaatt

SEQ ID NO: 460653 - DNA, 348 bp, Homo sapiens
ggaaactcactggcatttgtccttctctctgctccttcttaccctggcaggcatgagacttatcaagtgagatggagcagtggtagatcctgaccagtcctcacctggaatatttgttattataaaaacatagtcctctcattttttacaagtgtaacttctttgccttaaagttttgtctgggctttctcttacaggttcctgcgaatgaagttgcaaatattgatgaagataatactactgccttgctgtcaaacagtaacagtcacctttttttgtatctccaattataaatgcaatacatactgtaaaaagaaaagaaaacatcataaatatctttataaagta

SEQ ID NO: 460654 - DNA, 887 bp, Homo sapiens
gaggcgcgtccctagctaggagtgctgggagttatggtgtcttaacggtttccagcccattggtcgccgacctgctaactacaaaaccagcatgcgctgtctgtcctcccccgtggtgcgcagccctggagggagggacagggcggtgtggactcgtcctttcctaagcgatgccacatgctgattctgtgccaccccctcgccaagggagtccgcagaaggacttgaggggcaggtctaggctgggcgatgaggacggtgtgaccctgcgaagtgcacctcccttgctcaaatcggaggggtctggtcctcatgaacagcccgctgaacatctcggtgtcctctcacatacacacccgcggggggtttccagagcatcgcacctcttccagcccagggagccgcctgctctgctaaactctatgggaactgagacatccacctgctgcgtgacccacccgtgcgcaacttcagagctttcagggggtgatgcgggctgtggctccttcgtgaaaatgtcaccgtctgcagcgcctttcttgtgatatagaacttgacgggttcctgcgaatgaagttgcaaatattgatgaagataatactactgccttgctgtcaaacagtaacagtcacctttttttgtatctccaattataaatgcaatacatactgtaaaaagaaaagaaaacatcataaatatctttataaagtaaaagtcttggctggtctctgggagcagtgactcatgcctgtaatctcagcactttgtgaggccgaggtgggtggatcatgaggactcttctagtggttagtaacacaatcaacttttatttattttggaaaggtttagtttttttatttctgaagtgatattactccagttgaagg

SEQ ID NO: 460655 - DNA, 1169 bp, Homo sapiens
gaggcgcgtccctagctaggagtgctgggagttatggtgtcttaacggtttccagcccattggtcgccgacctgctaactacaaaaccagcatgcgctgtctgtcctcccccgtggtgcgcagccctggagggagggacagggcggtgtggactcgtcctttcctaagcgatgccacatgctgattctgtgccaccccctcgccaagggagtccgcagaaggacttgaggggcaggtctaggctgggcgatgaggacggtgtgaccctgcgaagtgcacctcccttgctcaaatcggaggggtctggtcctcatgaacagcccgctgaacatctcggtgtcctctcacatacacacccgcggggggtttccagagcatcgcacctcttccagcccagggagccgcctgctctgctaaactctatgggaactgagacatccacctgctgcgtgacccacccgtgcgcaacttcagagctttcagggggtgatgcgggctgtggctccttcgtgaaaatgtcaccgtctgcagcgcctttcttgtgatatagaacttgacgggtgagagcgggtatttcttgggttactcaggatctgctaacagcagaggagaaaaccacaattcccaggcataagaatctacctaaagacgatggtttagatattttacagttgaaatcaccagcctcatctcaactgagtcctgactgacgagtgtctcaaaaaagcagttggtgacctcatccctcaggaacaggtggtgctccagctttgtggggatgactttcaaggtgcagagcacttgagccgcatttgaagtcattcatgttttacatctctgctttggatggaaagttgatcccccacagccgttggggatgtaccttaatatactggggcttatcagttaaatttttctgtctagacaatgaaaacccagaagttccacttgcaggtagcctcttaataatcgacgtccctaagttccttatgtcctcaggatagttccttttgttcccagatgttaccaactttgatgatgcatctaatctgtacaaacctgtgtatttctctatgtgaaaagaatactttgttcaaattacatgttcttataattttcacttgtgatcggtgagtatgggacactataaaaaaatcctgaaaaacctc

SEQ ID NO: 460656 - DNA, 1033 bp, Homo sapiens
  misc_feature (1028)..(1028): n is a, c, g, or t
  misc_feature (1033)..(1033): n is a, c, g, or t
atattgtaatatggtcttacaagatgtaatgatcaaaggaaactgggtgaatggtacactggacctctctgtcatatttttgcaacttcctatgagtctgctttttgggttcactgatatgtttgatccccgattaggagagaaggagtttcggaaagcacggaaagagaacatggaaatacaagtaaaaccagtagcagagctcctggcatttttactaaaagtacatcctaaattgtgtgccgttgtgcaggtacaattgccatttcaactggtacttgaacaatacctcctgctcgagcctttcagtcatgccacactgagactctcctctaacgtttattctcataattttagagctgaagagacctttggagatgctctaagccagcatcctccttttgtgactgaagagcacaggaccagacagaatcttcccaagaacatggtggagtgaacattaaaaaatatgtataagaggagtaaatatatttttagaagattataaagttataatttggaaactggagaaagaaaataagtccaatatttcttcctcacaggtactctgaaaattctgaagcctaggctggagtgcagtggcgcagtcttggctcactgcaacctctgcctctcaggctgaaacgatcctcccacctcagcctccacagtagccaggacttacaggcacacaccaccatgcctggctactttttatatttttatagagatgggatttctccatgtcggtcaggctggtctcgaactcctgacttcaggtgattcgcccgcctctgcctcccaaagcgctgggattacaggcaagattgatgtcttaatgtgaagggtcctttatgcaagctagaggttttgaggttccccctccccatcgagccttgcagttccattaaaggattttaagcaagggagtaataaaattcgttatatcattgaatgaataaaatagtcagactttttatttgtaggagaaaaattgtattagatgtagccaaatatggcttaagtantgcan

SEQ ID NO: 460657 - DNA, 614 bp, Homo sapiens
  misc_feature (609)..(609): n is a, c, g, or t
  misc_feature (614)..(614): n is a, c, g, or t
aaacatctcgcgggtacagattttaaaatgcaggtcaatttccaattatctagattaatttggaaataaattacatgaagtgtaaacacaaataattcttacactttaattcatgtactggcttttttttttttcccccctgagacagagtttcgctcttgttgcccaggctggagtgcagtggcgcagtcttggctcactgcaacctctgcctctcaggctgaaacgatcctcccacctcagcctccacagtagccaggacttacaggcacacaccaccatgcctggctactttttatatttttatagagatgggatttctccatgtcggtcaggctggtctcgaactcctgacttcaggtgattcgcccgcctctgcctcccaaagcgctgggattacaggcaagattgatgtcttaatgtgaagggtcctttatgcaagctagaggttttgaggttccccctccccatcgagccttgcagttccattaaaggattttaagcaagggagtaataaaattcgttatatcattgaatgaataaaatagtcagactttttatttgtaggagaaaaattgtattagatgtagccaaatatggcttaagtantgcan

SEQ ID NO: 460658 - DNA, 3512 bp, Homo sapiens
  misc_feature (1)..(1): n is a, c, g, or t
  misc_feature (4)..(6): n is a, c, g, or t
  misc_feature (8)..(8): n is a, c, g, or t
  misc_feature (11)..(11): n is a, c, g, or t
  misc_feature (13)..(13): n is a, c, g, or t
nagnnntnttntngcccaaccattatgccagtaggaccccacacgcactctagatgcctcagaactactgagaacaaagacagctgggtgttaagctgctacatcagaggactcatgtcaggtccctcttctgcaggtctgctggagtttgctggaggtccactccagatcctgtttgcttgggtatcaccagcggaggttgcagaacagcaaagattcctgcctgctccttcctctggaagcttcattttagaggagcacctgcctgatgccagccagagctctcctcccttgactggggctgctgcctttctctcagagatgccctgcccagtgaggaggaatctagagaggcagtctggccacagttgctttgcagcactgcagtcccactgggggaaaaaaaaaaaactcctgcagctagctcagtgtctccccaaacagccacctagttttgcacttgaaacccagggccctggtagcattggcacacaagggaatctcctggtctgcgtgttgcaaaaactatgggaaaagcataatttctgggctggatagcacagtccctatggcttccttgggtaggtgaggaagttccctggccctttggacttcctgggtgaggtgatgccccaccctgcttcagcttaccctccgtgggctgcacccacccgctgtctaaccagtcccagtgagatgaaccgggtacctcagttggaaatgcagaaatcactcaccttccgcattgctctcgctgggagctgcagaccagagctcttcctattcggccatcttgccagctgtctctatcgactacctcttattccaaaaaataaaaccataatgaagttagacaccattaaatatacataatataaaaataggttttcttattctaatctagatttgctacacaagaccatctacagaatgaatgccatgaatatacaatctgtacccaataagttgtacattttagtaaacattcctgattgtaagggtggcaaatggaaattttggcttcttagatctttactgtgagtttgactgacatcagtacatttttatttttaattgtatattttcattactgtgaatttttttgcagtgatttttgatgccatgtggctacattggttttagaatactaataaaatccattgcttttaaaataaataaataaaccccatagcacatcctccatacaacatctgttgtccctcaagatacaattgttaccactatcatctaaccattattttatgataactttaaaatatcaacttgcaagaaaatattccacaaaacacactctgcctttttactttaaagagtccttggctacctgggccaatattattctcatttgtaggatttaggttccacagattataatatgtgcctttttctgtgttccctgcagatttgcaagtaccatccctttttggggccttactttgcacctccagcatctgggaaacaatgttttcctgttgcagactctctttggtgcagtcaccctcctggccaattgtgttgcaccttgggcactgaatcacatgagccgtcgactaagccagatgcttctcatgttcctactggcaacctgccttctggccatcatatttgtgcctcaagaaatgcagaccctgcgtgtggttttggcaaccctgggtgtgggagctgcttctcttggcattacctgttctactgcccaagaaaatgaactaattccttccataatcaggtacaaaagtttatgtgtgctctgtcattctcaaaatggacctgtctcaaccaattgacacttaacaagggaaaaaaatccaagacaagttagttaaaaaacaatcaaatgtaatagtcataaaaacaacaaattacagcccaagtttatatcaagctgactttgttccagacgctgcattaagtcttttaatgcagtatcccatgtaccttctgaaccacctgaaaggttgatgttaaggaaaatagcattttgtaaatgataaaaatgtgtctaattcacttgtgaatctaaaataaattgctagcaaataagagaaaatttcaaaagcaagagtatgttatcacctccatgtgtttaagtgctcatccataatcacagcaaaatgataaatcacaaattatatgtatgatttttaacaacttttcctctgttgctgtttttactccaaggggaagagctactggaatcactggaaactttgctaatattgggggagccctggcttccctcatgatgatcctaagcatatattctcgacccctgccctggatcatctatggagtctttgccatcctctctggccttgttgtcctcctccttcctgaaaccaggaaccagcctcttcttgacagcatccaggatgtggaaaatgagggagtaaatagcctagctgcccctcagaggagctctgtgctataggtctgtgctgaggaaagcaaaacaccatttagggctaccatcccccaaaaaggcttagatctgggctattcccatgtagtcagtgcctttgcctttggtgtatcctcatcccttccacagtgacctcatacatcccctgagcctcactagatcacacagaccatctctgcccagcctgtccaggaggttaatttgtggtgaaaagaccaaaattaggtgacctctgcccttcctgccctggtatgacatgcatactcttgaaggtattctacaaacatgcagggatccaaacaccatcttctcatccctggggagccctcagcccagtgagtgtacctgttagctgtctgggattgccagtgcttacaggcctgactcccaggacactgaagaatttgtgagagactgtatagaaaataagagcccctcccacagatgagaagtccttttgtatcacatgtgagattcagtctatctaattttcacgggggaaaaaaagcgttggaaaaggggaaaagaagtgataagtaaaggaattttttaagtaatgaagaatgagaaaaggttctaaaacttttctgtgcttctcttgccttttccaaaatccctttggtcaatgccatggtgtccaagttctcaggtatgtctttatcagcagcttgaaaatggactaatacaatggtgcagtggaactgttgggtcaaatgttagctttacttttgatttttttgaggaacctccaaactgttctccatagcagttttactaaaggccccatacaattccaaaatccagcagggaagtccaatcttaaagctccaaagttatctcctttgactgcatgtctcacatttgggtcacaatgatgcacagcctccctcctggctgcttttgtgacctggcattgagtgtctgcagcttttccaggtgtgcagtgcaagctgtcaatgcctttacaattctggggtctggaggtcgaagaccctcttctcacagctccactaagcagtctccgatggagactctgtgtatggacttcaaccccacatcttcctttcacacc

SEQ ID NO: 460659 - DNA, 637 bp, Homo sapiens
  misc_feature (1)..(2): n is a, c, g, or t
  misc_feature (4)..(4): n is a, c, g, or t
  misc_feature (7)..(7): n is a, c, g, or t
  misc_feature (9)..(9): n is a, c, g, or t
  misc_feature (11)..(11): n is a, c, g, or t
  misc_feature (14)..(14): n is a, c, g, or t
  misc_feature (18)..(19): n is a, c, g, or t
nntnttntncnttnttgnnttgttaggactttcagtacaatgttaaaaaggagtggcccctattggactcatgtcctatttacatggaaatccaaggagggcctgaaagtctacgtcaacgggaccctgagcacctctgatccgagtggaaaagtgtctcgtgactatggagagtccaacgtcaacctcgtgatagggtctgagcaggaccaggccaagtgttatgagaacggtgctttcgatgagttcatcatctgggagcgggctctgactccggatgagatcgccatgtacttcactgctgccattggaaagcatgctttattgtcttcaacgctgccaagcctcttcatgacatccacagcaagccccgtgatgcccacagatgcctaccatcccatcataaccaacctgacagaagagagaaaaaccttccaaagtcccggagtgatactgagttacctccaaaatgtatccctcagcttacccagtaagtccctctcggagcagacagccttgaatctcaccaagatcgagtttaaaaaaagcaggaacttttactgaaacgtttgggtttcaggcttctcatgaacaaccagctggtgtggccctcctggccagctctgtacagctcagc

SEQ ID NO: 460660 - DNA, 539 bp, Homo sapiens
ttccataccaagtaatataggcagttgcaacatccatgaagagttgttaattggagcacaaggcatctgcagtgtcaaatctacagagacaagtgcacctggagacaaatgaccagactaccataaaacagaagcttaattatgttcacttacattttcaaattattcccaacaaattaccctgtttttccaggcagaagaagcagagtgaagagaggacattccaaataaaatgaatgctgatcctgcattgagtgcaagcaaaaaactgtcaagttttccctggatctttgggctttcatttctgaagtctcctgtgtcacgtaaaactttgttaaataaatttgttatgcttttctcttatgtttcctcatttgctgtatgccatttggacaatttccacagattagagcaaaacttcaatgtctgttccagaaggaagtatcatgttggattttactgtacaatgaagaaatgggtattgggggaacctgcccccaatatttcaacgtaggttttttctattttccataagtgtc

SEQ ID NO: 460661 - DNA, 1127 bp, Homo sapiens
gaagaaccagtagtgttgatgtcatagagcaggagaagataaatgtcccagctcagacagagactccattaccccacggactacaggcagcagcctcatcaggattctgtggaaggctcgtctctgggcaggacggcagtaccaggaaaggcctccctgaaaccagaacaggaagaagcaggcccttcagagggctcagggaagagtctttcagctagagggaattgcttggacaaaggccctgagaagggaatagcttgcatgtttgagagacagaaagaatctccgggtggcaagaagatggcaactatctaccaaatatttgtgcgtcccctttcaaacctttcactgagaggcagctgcctaggccaggactgcatttcccaacaacccttacagtcaagtgtggctgtgtaccttgttctcacttataggcagtgtatataattattttagctctagtaaagaatttctgcttccataatttatctatttactctgtggccctccgagacttcgtgtaacagcaactgcattttaatgcaatggcagctatggaaaacacaaaactatcagtcattgtcaaatactccataaatggagacagagaaggggttcagttctctgtgtaacaaggacagaggagaaaggcatctgcagtgtcaaatctacagagacaagtgcacctggagacaaatgaccagactaccataaaacagaagcttaattatgttcacttacattttcaaattattcccaacaaattaccctgtttttccaggcagaagaagcagagtgaagagaggacattccaaataaaatgaatgctgatcctgcattgagtgcaagcaaaaaactgtcaagttttccctggatctttgggctttcatttctgaagtctcctgtgtcacgtaaaactttgttaaataaatttgttatgcttttctcttatgtttcctcatttgctgtatgccatttggacaatttccacagattagagcaaaacttcaatgtctgttccagaaggaagtatcatgttggattttactgtacaatgaagaaatgggtattgggggaacctgcccccaatatttcaacgtaggttttttctattttccataagtgtc

SEQ ID NO: 460662 - DNA, 1046 bp, Homo sapiens
cactgaaatacatgaaccgtcgagcaagccagatgcttctcatgttcctactggcaatctgccttctggccatcatatttgtgccacaagaaatgcagacgctgcgtgaggttttggcaacactgggcttaggagcgtctgctcttgccaatacccttgcttttgcccatggaaatgaagtaattcccaccataatcagcaaaatgataaatcacaaattgcctgtgtggatttttaacagatattcttgtattgctgtttccactcaaagggcaagagctatggggatcaatgcaacctttgctaatatagcaggagccctggctcccctcatgatgatcctaagtgtgtattctccacccctgccctggatcatctatggagtcttccccttcatctctggctttgctttcctcctccttcctgaaaccaggaacaagcctctgtttgacaccatccaggatgagaaaaatgagtgagtaaatagcccggttgcccctcagaggatctgtgtgctataggtctgtgctgaggaaggcaaaataccatttagggccactgtcctctcaaaaggcttagacttaggattttcccatgtaatcagtgccttaggtctaggtacagccacatgccttcccacagtgacctcagacaccctctggaggctctcccagatcacacagaccagctctgcccagcttgtcaaaggaggcttccatagtgaagaagccaaaattaggtctcctcttccctccctgccctagtgtgatatgcacactgttgaaggtattttacaaatatgcagagatccaaacaccagattttcatccctgggaaaccctcaaacaagtgggtacctgtaagctgtctgagattgccagtgcttacaggcctgactactaggccactgaagaatttgtggaagagtatgcagatgcaggggtatccaatcttttggcttccctggtctacagtggaataagaattgtcttgggccacacataaaatacactaacactaataatatctgatgagctaaaaaaaaa

SEQ ID NO: 460663 - DNA, 1901 bp, Homo sapiens
cactgaaatacatgaaccgtcgagcaagccagatgcttctcatgttcctactggcaatctgccttctggccatcatatttgtgccacaagaaatgcagacgctgcgtgaggttttggcaacactgggcttaggagcgtctgctcttgccaatacccttgcttttgcccatggaaatgaagtaattcccaccataatcagcaaaatgataaatcacaaattgcctgtgtggatttttaacagatattcttgtattgctgtttccactcaaagggcaagagctatggggatcaatgcaacctttgctaatatagcaggagccctggctcccctcatgatgatcctaagtgtgtattctccacccctgccctggatcatctatggagtcttccccttcatctctggctttgctttcctcctccttcctgaaaccaggaacaagcctctgtttgacaccatccaggatgagaaaaatgagagaaaagaccccagagaaccaaagcaagaggatccgagagtggaagtgacgcagttttaaggaattccaggagctgactgccgatcaatgagccagatgaagggaacaatcaggactattcctagacactagcaaaatctagaaaataaataacaaggctgggtgcggtggctcacgcctgtaatcccagcaccttgggaggctgaggcgggcagatcatgaggtcagaagataaagaccaccctggccaacatggtgaaaccctgtctctactaaaacaaatacaaaacttcgctgggcacagtggcacaggcctttaattccagctacttgggaggctgaggcaggagaattacttgaacccaggaggtggaaattgcaatgagccaagattgggccactgcattccagcctggtgacagagcgagactgtctcaaaaaaaaaaaaaaaaaaaaaagaaagaaggaaagaaagaaagaaaagaaaagaaataacaagatatagtgagtcagtagattcacttcacaattgtggtactaaataactaaatataagctatctacatataatagtaagaaaaagtttgaagaaaattatataacactttaaaatcaatcataatagactatttatgtagttataggtccctagcaagtttctggataggaagattgagtactattaaacacaatgtgtcttcttcaattatttgatagagtaactggtgggataattacaatgaaaaatctgctacttttacaaaaactttaaaataaattcaaatttatctaggaattaatagtagacatttggttcagaaaaaagaagatcagggagtgaaaaatgtagctgtcaggtaagtggggtagcatgcacagaattttatcataagttgtaatattcataacattattagcagatgcatttacaaaacaaagaaattcaaaagtagactttagtatgtataacatttaatgtgtaacaatttcagtattgtacattcttagaggaaacacctaattatggaataaatagcattagccaactaatcagaaataaatgactaacaattcaactttatatcctgtattagtcagggttctctaaagcaagagaaataatagtatatatgtgtatataaaagtgagtttattaggagaattgactcacacggtcacaggatgaagttccacactaggccatttgcaagctgaggagccaggaagccagtccaagtcccaaaaccccaaaagtagggaagctgaccatatagccttcagtctgtggccaaaagcctgagagcccctgacaaatcactggtgtgagtccaagagttcaaaagctaaggaacctggaagtcggatgtttgagggcagaaagtatccagcatgggagaaagatgaaggctgaaagactcagcaagt

SEQ ID NO: 460664 - DNA, 707 bp, Homo sapiens
agctgattgctgagtcagcgggccatggaaaaactggcacccaaactgcaggaggtatcccaaaggtccaaaggtgcccttggacttagcaagctgaagaatcctggaccgctggtgagggtgacattccatgcccttgtacgaggtgcatttggtataagctatattgtcttgaaagtcctaggtccaaaggacagtaaaataaccagactttcccaaagttcaaacagagagcacttggtcccttgtgaggatgttcttctgaccaagccagaagggatcatgcagatcccaagaaattctcacagaactactatgggttgccaatggagattagtagcccctttaaatcacatcattcagcttaatattattaacttcccgatgaagccaacaacttttgtctgtcatggtcatctgcgtgtttacgaaggatttggaccaggaaaaaaattaataggagaatgttgatgagcactgagctttcttggttcctaagccaattcagcaccaagaagaccacagcttcttgtggggagactgcagtatctatgaaaatgatgtatacttctatctttcttgccctacagaacacctgttaccatgcactgcctcatgaggttgttttgagaattaaataagagaaggcatgttaatcaatactaagaaaccaagcttgcattttatttggattagaaatatctatt

SEQ ID NO: 460665 - DNA, 385 bp, Homo sapiens
ctctatccctctatctttaatctctcttccttaatctttctcgggctcaggtaaagaagcttcttaataaagtagtgctccgtgaatcttgcttttaccggaaattaacagacacctcaaaagatgaagagaaccatgaagagtctgagtcattgcaggaagatatgctaggaaacagattattacttccaacaccaacagtaaagcaggaatcaaaggatgtggaagaaaatgttggcctcattgtgtacaatggtgcaatggtagatgtaggaagcctcttgcaaaaattggaaaagagcgaaaaagtaagagctgaggtagaacagaagctgcagttactagaagaaaaaacaggtaagggtcagctttgaatatgttaata

SEQ ID NO: 460666 - DNA, 4790 bp, Homo sapiens
tctggaatctcagttgacagtgttcccttcttcactttggagccctgagcgaaagggccaggcgtattgagcggtcaggggagcgcgcacgcagaacgtcagccagtaagcgccgttcctccgggagatgtggaggaggggggcggcgtggaggaagagggggaagttggcgcatgcgcctaaagctgacgggtttgaaatggcttcgatgttagccgggacccgactcagatcgatgctatagaagacaaacaagggaaggttttttttccttttgcatcatggctcaatttggaggacagaagaatccgccatgggctactcagtttacagccactgcagtatcacagccagctgcactgggtgttcaacagccatcactccttggagcatctcctaccatttatacacagcaaactgcattggcagcagcaggccttaccacacaaactccagcaaactatcagttaacacaaactgctgcattgcagcaacaagccgcagctgcagcagctgcattacaacagcaatattcacaacctcagcaggccctgtatagtgtgcaacaacagttacagcaaccccagcaaaccctcttaacacagccagctgttgcactgcctacaagccttagcctgtctactcctcagccaacagcacaaataactgtatcatatccaacaccaaggtccagtcaacagcaaacccagcctcagaagcagcgtgttttcacaggggtggttacaaaactacatgatacatttggatttgtggatgaagatgtattctttcagcttagtgctgtcaaagggaaaaccccccaagtaggtgacagagtattggttgaagctacttataatcctaatatgccttttaaatggaatgcacagagaattcaaacactaccaaatcagaatcagtcgcaaacccagccattactgaagactcctcctgctgtacttcagccaattgcaccacagacaacatttggtgttcagactcagccccagccccagtcactgctgcaggcacagatttcagcagcttctattacaccactattgcagactcaaccacagcccttattacagcagcctcagcaaaaagctggtttattgcagcctcctgttcgtatagtttcacagccacaaccggcacgacgattagatcccccatcccgattttcaggaagaaatgacagaggggatcaagtgcctaacagaaaagatgatcgaagtcgtgagagagagagagaaagacgtagatcgagagaaagatcacctcagaggaaacgttcccgggaaagatctccacgaagagagcgagagcgatcacctcggagagttcgacgtgttgttccacgttacacagttcagttttcaaagttttctttagattgtcccagttgtgacatgatggaactaaggcgccgttatcaaaatttgtatatacctagtgacttttttgatgctcaatttacatgggtggatgctttccctttgtcaagaccatttcagctgggaaattactgcaatttttatgtaatgcacagagaagtagagtccttagaaaaaaatatggccattcttgatccaccagatgctgaccacttatacagtgcaaaggtaatgctgatggctagccctagtatggaagatttatatcataagtcatgtgctcttgctgaggacccacaagaacttcgagatggattccaacatcctgctagacttgttaagtttttagtgggcatgaaaggcaaggatgaagctatggccattggaggccactggtctccttcgttggatggaccagacccagaaaaagatccctctgtgttgattaagactgctattcgttgttgtaaggctctgacaggcattgatctaagtgtgtgcacacaatggtaccgttttgcagagattcgctaccatcgccctgaggagacccacaaggggcgtacagttccagctcatgtggagacagtggttttatttttcccggatgtttggcattgccttcccacccgctcagagtgggaaaccctctcccgaggatacaagcagcagctggtcgagaagcttcagggtgaacgcaaggaggctgatggagaacaggatgaagaagagaaggatgatggtgaagctaaagaaatttctacacctacccattggtctaaacttgatccaaagacaatgaaggtaaatgacctccgaaaagaattagaaagtcgagctcttagttccaaaggattaaaatcccagttaatagcccgattgacaaaacagcttaaagtagaggaacaaaaagaagaacagaaggagttagagaaatctgaaaaagaagaggatgaggatgatgataggaaatctgaagacgataaagaggaagaagaaaggaaacgtcaagaggaaatagaacgccagcgtcgagaaagaagatatattttgcctgatgaaccggccatcattgtacatccaaattgggctgcaaaaagtggcaagtttgattgtagcatcatgtctttgagtgtcctattggactacagattagaggataataaagaacattcatttgaggtttcattgtttgcggaacttttcaacgaaatgcttcaaagagattttggtgtccgtatatacaaatcattactgtctcttcctgagaaagaggacaaaaaagaaaaggataaaaaaagcaaaaaagatgagagaaaagataaaaaagaagaaagagatgatgaaactgatgaaccaaaacccaaacggagaaaatcaggcgatgataaagataaaaaagaagatagagatgaaaggaagaaagaagataaaagaaaagatgattctaaagatgatgatgaaactgaagaagataacaatcaagatgaatatgaccctatggaagcagaagaagctgaggatgaagaagatgatagggatgaggaagaaatgaccaaacgagatgacaaaagagatatcaacagatactgcaaggagaggccctctaaagataaggaaaaagaaaagactcaaatgatcacaattaacagagatctgttaatggcttttgtttattttgatcaaagtcattgtggttaccttcttgaaaaggatttggaagaaatactttatactcttggactacatctttctcgggctcaggtaaagaagcttcttaataaagtagtgctccgtgaatcttgcttttaccggaaattaacagacacctcaaaagatgaagagaaccatgaagagtctgagtcattgcaggaagatatgctaggaaacagattattacttccaacaccaacagtaaagcaggaatcaaaggatgtggaagaaaatgttggcctcattgtgtacaatggtgcaatggtagatgtaggaagcctcttgcaaaaattggaaaagagcgaaaaagtaagagctgaggtagaacagaagctgcagttactagaagaaaaaacagatgaagatgaaaaaaccatattaaatttggagaattccaacaaaagcctctctggtgaactcagagaagttaaaaaggaccttagtcagttacaagaaaacttaaagatttcggaaaacatgaatttacaatttgaaaaccaaatgaataagacaatcagaaacttatctacggtaatggatgaaatccacactgttctcaagaaggataatgtaaagaatgaagacaaagatcaaaaatccaaggagaatggtgccagtgtatgataaaatccatgtagtgatgaggaatggtgttaaataatgtaatatataaaaatcatgatataagaatgtttgaaggtgatgcatgtttgattttagtagtataaatgtattttagttcaaatgatgtataaagttttatgaatgtgagtttctgcttttgaaaattgcttgtaattcctagccttcaaattattaaacactccttgagtgaaataattttgcattgcaaagtgttttaggatgaactttgttatagttttaactccaataaagttcatcagtttaattgactgtagtatttaattaccaaatttcttttattaaaatgcctagaaatttttaatttatagaattattaggttttaaaatttttagttcatctgttaaaatttcagtcaaaatcataaaatagcatgatgcttaatttttgcaagttttttgaaactttttgttttttttactcatcaccaaaaaatcccctcttgatcagtctctaaaagcattcattaaaaattcagttcaggccgggcacggtggctcacacctgtaatcccaacactttgggaggccgaggcaggtggatcacctgaggttaggagttcgagaccagcctggccaacatggtgaaacccggtctctactaaaaatataaaaattagctgggcatggtggtgggtgcctgtaatcccagctaacttgggaggctgaggcaggagaatcgcttgaacccaggaggcggaggttgcagtcactcaggatcatgcagctacactccagcctgggcgacaagagtgaaactccatctcaaaaagaaaaaaaaaaaaaatcagtttatttgaaagacagtatatcagaaagaaagaagcaatagagaactagtattgttctttatgggttagatctactttcccagaatagcatctatattccttttaattttgagggtttaaaaaaaaatgcagtgtatgtcaaatttacagtttagtaccaagccagtagatgtcagtatgatgccttaaattaagtcttctttaattaaagatatttttttaaatt

SEQ ID NO: 460667 - DNA, 2720 bp, Homo sapiens
tctggaatctcagttgacagtgttcccttcttcactttggagccctgagcgaaagggccaggcgtattgagcggtcaggggagcgcgcacgcagaacgtcagccagtaagcgccgttcctccgggagatgtggaggaggggggcggcgtggaggaagagggggaagttggcgcatgcgcctaaagctgacgggtttgaaatggcttcgatgttagccgggacccgactcagatcgatgctatagaagacaaacaagggaaggttttttttccttttgcatcatggctcaatttggaggacagaagaatccgccatgggctactcagtttacagccactgcagtatcacagccagctgcactgggtgttcaacagccatcactccttggagcatctcctaccatttatacacagcaaactgcattggcagcagcaggccttaccacacaaactccagcaaactatcagttaacacaaactgctgcattgcagcaacaagccgcagctgcagcagctgcattacaacagcaatattcacaacctcagcaggccctgtatagtgtgcaacaacagttacagcaaccccagcaaaccctcttaacacagccagctgttgcactgcctacaagccttagcctgtctactcctcagccaacagcacaaataactgtatcatatccaacaccaaggtccagtcaacagcaaacccagcctcagaagcagcgtgttttcacaggggtggttacaaaactacatgatacatttggatttgtggatgaagatgtattctttcagcttagtgctgtcaaagggaaaaccccccaagtaggtgacagagtattggttgaagctacttataatcctaatatgccttttaaatggaatgcacagagaattcaaacactaccaaatcagaatcagtcgcaaacccagccattactgaagactcctcctgctgtacttcagccaattgcaccacagacaacatttggtgttcagactcagccccagccccagtcactgctgcaggcacagatttcagcagcttctattacaccactattgcagactcaaccacagcccttattacagcagcctcagcaaaaagctggtttattgcagcctcctgttcgtatagtttcacagccacaaccggcacgacgattagatcccccatcccgattttcaggaagaaatgacagaggggatcaagtgcctaacagaaaagatgatcgaagtcgtgagagagagagagaaagacgtagatcgagagaaagatcacctcagaggaaacgttcccgggaaagatctccacgaagagagcgagagcgatcacctcggagagttcgacgtgttgttccacgttacacagttcagttttcaaagttttctttagattgtcccagttgtgacatgatggaactaaggcgccgttatcaaaatttgtatatacctagtgacttttttgatgctcaatttacatgggtggatgctttccctttgtcaagaccatttcagctgggaaattactgcaatttttatgtaatgcacagagaagtagagtccttagaaaaaaatatggccattcttgatccaccagatgctgaccacttatacagtgcaaaggtaatgctgatggctagccctagtatggaagatttatatcataagtcatgtgctcttgctgaggacccacaagaacttcgagatggattccaacatcctgctagacttgttaagtttttagtgggcatgaaaggcaaggatgaagctatggccattggaggccactggtctccttcgttggatggaccagacccagaaaaagatccctctgtgttgattaagactgctattcgttgttgtaaggctctgacaggcattgatctaagtgtgtgcacacaatggtaccgttttgcagagattcgctaccatcgccctgaggagacccacaaggggcgtacagttccagctcatgtggagacagtggttttatttttcccggatgtttggcattgccttcccacccgctcagagtgggaaaccctctcccgaggatacaagcagcagctggtcgagaagcttcagggtgaacgcaaggaggctgatggagaacaggatgaagaagagaaggatgatggtgaagctaaagaaatttctacacctacccattggtctaaacttgatccaaagacaatgaaggtaaatgacctccgaaaagaattagaaagtcgagctcttagttccaaaggattaaaatcccagttaatagcccgattgacaaaacagcttaaagtagaggaacaaaaagaagaacagaaggagttagagaaatctgaaaaagaagaggatgaggatgatgataggaaatctgaagacgataaagaggaagaagaaaggaaacgtcaagaggaaatagaacgccagcgtcgagaaagaagatatattttgcctgatgaaccggccatcattgtacatccaaattgggctgcaaaaagtggcaagtttgattgtagcatcatgtctttgagtgtcctattggactacagattagaggataataaagaacattcatttgaggtttcattgtttgcggaacttttcaacgaaatgcttcaaagagattttggtgtccgtatatacaaatcattactgtctcttcctgagaaagaggacaaaaaagaaaaggataaaaaaagcaaaaaagatgagagaaaagat

SEQ ID NO: 460668 - DNA, 3219 bp, Homo sapiens
tctggaatctcagttgacagtgttcccttcttcactttggagccctgagcgaaagggccaggcgtattgagcggtcaggggagcgcgcacgcagaacgtcagccagtaagcgccgttcctccgggagatgtggaggaggggggcggcgtggaggaagagggggaagttggcgcatgcgcctaaagctgacgggtttgaaatggcttcgatgttagccgggacccgactcagatcgatgctatagaagacaaacaagggaaggttttttttccttttgcatcatggctcaatttggaggacagaagaatccgccatgggctactcagtttacagccactgcagtatcacagccagctgcactgggtgttcaacagccatcactccttggagcatctcctaccatttatacacagcaaactgcattggcagcagcaggccttaccacacaaactccagcaaactatcagttaacacaaactgctgcattgcagcaacaagccgcagctgcagcagctgcattacaacagcaatattcacaacctcagcaggccctgtatagtgtgcaacaacagttacagcaaccccagcaaaccctcttaacacagccagctgttgcactgcctacaagccttagcctgtctactcctcagccaacagcacaaataactgtatcatatccaacaccaaggtccagtcaacagcaaacccagcctcagaagcagcgtgttttcacaggggtggttacaaaactacatgatacatttggatttgtggatgaagatgtattctttcagcttagtgctgtcaaagggaaaaccccccaagtaggtgacagagtattggttgaagctacttataatcctaatatgccttttaaatggaatgcacagagaattcaaacactaccaaatcagaatcagtcgcaaacccagccattactgaagactcctcctgctgtacttcagccaattgcaccacagacaacatttggtgttcagactcagccccagccccagtcactgctgcaggcacagatttcagcagcttctattacaccactattgcagactcaaccacagcccttattacagcagcctcagcaaaaagctggtttattgcagcctcctgttcgtatagtttcacagccacaaccggcacgacgattagatcccccatcccgattttcaggaagaaatgacagaggggatcaagtgcctaacagaaaagatgatcgaagtcgtgagagagagagagaaagacgtagatcgagagaaagatcacctcagaggaaacgttcccgggaaagatctccacgaagagagcgagagcgatcacctcggagagttcgacgtgttgttccacgttacacagttcagttttcaaagttttctttagattgtcccagttgtgacatgatggaactaaggcgccgttatcaaaatttgtatatacctagtgacttttttgatgctcaatttacatgggtggatgctttccctttgtcaagaccatttcagctgggaaattactgcaatttttatgtaatgcacagagaagtagagtccttagaaaaaaatatggccattcttgatccaccagatgctgaccacttatacagtgcaaaggtaatgctgatggctagccctagtatggaagatttatatcataagtcatgtgctcttgctgaggacccacaagaacttcgagatggattccaacatcctgctagacttgttaagtttttagtgggcatgaaaggcaaggatgaagctatggccattggaggccactggtctccttcgttggatggaccagacccagaaaaagatccctctgtgttgattaagactgctattcgttgttgtaaggctctgacaggcattgatctaagtgtgtgcacacaatggtaccgttttgcagagattcgctaccatcgccctgaggagacccacaaggggcgtacagttccagctcatgtggagacagtggttttatttttcccggatgtttggcattgccttcccacccgctcagagtgggaaaccctctcccgaggatacaagcagcagctggtcgagaagcttcagggtgaacgcaaggaggctgatggagaacaggatgaagaagagaaggatgatggtgaagctaaagaaatttctacacctacccattggtctaaacttgatccaaagacaatgaaggtaaatgacctccgaaaagaattagaaagtcgagctcttagttccaaaggattaaaatcccagttaatagcccgattgacaaaacagcttaaagtagaggaacaaaaagaagaacagaaggagttagagaaatctgaaaaagaagaggatgaggatgatgataggaaatctgaagacgataaagaggaagaagaaaggaaacgtcaagaggaaatagaacgccagcgtcgagaaagaagatatattttgcctgatgaaccggccatcattgtacatccaaattgggctgcaaaaagtggcaagtttgattgtagcatcatgtctttgagtgtcctattggactacagattagaggataataaagaacattcatttgaggtttcattgtttgcggaacttttcaacgaaatgcttcaaagagattttggtgtccgtatatacaaatcattactgtctcttcctgagaaagaggacaaaaaagaaaaggataaaaaaagcaaaaaagatgagagaaaagataaaaaagaagaaagagatgatgaaactgatgaaccaaaacccaaacggagaaaatcaggcgatgataaagataaaaaagaagatagagatgaaaggaagaaagaagataaaagaaaagatgattctaaagatgatgatgaaactgaagaagataacaatcaagatgaatatgaccctatggaagcagaagaagctgaggatgaagaagatgatagggatgaggaagaaatgaccaaacgagatgacaaaagagatatcaacagatactgcaaggagaggccctctaaagataaggaaaaagaaaagactcaaatgatcacaattaacagagatctgttaatggcttttgtttattttgatcaaagtcattgtggttaccttcttgaaaaggaagtagtaagagaaagacaagaaaacctaagacttgtgagactgatgccagataaagaggcaatgattggaaactccaagaagaattgtctcttaatagagactagat

SEQ ID NO: 460669 - DNA, 3423 bp, Homo sapiens
tctggaatctcagttgacagtgttcccttcttcactttggagccctgagcgaaagggccaggcgtattgagcggtcaggggagcgcgcacgcagaacgtcagccagtaagcgccgttcctccgggagatgtggaggaggggggcggcgtggaggaagagggggaagttggcgcatgcgcctaaagctgacgggtttgaaatggcttcgatgttagccgggacccgactcagatcgatgctatagaagacaaacaagggaaggttttttttccttttgcatcatggctcaatttggaggacagaagaatccgccatgggctactcagtttacagccactgcagtatcacagccagctgcactgggtgttcaacagccatcactccttggagcatctcctaccatttatacacagcaaactgcattggcagcagcaggccttaccacacaaactccagcaaactatcagttaacacaaactgctgcattgcagcaacaagccgcagctgcagcagctgcattacaacagcaatattcacaacctcagcaggccctgtatagtgtgcaacaacagttacagcaaccccagcaaaccctcttaacacagccagctgttgcactgcctacaagccttagcctgtctactcctcagccaacagcacaaataactgtatcatatccaacaccaaggtccagtcaacagcaaacccagcctcagaagcagcgtgttttcacaggggtggttacaaaactacatgatacatttggatttgtggatgaagatgtattctttcagcttagtgctgtcaaagggaaaaccccccaagtaggtgacagagtattggttgaagctacttataatcctaatatgccttttaaatggaatgcacagagaattcaaacactaccaaatcagaatcagtcgcaaacccagccattactgaagactcctcctgctgtacttcagccaattgcaccacagacaacatttggtgttcagactcagccccagccccagtcactgctgcaggcacagatttcagcagcttctattacaccactattgcagactcaaccacagcccttattacagcagcctcagcaaaaagctggtttattgcagcctcctgttcgtatagtttcacagccacaaccggcacgacgattagatcccccatcccgattttcaggaagaaatgacagaggggatcaagtgcctaacagaaaagatgatcgaagtcgtgagagagagagagaaagacgtagatcgagagaaagatcacctcagaggaaacgttcccgggaaagatctccacgaagagagcgagagcgatcacctcggagagttcgacgtgttgttccacgttacacagttcagttttcaaagttttctttagattgtcccagttgtgacatgatggaactaaggcgccgttatcaaaatttgtatatacctagtgacttttttgatgctcaatttacatgggtggatgctttccctttgtcaagaccatttcagctgggaaattactgcaatttttatgtaatgcacagagaagtagagtccttagaaaaaaatatggccattcttgatccaccagatgctgaccacttatacagtgcaaaggtaatgctgatggctagccctagtatggaagatttatatcataagtcatgtgctcttgctgaggacccacaagaacttcgagatggattccaacatcctgctagacttgttaagtttttagtgggcatgaaaggcaaggatgaagctatggccattggaggccactggtctccttcgttggatggaccagacccagaaaaagatccctctgtgttgattaagactgctattcgttgttgtaaggctctgacaggcattgatctaagtgtgtgcacacaatggtaccgttttgcagagattcgctaccatcgccctgaggagacccacaaggggcgtacagttccagctcatgtggagacagtggttttatttttcccggatgtttggcattgccttcccacccgctcagagtgggaaaccctctcccgaggatacaagcagcagctggtcgagaagcttcagggtgaacgcaaggaggctgatggagaacaggatgaagaagagaaggatgatggtgaagctaaagaaatttctacacctacccattggtctaaacttgatccaaagacaatgaaggtaaatgacctccgaaaagaattagaaagtcgagctcttagttccaaaggattaaaatcccagttaatagcccgattgacaaaacagcttaaagtagaggaacaaaaagaagaacagaaggagttagagaaatctgaaaaagaagaggatgaggatgatgataggaaatctgaagacgataaagaggaagaagaaaggaaacgtcaagaggaaatagaacgccagcgtcgagaaagaagatatattttgcctgatgaaccggccatcattgtacatccaaattgggctgcaaaaagtggcaagtttgattgtagcatcatgtctttgagtgtcctattggactacagattagaggataataaagaacattcatttgaggtttcattgtttgcggaacttttcaacgaaatgcttcaaagagattttggtgtccgtatatacaaatcattactgtctcttcctgagaaagaggacaaaaaagaaaaggataaaaaaagcaaaaaagatgagagaaaagataaaaaagaagaaagagatgatgaaactgatgaaccaaaacccaaacggagaaaatcaggcgatgataaagataaaaaagaagatagagatgaaaggaagaaagaagataaaagaaaagatgattctaaagatgatgatgaaactgaagaagaaaggaaacgtcaagaggaaatagaagccaggtcgagaaagaagatatatttgcctgatgaaccggcatcatgtgtacatccaaatggggctgcaaaaagtggcaagtttgatggtagcatcatgtctttgagtgtcctatgggactacagattagaggataataaagaacattcattgaggtttcattgtttgggaactttcaagaaatgttcaaagagatttggggtgtccgtatatacaaatcattactgtctctttcctgagaaaagaggacaacaaagaaaggataaaaaagcaaaaggatgagagaaaagataaaaagagaaagagatgatggtgaggtaaagaaatttaacctaccatggctaatgacgaagatatgacgtaagtggacaaaagagaccgagggttggaacttgaaagagaggtgggtgtgtatgaatggaagtaaggagaaagaactaggaaaaccggttaaaattttgtgtgaggcgtttaatgggaaggagtgtggttttggttacaaaaaacagttgggcaacaagggatg

SEQ ID NO: 460670 - DNA, 5654 bp, Homo sapiens
tctggaatctcagttgacagtgttcccttcttcactttggagccctgagcgaaagggccaggcgtattgagcggtcaggggagcgcgcacgcagaacgtcagccagtaagcgccgttcctccgggagatgtggaggaggggggcggcgtggaggaagagggggaagttggcgcatgcgcctaaagctgacgggtttgaaatggcttcgatgttagccgggacccgactcagatcgatgctatagaagacaaacaagggaaggttttttttccttttgcatcatggctcaatttggaggacagaagaatccgccatgggctactcagtttacagccactgcagtatcacagccagctgcactgggtgttcaacagccatcactccttggagcatctcctaccatttatacacagcaaactgcattggcagcagcaggccttaccacacaaactccagcaaactatcagttaacacaaactgctgcattgcagcaacaagccgcagctgcagcagctgcattacaacagcaatattcacaacctcagcaggccctgtatagtgtgcaacaacagttacagcaaccccagcaaaccctcttaacacagccagctgttgcactgcctacaagccttagcctgtctactcctcagccaacagcacaaataactgtatcatatccaacaccaaggtccagtcaacagcaaacccagcctcagaagcagcgtgttttcacaggggtggttacaaaactacatgatacatttggatttgtggatgaagatgtattctttcagcttagtgctgtcaaagggaaaaccccccaagtaggtgacagagtattggttgaagctacttataatcctaatatgccttttaaatggaatgcacagagaattcaaacactaccaaatcagaatcagtcgcaaacccagccattactgaagactcctcctgctgtacttcagccaattgcaccacagacaacatttggtgttcagactcagccccagccccagtcactgctgcaggcacagatttcagcagcttctattacaccactattgcagactcaaccacagcccttattacagcagcctcagcaaaaagctggtttattgcagcctcctgttcgtatagtttcacagccacaaccggcacgacgattagatcccccatcccgattttcaggaagaaatgacagaggggatcaagtgcctaacagaaaagatgatcgaagtcgtgagagagagagagaaagacgtagatcgagagaaagatcacctcagaggaaacgttcccgggaaagatctccacgaagagagcgagagcgatcacctcggagagttcgacgtgttgttccacgttacacagttcagttttcaaagttttctttagattgtcccagttgtgacatgatggaactaaggcgccgttatcaaaatttgtatatacctagtgacttttttgatgctcaatttacatgggtggatgctttccctttgtcaagaccatttcagctgggaaattactgcaatttttatgtaatgcacagagaagtagagtccttagaaaaaaatatggccattcttgatccaccagatgctgaccacttatacagtgcaaaggtaatgctgatggctagccctagtatggaagatttatatcataagtcatgtgctcttgctgaggacccacaagaacttcgagatggattccaacatcctgctagacttgttaagtttttagtgggcatgaaaggcaaggatgaagctatggccattggaggccactggtctccttcgttggatggaccagacccagaaaaagatccctctgtgttgattaagactgctattcgttgttgtaaggctctgacaggcattgatctaagtgtgtgcacacaatggtaccgttttgcagagattcgctaccatcgccctgaggagacccacaaggggcgtacagttccagctcatgtggagacagtggttttatttttcccggatgtttggcattgccttcccacccgctcagagtgggaaaccctctcccgaggatacaagcagcagctggtcgagaagcttcagggtgaacgcaaggaggctgatggagaacaggcactgaacgctaatccctttttctatttccgcttctcacaggcacaggaacacaggcacaaatgcacaccacacactacataataaacacacatggaggaacataactggtaacagcgactggtaatccagctttcagcagtatagttgtatgttcttttctcttaaaatttctgtcttattatcctaactttaagagtgctgagacctcaaaggaaaataagttgtgcttaaattgcacagaattttgtttttatcataggtctagttgctggaatctgggaccagttgttgaacaagattcagtattaagccattttaaacattttgccattttctaaaatttaaaaaattttctttttcatggtcatcagttctagtcatggatatttgaaattggacaaccacaagtctgagagatttgaaatttcaggctatgtggcaacgtctttggtacatttcaaaggtctgactaaatcagtctttgggtggcttgaaaattgaggcaagatcacacactgtgtggtttgtggagaccggcagtgtttgtgcatccctgatatcctttgtgttgtaatttatcacccttttgtgtttcacagatctggctttgattggctgatgagtgtctttgtgatcagttaaaagtggtagaatgtatgtacgtggacttgcctaaataataactttaggagaagacaatctgaaacatttgtgaccttgcacagatcagcaacagacttttaaaaataaattatttttattttaaggtttcataatagtaattacattcttaactttgtatgtcaggatgaagaagagaaggatgatggtgaagctaaagaaatttctacacctacccattggtctaaacttgatccaaagacaatgaaggtaaatgacctccgaaaagaattagaaagtcgagctcttagttccaaaggattaaaatcccagttaatagcccgattgacaaaacagcttaaagtagaggaacaaaaagaagaacagaaggagttagagaaatctgaaaaagaagaggatgaggatgatgataggaaatctgaagacgataaagaggaagaagaaaggaaacgtcaagaggaaatagaacgccagcgtcgagaaagaagatatattttgcctgatgaaccggccatcattgtacatccaaattgggctgcaaaaagtggcaagtttgattgtagcatcatgtctttgagtgtcctattggactacagattagaggataataaagaacattcatttgaggtttcattgtttgcggaacttttcaacgaaatgcttcaaagagattttggtgtccgtatatacaaatcattactgtctcttcctgagaaagaggacaaaaaagaaaaggataaaaaaagcaaaaaagatgagagaaaagataaaaaagaagaaagagatgatgaaactgatgaaccaaaacccaaacggagaaaatcaggcgatgataaagataaaaaagaagatagagatgaaaggaagaaagaagataaaagaaaagatgattctaaagatgatgatgaaactgaagaagataacaatcaagatgaatatgaccctatggaagcagaagaagctgaggatgaagaagatgatagggatgaggaagaaatgaccaaacgagatgacaaaagagatatcaacagatactgcaaggagaggccctctaaagataaggaaaaagaaaagactcaaatgatcacaattaacagagatctgttaatggcttttgtttattttgatcaaagtcattgtggttaccttcttgaaaaggatttggaagaaatactttatactcttggactacatctttctcgggctcaggtaaagaagcttcttaataaagtagtgctccgtgaatcttgcttttaccggaaattaacagacacctcaaaagatgaagagaaccatgaagagtctgagtcattgcaggaagatatgctaggaaacagattattacttccaacaccaacagtaaagcaggaatcaaaggatgtggaagaaaatgttggcctcattgtgtacaatggtgcaatggtagatgtaggaagcctcttgcaaaaattggaaaagagcgaaaaagtaagagctgaggtagaacagaagctgcagttactagaagaaaaaacagatgaagatgaaaaaaccatattaaatttggagaattccaacaaaagcctctctggtgaactcagagaagttaaaaaggaccttagtcagttacaagaaaacttaaagatttcggaaaacatgaatttacaatttgaaaaccaaatgaataagacaatcagaaacttatctacggtaatggatgaaatccacactgttctcaagaaggataatgtaaagaatgaagacaaagatcaaaaatccaaggagaatggtgccagtgtatgataaaatccatgtagtgatgaggaatggtgttaaataatgtaatatataaaaatcatgatataagaatgtttgaaggtgatgcatgtttgattttagtagtataaatgtattttagttcaaatgatgtataaagttttatgaatgtgagtttctgcttttgaaaattgcttgtaattcctagccttcaaattattaaacactccttgagtgaaataattttgcattgcaaagtgttttaggatgaactttgttatagttttaactccaataaagttcatcagtttaattgactgtagtatttaattaccaaatttcttttattaaaatgcctagaaatttttaatttatagaattattaggttttaaaatttttagttcatctgttaaaatttcagtcaaaatcataaaatagcatgatgcttaatttttgcaagttttttgaaactttttgttttttttactcatcaccaaaaaatcccctcttgatcagtctctaaaagcattcattaaaaattcagttcaggccgggcacggtggctcacacctgtaatcccaacactttgggaggccgaggcaggtggatcacctgaggttaggagttcgagaccagcctggccaacatggtgaaacccggtctctactaaaaatataaaaattagctgggcatggtggtgggtgcctgtaatcccagctaacttgggaggctgaggcaggagaatcgcttgaacccaggaggcggaggttgcagtcactcaggatcatgcagctacactccagcctgggcgacaagagtgaaactccatctcaaaaagaaaaaaaaaaaaaatcagtttatttgaaagacagtatatcagaaagaaagaagcaatagagaactagtattgttctttatgggttagactttacataatattagttgtcctgatgtcaatgttactgctttcaattaatttttctactttcccagaatagcatctatattccttttaattttgagggtttaaaaaaaaatgcagtgtatgtcaaatttacagtttagtaccaagccagtagatgtcagtatgatgccttaaattaagtcttctttaattaaagatatttttttaaatt

SEQ ID NO: 460671 - DNA, 4879 bp, Homo sapiens
tctggaatctcagttgacagtgttcccttcttcactttggagccctgagcgaaagggccaggcgtattgagcggtcaggggagcgcgcacgcagaacgtcagccagtaagcgccgttcctccgggagatgtggaggaggggggcggcgtggaggaagagggggaagttggcgcatgcgcctaaagctgacgggtttgaaatggcttcgatgttagccgggacccgactcagatcgatgctatagaagacaaacaagggaaggttttttttccttttgcatcatggctcaatttggaggacagaagaatccgccatgggctactcagtttacagccactgcagtatcacagccagctgcactgggtgttcaacagccatcactccttggagcatctcctaccatttatacacagcaaactgcattggcagcagcaggccttaccacacaaactccagcaaactatcagttaacacaaactgctgcattgcagcaacaagccgcagctgcagcagctgcattacaacagcaatattcacaacctcagcaggccctgtatagtgtgcaacaacagttacagcaaccccagcaaaccctcttaacacagccagctgttgcactgcctacaagccttagcctgtctactcctcagccaacagcacaaataactgtatcatatccaacaccaaggtccagtcaacagcaaacccagcctcagaagcagcgtgttttcacaggggtggttacaaaactacatgatacatttggatttgtggatgaagatgtattctttcagcttagtgctgtcaaagggaaaaccccccaagtaggtgacagagtattggttgaagctacttataatcctaatatgccttttaaatggaatgcacagagaattcaaacactaccaaatcagaatcagtcgcaaacccagccattactgaagactcctcctgctgtacttcagccaattgcaccacagacaacatttggtgttcagactcagccccagccccagtcactgctgcaggcacagatttcagcagcttctattacaccactattgcagactcaaccacagcccttattacagcagcctcagcaaaaagctggtttattgcagcctcctgttcgtatagtttcacagccacaaccggcacgacgattagatcccccatcccgattttcaggaagaaatgacagaggggatcaagtgcctaacagaaaagatgatcgaagtcgtgagagagagagagaaagacgtagatcgagagaaagatcacctcagaggaaacgttcccgggaaagatctccacgaagagagcgagagcgatcacctcggagagttcgacgtgttgttccacgttacacagttcagttttcaaagttttctttagattgtcccagttgtgacatgatggaactaaggcgccgttatcaaaatttgtatatacctagtgacttttttgatgctcaatttacatgggtggatgctttccctttgtcaagaccatttcagctgggaaattactgcaatttttatgtaatgcacagagaagtagagtccttagaaaaaaatatggccattcttgatccaccagatgctgaccacttatacagtgcaaagacttttgacaggattgaattatttgactataataggtaatgctgatggctagccctagtatggaagatttatatcataagtcatgtgctcttgctgaggacccacaagaacttcgagatggattccaacatcctgctagacttgttaagtttttagtgggcatgaaaggcaaggatgaagctatggccattggaggccactggtctccttcgttggatggaccagacccagaaaaagatccctctgtgttgattaagactgctattcgttgttgtaaggctctgacaggcattgatctaagtgtgtgcacacaatggtaccgttttgcagagattcgctaccatcgccctgaggagacccacaaggggcgtacagttccagctcatgtggagacagtggttttatttttcccggatgtttggcattgccttcccacccgctcagagtgggaaaccctctcccgaggatacaagcagcagctggtcgagaagcttcagggtgaacgcaaggaggctgatggagaacaggatgaagaagagaaggatgatggtgaagctaaagaaatttctacacctacccattggtctaaacttgatccaaagacaatgaaggtaaatgacctccgaaaagaattagaaagtcgagctcttagttccaaaggattaaaatcccagttaatagcccgattgacaaaacagcttaaagtagaggaacaaaaagaagaacagaaggagttagagaaatctgaaaaagaagaggatgaggatgatgataggaaatctgaagacgataaagaggaagaagaaaggaaacgtcaagaggaaatagaacgccagcgtcgagaaagaagatatattttgcctgatgaaccggccatcattgtacatccaaattgggctgcaaaaagtggcaagtttgattgtagcatcatgtctttgagtgtcctattggactacagattagaggataataaagaacattcatttgaggtttcattgtttgcggaacttttcaacgaaatgcttcaaagagattttggtgtccgtatatacaaatcattactgtctcttcctgagaaagaggacaaaaaagaaaaggataaaaaaagcaaaaaagatgagagaaaagataaaaaagaagaaagagatgatgaaactgatgaaccaaaacccaaacggagaaaatcaggcgatgataaagataaaaaagaagatagagatgaaaggaagaaagaagataaaagaaaagatgattctaaagatgatgatgaaactgaagaagataacaatcaagatgaatatgaccctatggaagcagaagaagctgaggatgaagaagatgatagggatgaggaagaaatgaccaaacgagatgacaaaagagatatcaacagatactgcaaggagaggccctctaaagataaggaaaaagaaaagactcaaatgatcacaattaacagagatctgttaatggcttttgtttattttgatcaaagtcattgtggttaccttcttgaaaaggatttggaagaaatactttatactcttggactacatctttctcgggctcaggtaaagaagcttcttaataaagtagtgctccgtgaatcttgcttttaccggaaattaacagacacctcaaaagatgaagagaaccatgaagagtctgagtcattgcaggaagatatgctaggaaacagattattacttccaacaccaacagtaaagcaggaatcaaaggatgtggaagaaaatgttggcctcattgtgtacaatggtgcaatggtagatgtaggaagcctcttgcaaaaattggaaaagagcgaaaaagtaagagctgaggtagaacagaagctgcagttactagaagaaaaaacagatgaagatgaaaaaaccatattaaatttggagaattccaacaaaagcctctctggtgaactcagagaagttaaaaaggaccttagtcagttacaagaaaacttaaagatttcggaaaacatgaatttacaatttgaaaaccaaatgaataagacaatcagaaacttatctacggtaatggatgaaatccacactgttctcaagaaggataatgtaaagaatgaagacaaagatcaaaaatccaaggagaatggtgccagtgtatgataaaatccatgtagtgatgaggaatggtgttaaataatgtaatatataaaaatcatgatataagaatgtttgaaggtgatgcatgtttgattttagtagtataaatgtattttagttcaaatgatgtataaagttttatgaatgtgagtttctgcttttgaaaattgcttgtaattcctagccttcaaattattaaacactccttgagtgaaataattttgcattgcaaagtgttttaggatgaactttgttatagttttaactccaataaagttcatcagtttaattgactgtagtatttaattaccaaatttcttttattaaaatgcctagaaatttttaatttatagaattattaggttttaaaatttttagttcatctgttaaaatttcagtcaaaatcataaaatagcatgatgcttaatttttgcaagttttttgaaactttttgttttttttactcatcaccaaaaaatcccctcttgatcagtctctaaaagcattcattaaaaattcagttcaggccgggcacggtggctcacacctgtaatcccaacactttgggaggccgaggcaggtggatcacctgaggttaggagttcgagaccagcctggccaacatggtgaaacccggtctctactaaaaatataaaaattagctgggcatggtggtgggtgcctgtaatcccagctaacttgggaggctgaggcaggagaatcgcttgaacccaggaggcggaggttgcagtcactcaggatcatgcagctacactccagcctgggcgacaagagtgaaactccatctcaaaaagaaaaaaaaaaaaaatcagtttatttgaaagacagtatatcagaaagaaagaagcaatagagaactagtattgttctttatgggttagactttacataatattagttgtcctgatgtcaatgttactgctttcaattaatttttctactttcccagaatagcatctatattccttttaattttgagggtttaaaaaaaaatgcagtgtatgtcaaatttacagtttagtaccaagccagtagatgtcagtatgatgccttaaattaagtcttctttaattaaagatatttttttaaatt

SEQ ID NO: 460672 - DNA, 2416 bp, Homo sapiens
tctggaatctcagttgacagtgttcccttcttcactttggagccctgagcgaaagggccaggcgtattgagcggtcaggggagcgcgcacgcagaacgtcagccagtaagcgccgttcctccgggagatgtggaggaggggggcggcgtggaggaagagggggaagttggcgcatgcgcctaaagctgacgggtttgaaatggcttcgatgttagccgggacccgactcagatcgatgctatagaagacaaacaagggaaggttttttttccttttgcatcatggctcaatttggaggacagaagaatccgccatgggctactcagtttacagccactgcagtatcacagccagctgcactgggtgttcaacagccatcactccttggagcatctcctaccatttatacacagcaaactgcattggcagcagcaggccttaccacacaaactccagcaaactatcagttaacacaaactgctgcattgcagcaacaagccgcagctgcagcagctgcattacaacagcaatattcacaacctcagcaggccctgtatagtgtgcaacaacagttacagcaaccccagcaaaccctcttaacacagccagctgttgcactgcctacaagccttagcctgtctactcctcagccaacagcacaaataactgtatcatatccaacaccaaggtccagtcaacagcaaacccagcctcagaagcagcgtgttttcacaggggtggttacaaaactacatgatacatttggatttgtggatgaagatgtattctttcagcttagtgctgtcaaagggaaaaccccccaagtaggtgacagagtattggttgaagctacttataatcctaatatgccttttaaatggaatgcacagagaattcaaacactaccaaatcagaatcagtcgcaaacccagccattactgaagactcctcctgctgtacttcagccaattgcaccacagacaacatttggtgttcagactcagccccagccccagtcactgctgcaggcacagatttcagcagcttctattacaccactattgcagactcaaccacagcccttattacagcagcctcagcaaaaagctggtttattgcagcctcctgttcgtatagtttcacagccacaaccggcacgacgattagatcccccatcccgattttcaggaagaaatgacagaggggatcaagtgcctaacagaaaagatgatcgaagtcgtgagagagagagagaaagacgtagatcgagagaaagatcacctcagaggaaacgttcccgggaaagatctccacgaagagagcgagagcgatcacctcggagagttcgacgtgttgttccacgttacacagttcagttttcaaagttttctttagattgtcccagttgtgacatgatggaactaaggcgccgttatcaaaatttgtatatacctagtgacttttttgatgctcaatttacatgggtggatgctttccctttgtcaagaccatttcagctgggaaattactgcaatttttatgtaatgcacagagaagtagagtccttagaaaaaaatatggccattcttgatccaccagatgctgaccacttatacagtgcaaaggtaatgctgatggctagccctagtatggaagatttatatcataagtcatgtgctcttgctgaggacccacaagaacttcgagatggattccaacatcctgctagacttgttaagtttttagtgggcatgaaaggcaaggatgaagctatggccattggaggccactggtctccttcgttggatggaccagacccagaaaaagatccctctgtgttgattaagactgctattcgttgttgtaaggctctgacaggcattgatctaagtgtgtgcacacaatggtaccgttttgcagagattcgctaccatcgccctgaggagacccacaaggggcgtacagttccagctcatgtggagacagtggttttatttttcccggatgtttggcattgccttcccacccgctcagagtgggaaaccctctcccgaggatacaagcagcagctggtcgagaagcttcagggtgaacgcaaggaggctgatggagaacaggatgaagaagagaaggatgatggtgaagctaaagaaatttctacacctacccattggtctaaacttgatccaaagacaatgaaggtaaatgacctccgaaaagaattagaaagtcgagctcttagttccaaaggattaaaatcccagttaatagcccgattgacaaaacagcttaaagtagaggaacaaaaagaagaacagaaggagttagagaaatctgaaaaagaagaggatgaggatgatgataggaaatctgaagacgataaagaggtatgtactcaatctattattatactcta

SEQ ID NO: 460673 - DNA, 3004 bp, Homo sapiens
cgcggtggctcacgcttgtaatcccagcactttgggaggccgaggcgggcggatcacgaggtcagaagatcgagaccatcctggctaacacggtgaaaccccgtctctactaaaaatacaaaaaaaattagccgggcgtgatggcgggtgcttgtagtcccagctactcgggaggctgaggcaggagaatggcgtgaacccgggaggcggagcttgcagtgagccgagattgcgccactgcactcccacctgggccacagagcgagactctgtctcaaaaaaaaaaaaaaaaacaatatccgctgccccccgccccccgccaccttttttttttccgtgtttttctgctccatatattcaggtaaatgacctccgaaaagaattagaaagtcgagctcttagttccaaaggattaaaatcccagttaatagcccgattgacaaaacagcttaaagtagaggaacaaaaagaagaacagaaggagttagagaaatctgaaaaagaagaggatgaggatgatgataggaaatctgaagacgataaagaggaagaagaaaggaaacgtcaagaggaaatagaacgccagcgtcgagaaagaagatatattttgcctgatgaaccggccatcattgtacatccaaattgggctgcaaaaagtggcaagtttgattgtagcatcatgtctttgagtgtcctattggactacagattagaggataataaagaacattcatttgaggtttcattgtttgcggaacttttcaacgaaatgcttcaaagagattttggtgtccgtatatacaaatcattactgtctcttcctgagaaagaggacaaaaaagaaaaggataaaaaaagcaaaaaagatgagagaaaagataaaaaagaagaaagagatgatgaaactgatgaaccaaaacccaaacggagaaaatcaggcgatgataaagataaaaaagaagatagagatgaaaggaagaaagaagataaaagaaaagatgattctaaagatgatgatgaaactgaagaagataacaatcaagatgaatatgaccctatggaagcagaagaagctgaggatgaagaagatgatagggatgaggaagaaatgaccaaacgagatgacaaaagagatatcaacagatactgcaaggagaggccctctaaagataaggaaaaagaaaagactcaaatgatcacaattaacagagatctgttaatggcttttgtttattttgatcaaagtcattgtggttaccttcttgaaaaggatttggaagaaatactttatactcttggactacatctttctcgggctcaggtaaagaagcttcttaataaagtagtgctccgtgaatcttgcttttaccggaaattaacagacacctcaaaagatgaagagaaccatgaagagtctgagtcattgcaggaagatatgctaggaaacagattattacttccaacaccaacagtaaagcaggaatcaaaggatgtggaagaaaatgttggcctcattgtgtacaatggtgcaatggtagatgtaggaagcctcttgcaaaaattggaaaagagcgaaaaagtaagagctgaggtagaacagaagctgcagttactagaagaaaaaacagatgaagatgaaaaaaccatattaaatttggagaattccaacaaaagcctctctggtgaactcagagaagttaaaaaggaccttagtcagttacaagaaaacttaaagatttcggaaaacatgaatttacaatttgaaaaccaaatgaataagacaatcagaaacttatctacggtaatggatgaaatccacactgttctcaagaaggataatgtaaagaatgaagacaaagatcaaaaatccaaggagaatggtgccagtgtatgataaaatccatgtagtgatgaggaatggtgttaaataatgtaatatataaaaatcatgatataagaatgtttgaaggtgatgcatgtttgattttagtagtataaatgtattttagttcaaatgatgtataaagttttatgaatgtgagtttctgcttttgaaaattgcttgtaattcctagccttcaaattattaaacactccttgagtgaaataattttgcattgcaaagtgttttaggatgaactttgttatagttttaactccaataaagttcatcagtttaattgactgtagtatttaattaccaaatttcttttattaaaatgcctagaaatttttaatttatagaattattaggttttaaaatttttagttcatctgttaaaatttcagtcaaaatcataaaatagcatgatgcttaatttttgcaagttttttgaaactttttgttttttttactcatcaccaaaaaatcccctcttgatcagtctctaaaagcattcattaaaaattcagttcaggccgggcacggtggctcacacctgtaatcccaacactttgggaggccgaggcaggtggatcacctgaggttaggagttcgagaccagcctggccaacatggtgaaacccggtctctactaaaaatataaaaattagctgggcatggtggtgggtgcctgtaatcccagctaacttgggaggctgaggcaggagaatcgcttgaacccaggaggcggaggttgcagtcactcaggatcatgcagctacactccagcctgggcgacaagagtgaaactccatctcaaaaagaaaaaaaaaaaaaatcagtttatttgaaagacagtatatcagaaagaaagaagcaatagagaactagtattgttctttatgggttagactttacataatattagttgtcctgatgtcaatgttactgctttcaattaatttttctactttcccagaatagcatctatattccttttaattttgagggtttaaaaaaaaatgcagtgtatgtcaaatttacagtttagtaccaagccagtagatgtcagtatgatgccttaaattaagtcttctttaattaaagatatttttttaaatt

SEQ ID NO: 460674 - DNA, 3086 bp, Homo sapiens
tctggaatctcagttgacagtgttcccttcttcactttggagccctgagcgaaagggccaggcgtattgagcggtcaggggagcgcgcacgcagaacgtcagccagtaagcgccgttcctccgggagatgtggaggaggggggcggcgtggaggaagagggggaagttggcgcatgcgcctaaagctgacgggtttgaaatggcttcgatgttagccgggacccgactcagatcgatgctatagaagacaaacaagggaaggttttttttccttttgcatcatggctcaatttggaggacagaagaatccgccatgggctactcagtttacagccactgcagtatcacagccagctgcactgggtgttcaacagccatcactccttggagcatctcctaccatttatacacagcaaactgcattggcagcagcaggccttaccacacaaactccagcaaactatcagttaacacaaactgctgcattgcagcaacaagccgcagctgcagcagctgcattacaacagcaatattcacaacctcagcaggccctgtatagtgtgcaacaacagttacagcaaccccagcaaaccctcttaacacagccagctgttgcactgcctacaagccttagcctgtctactcctcagccaacagcacaaataactgtatcatatccaacaccaaggtccagtcaacagcaaacccagcctcagaagcagcgtgttttcacaggggtggttacaaaactacatgatacatttggatttgtggatgaagatgtattctttcagcttagtgctgtcaaagggaaaaccccccaagtaggtgacagagtattggttgaagctacttataatcctaatatgccttttaaatggaatgcacagagaattcaaacactaccaaatcagaatcagtcgcaaacccagccattactgaagactcctcctgctgtacttcagccaattgcaccacagacaacatttggtgttcagactcagccccagccccagtcactgctgcaggcacagatttcagcagcttctattacaccactattgcagactcaaccacagcccttattacagcagcctcagcaaaaagctggtttattgcagcctcctgttcgtatagtttcacagccacaaccggcacgacgattagatcccccatcccgattttcaggaagaaatgacagaggggatcaagtgcctaacagaaaagatgatcgaagtcgtgagagagagagagaaagacgtagatcgagagaaagatcacctcagaggaaacgttcccgggaaagatctccacgaagagagcgagagcgatcacctcggagagttcgacgtgttgttccacgttacacagttcagttttcaaagttttctttagattgtcccagttgtgacatgatggaactaaggcgccgttatcaaaatttgtatatacctagtgacttttttgatgctcaatttacatgggtggatgctttccctttgtcaagaccatttcagctgggaaattactgcaatttttatgtaatgcacagagaagtagagtccttagaaaaaaatatggccattcttgatccaccagatgctgaccacttatacagtgcaaaggtaatgctgatggctagccctagtatggaagatttatatcataagtcatgtgctcttgctgaggacccacaagaacttcgagatggattccaacatcctgctagacttgttaagtttttagtgggcatgaaaggcaaggatgaagctatggccattggaggccactggtctccttcgttggatggaccagacccagaaaaagatccctctgtgttgattaagactgctattcgttgttgtaaggctctgacaggcattgatctaagtgtgtgcacacaatggtaccgttttgcagagattcgctaccatcgccctgaggagacccacaaggggcgtacagttccagctcatgtggagacagtggttttatttttcccggatgtttggcattgccttcccacccgctcagagtgggaaaccctctcccgaggatacaagcagcagctggtcgagaagcttcagggtgaacgcaaggaggctgatggagaacaggcactgaacgctaatccctttttctatttccgcttctcacaggcacaggaacacaggcacaaatgcacaccacacactacataataaacacacatggaggaacataactggtaacagcgactggtaatccagctttcagcagtatagttgtatgttcttttctcttaaaatttctgtcttattatcctaactttaagagtgctgagacctcaaaggaaaataagttgtgcttaaattgcacagaattttgtttttatcataggtctagttgctggaatctgggaccagttgttgaacaagattcagtattaagccattttaaacattttgccattttctaaaatttaaaaaattttctttttcatggtcatcagttctagtcatggatatttgaaattggacaaccacaagtctgagagatttgaaatttcaggctatgtggcaacgtctttggtacatttcaaaggtctgactaaatcagtctttgggtggcttgaaaattgaggcaagatcacacactgtgtggtttgtggagaccggcagtgtttgtgcatccctgatatcctttgtgttgtaatttatcacccttttgtgtttcacagatctggctttgattggctgatgagtgtctttgtgatcagttaaaagtggtagaatgtatgtacgtggacttgcctaaataataactttaggagaagacaatctgaaacatttgtgaccttgcacagatcagcaacagacttttaaaaataaattatttttattttaaggtttcataatagtaattacattcttaactttgtatgtcaggatgaagaagagaaggatgatggtgaagctaaagaaatttctacacctacccattggtctaaacttgatccaaagacaatgaaggtaactttgataaggatggattttatttatttttttcaattaaaaagttctttctgagacagagtttggctctgt

SEQ ID NO: 460675 - DNA, 2566 bp, Homo sapiens
gcggccgtctactactactatacggttttgagaagaacagaaggagttagagaaatctgaaaaagaagaggatgaggatgatgataggaaatctgaagacgataaagaggaagaagaaaggaaacgtcaagaggaaatagaacgccagcgtcgagaaagaagatatattttgcctgatgaaccggccatcattgtacatccaaattgggctgcaaaaagtggcaagtttgattgtagcatcatgtctttgagtgtcctattggactacagattagaggataataaagaacattcatttgaggtttcattgtttgcggaacttttcaacgaaatgcttcaaagagattttggtgtccgtatatacaaatcattactgtctcttcctgagaaagaggacaaaaaagaaaaggataaaaaaagcaaaaaagatgagagaaaagataaaaaagaagaaagagatgatgaaactgatgaaccaaaacccaaacggagaaaatcaggcgatgataaagataaaaaagaagatagagatgaaaggaagaaagaagataaaagaaaagatgattctaaagatgatgatgaaactgaagaagataacaatcaagatgaatatgaccctatggaagcagaagaagctgaggatgaagaagatgatagggatgaggaagaaatgaccaaacgagatgacaaaagagatatcaacagatactgcaaggagaggccctctaaagataaggaaaaagaaaagactcaaatgatcacaattaacagagatctgttaatggcttttgtttattttgatcaaagtcattgtggttaccttcttgaaaaggatttggaagaaatactttatactcttggactacatctttctcgggctcaggtaaagaagcttcttaataaagtagtgctccgtgaatcttgcttttaccggaaattaacagacacctcaaaagatgaagagaaccatgaagagtctgagtcattgcaggaagatatgctaggaaacagattattacttccaacaccaacagtaaagcaggaatcaaaggatgtggaagaaaatgttggcctcattgtgtacaatggtgcaatggtagatgtaggaagcctcttgcaaaaattggaaaagagcgaaaaagtaagagctgaggtagaacagaagctgcagttactagaagaaaaaacagatgaagatgaaaaaaccatattaaatttggagaattccaacaaaagcctctctggtgaactcagagaagttaaaaaggaccttagtcagttacaagaaaacttaaagatttcggaaaacatgaatttacaatttgaaaaccaaatgaataagacaatcagaaacttatctacggtaatggatgaaatccacactgttctcaagaaggataatgtaaagaatgaagacaaagatcaaaaatccaaggagaatggtgccagtgtatgataaaatccatgtagtgatgaggaatggtgttaaataatgtaatatataaaaatcatgatataagaatgtttgaaggtgatgcatgtttgattttagtagtataaatgtattttagttcaaatgatgtataaagttttatgaatgtgagtttctgcttttgaaaattgcttgtaattcctagccttcaaattattaaacactccttgagtgaaataattttgcattgcaaagtgttttaggatgaactttgttatagttttaactccaataaagttcatcagtttaattgactgtagtatttaattaccaaatttcttttattaaaatgcctagaaatttttaatttatagaattattaggttttaaaatttttagttcatctgttaaaatttcagtcaaaatcataaaatagcatgatgcttaatttttgcaagttttttgaaactttttgttttttttactcatcaccaaaaaatcccctcttgatcagtctctaaaagcattcattaaaaattcagttcaggccgggcacggtggctcacacctgtaatcccaacactttgggaggccgaggcaggtggatcacctgaggttaggagttcgagaccagcctggccaacatggtgaaacccggtctctactaaaaatataaaaattagctgggcatggtggtgggtgcctgtaatcccagctaacttgggaggctgaggcaggagaatcgcttgaacccaggaggcggaggttgcagtcactcaggatcatgcagctacactccagcctgggcgacaagagtgaaactccatctcaaaaagaaaaaaaaaaaaaatcagtttatttgaaagacagtatatcagaaagaaagaagcaatagagaactagtattgttctttatgggttagactttacataatattagttgtcctgatgtcaatgttactgctttcaattaatttttctactttcccagaatagcatctatattccttttaattttgagggtttaaaaaaaaatgcagtgtatgtcaaatttacagtttagtaccaagccagtagatgtcagtatgatgccttaaattaagtcttctttaattaaagatatttttttaaatt

SEQ ID NO: 460676 - DNA, 1733 bp, Homo sapiens
caagaaatgtattttcatctctgtattttgtttacttgcatgcataacaggtaaagaagcttcttaataaagtagtgctccgtgaatcttgcttttaccggaaattaacagacacctcaaaagatgaagagaaccatgaagagtctgagtcattgcaggaagatatgctaggaaacagattattacttccaacaccaacagtaaagcaggaatcaaaggatgtggaagaaaatgttggcctcattgtgtacaatggtgcaatggtagatgtaggaagcctcttgcaaaaattggaaaagagcgaaaaagtaagagctgaggtagaacagaagctgcagttactagaagaaaaaacagatgaagatgaaaaaaccatattaaatttggagaattccaacaaaagcctctctggtgaactcagagaagttaaaaaggaccttagtcagttacaagaaaacttaaagatttcggaaaacatgaatttacaatttgaaaaccaaatgaataagacaatcagaaacttatctacggtaatggatgaaatccacactgttctcaagaaggataatgtaaagaatgaagacaaagatcaaaaatccaaggagaatggtgccagtgtatgataaaatccatgtagtgatgaggaatggtgttaaataatgtaatatataaaaatcatgatataagaatgtttgaaggtgatgcatgtttgattttagtagtataaatgtattttagttcaaatgatgtataaagttttatgaatgtgagtttctgcttttgaaaattgcttgtaattcctagccttcaaattattaaacactccttgagtgaaataattttgcattgcaaagtgttttaggatgaactttgttatagttttaactccaataaagttcatcagtttaattgactgtagtatttaattaccaaatttcttttattaaaatgcctagaaatttttaatttatagaattattaggttttaaaatttttagttcatctgttaaaatttcagtcaaaatcataaaatagcatgatgcttaatttttgcaagttttttgaaactttttgttttttttactcatcaccaaaaaatcccctcttgatcagtctctaaaagcattcattaaaaattcagttcaggccgggcacggtggctcacacctgtaatcccaacactttgggaggccgaggcaggtggatcacctgaggttaggagttcgagaccagcctggccaacatggtgaaacccggtctctactaaaaatataaaaattagctgggcatggtggtgggtgcctgtaatcccagctaacttgggaggctgaggcaggagaatcgcttgaacccaggaggcggaggttgcagtcactcaggatcatgcagctacactccagcctgggcgacaagagtgaaactccatctcaaaaagaaaaaaaaaaaaaatcagtttatttgaaagacagtatatcagaaagaaagaagcaatagagaactagtattgttctttatgggttagactttacataatattagttgtcctgatgtcaatgttactgctttcaattaatttttctactttcccagaatagcatctatattccttttaattttgagggtttaaaaaaaaatgcagtgtatgtcaaatttacagtttagtaccaagccagtagatgtcagtatgatgccttaaattaagtcttctttaattaaagatatttttttaaatt

SEQ ID NO: 460677 - DNA, 151 bp, Homo sapiens
gtaaaaggacacatttgttttaactttagatgtattcactttgcttagctgtaactttgtacacataaaatctaaagccctacattttaatatttgttgattaatgagtaattttagtattaaggcacccagaatttaatgatgtagatgt

SEQ ID NO: 460678 - DNA, 637 bp, Homo sapiens
catagtggctcacacctgtaatcccagcactttgggaggcggaggagggtggatcacctgaggtcaggagttcaagaccagcctggctaacatggtgaaaccctgtctctccaaaaatacaaaaattggccaggcatgatggcgggtgcctgtaataccagctactctggaggctgaggtaggagaatcgcttgaacctgggaagtggaggttgtagtgagtcgagatcacaccactgcactccagtttgggcgacaagagcaagactctttctcaaaagaaagtgaaaattatatcatagtttttctaagagaatcaagaaatgtattttcatctctgtattttgtttacttgcatgcataacaggtaaagaagcttcttaataaagtagtgctccgtgaatcttgcttttaccggaaattaacagacacctcaaaagatgaagagaaccatgaagagtctgagtcattgcaggaagatatgctaggtctgagtaatattaagattttgctttttaataaatatactagtaattaaagaagaaaaataacttactaaaatatggtatattttatattataggaaacagattattacttccaacaccaacagtaaagcaggaatcaaaggatgtgga

SEQ ID NO: 460679 - DNA, 4364 bp, Homo sapiens
tctggaatctcagttgacagtgttcccttcttcactttggagccctgagcgaaagggccaggcgtattgagcggtcaggggagcgcgcacgcagaacgtcagccagtaagcgccgttcctccgggagatgtggaggaggggggcggcgtggaggaagagggggaagttggcgcatgcgcctaaagctgacgggtttgaaatggcttcgatgttagccgggacccgactcagatcgatgctatagaagacaaacaagggaaggttttttttccttttgcatcatggctcaatttggaggacagaagaatccgccatgggctactcagtttacagccactgcagtatcacagccagctgcactgggtgttcaacagccatcactccttggagcatctcctaccatttatacacagcaaactgcattggcagcagcaggccttaccacacaaactccagcaaactatcagttaacacaaactgctgcattgcagcaacaagccgcagctgcagcagctgcattacaacagcaatattcacaacctcagcaggccctgtatagtgtgcaacaacagttacagcaaccccagcaaaccctcttaacacagccagctgttgcactgcctacaagccttagcctgtctactcctcagccaacagcacaaataactgtatcatatccaacaccaaggtccagtcaacagcaaacccagcctcagaagcagcgtgttttcacaggggtggttacaaaactacatgatacatttggatttgtggatgaagatgtattctttcagcttagtgctgtcaaagggaaaaccccccaagtaggtgacagagtattggttgaagctacttataatcctaatatgccttttaaatggaatgcacagagaattcaaacactaccaaatcagaatcagtcgcaaacccagccattactgaagactcctcctgctgtacttcagccaattgcaccacagacaacatttggtgttcagactcagccccagccccagtcactgctgcaggcacagatttcagcagcttctattacaccactattgcagactcaaccacagcccttattacagcagcctcagcaaaaagctggtttattgcagcctcctgttcgtatagtttcacagccacaaccggcacgacgattagatcccccatcccgattttcaggaagaaatgacagaggggatcaagtgcctaacagaaaagatgatcgaagtcgtgagagagagagagaaagacgtagatcgagagaaagatcacctcagaggaaacgttcccgggaaagatctccacgaagagagcgagagcgatcacctcggagagttcgacgtgttgttccacgttacacagttcagttttcaaagttttctttagattgtcccagttgtgacatgatggaactaaggcgccgttatcaaaatttgtatatacctagtgacttttttgatgctcaatttacatgggtggatgctttccctttgtcaagaccatttcagctgggaaattactgcaatttttatgtaatgcacagagaagtagagtccttagaaaaaaatatggccattcttgatccaccagatgctgaccacttatacagtgcaaaggtaatgctgatggctagccctagtatggaagatttatatcataagtcatgtgctcttgctgaggacccacaagaacttcgagatggattccaacatcctgctagacttgttaagtttttagtgggcatgaaaggcaaggatgaagctatggccattggaggccactggtctccttcgttggatggaccagacccagaaaaagatccctctgtgttgattaagactgctattcgttgttgtaaggctctgacaggcattgatctaagtgtgtgcacacaatggtaccgttttgcagagattcgctaccatcgccctgaggagacccacaaggggcgtacagttccagctcatgtggagacagtggttttatttttcccggatgtttggcattgccttcccacccgctcagagtgggaaaccctctcccgaggatacaagcagcagctggtcgagaagcttcagggtgaacgcaaggaggctgatggagaacaggcactgaacgctaatccctttttctatttccgcttctcacaggcacaggaacacaggcacaaatgcacaccacacactacataataaacacacatggaggaacataactggtaacagcgactggtaatccagctttcagcagtatagttgtatgttcttttctcttaaaatttctgtcttattatcctaactttaagagtgctgagacctcaaaggaaaataagttgtgcttaaattgcacagaattttgtttttatcataggtctagttgctggaatctgggaccagttgttgaacaagattcagtattaagccattttaaacattttgccattttctaaaatttaaaaaattttctttttcatggtcatcagttctagtcatggatatttgaaattggacaaccacaagtctgagagatttgaaatttcaggctatgtggcaacgtctttggtacatttcaaaggtctgactaaatcagtctttgggtggcttgaaaattgaggcaagatcacacactgtgtggtttgtggagaccggcagtgtttgtgcatccctgatatcctttgtgttgtaatttatcacccttttgtgtttcacagatctggctttgattggctgatgagtgtctttgtgatcagttaaaagtggtagaatgtatgtacgtggacttgcctaaataataactttaggagaagacaatctgaaacatttgtgaccttgcacagatcagcaacagacttttaaaaataaattatttttattttaaggtttcataatagtaattacattcttaactttgtatgtcaggatgaagaagagaaggatgatggtgaagctaaagaaatttctacacctacccattggtctaaacttgatccaaagacaatgaaggtaactttgataaggatggattttatttatttttttcaattaaaaagttctttctgagacagagtttggctctgtcgcccaggctggagtgtagtggcgcgatctcggctcacttcagcctctgcctcctgggttcagtagattctcttgcctcagcctcctgagtagctgggattacaggcaccctgccaccacgcctggctaatttttctagttttagtagagacaaggtttcagaatgttggccagtttggtctcgaactcctgacatcaggtgatccacctgcctcagtctcccaaagtgctgggattacaggcatgagctgccgtgcctggccaattgtatttatatacatataaattaaaaggcaattttataaatcagtacagccaatatctgttgaatgcctataatatatgagggtctatagtgtaactatagtaactttgagaactaagaaggtaggatttctgcactaagtaacttcaaggggatgggactataggcgcctgccaccacgcccggctaattgttttgtatttttagtagagatcgggtttcaccgtgttagccattatggtctcaatctcctgacctcgtgattcacccgccttggcatcccaaagtgctgggattacaggtgtgagccaccgtgcctggccgtaatttggtttttaaaatagaatatttttttgagacagagtcttgctgtgtttcccagactggagtgcagtggaatgatcttggctcactgcagctttggcctcctgggttcaaatgattcttgtgcctcagcctctcgaatagcttggattacaggcacgtacaaccatgccaggctaatttctgtatttttagtagagatgggattttgccatattggtcaggccggtctcacactcctggcctcaagcgatctatccacccccgcctcccagagtgtaaatgacctccgaaaagaattagaaagtcgagctcttagttccaaaggattaaaatcccagttaatagcccgattgacaaaacagcttaaagtagaggaacaaaaagaagaacagaaggagttagagaaatctgaaaaagaagaggatgaggatgatgataggaaatctgaagacgataaagaggaatatgcaggatgggaaatttttttgggaggggggatgagaaatatttattaaagttggtatgatcttttgaaactgcatatcagctggatgttgtggcacaaccagatatttccatatgctttagtttctcaggcaaaaattatgtcaaagctgcttctagtctctcattttcataaatacctttactatgtaccaaagaagggagccctattttcccacaag

SEQ ID NO: 460680 - DNA, 4844 bp, Homo sapiens
tctggaatctcagttgacagtgttcccttcttcactttggagccctgagcgaaagggccaggcgtattgagcggtcaggggagcgcgcacgcagaacgtcagccagtaagcgccgttcctccgggagatgtggaggaggggggcggcgtggaggaagagggggaagttggcgcatgcgcctaaagctgacgggtttgaaatggcttcgatgttagccgggacccgactcagatcgatgctatagaagacaaacaagggaaggttttttttccttttgcatcatggctcaatttggaggacagaagaatccgccatgggctactcagtttacagccactgcagtatcacagccagctgcactgggtgttcaacagccatcactccttggagcatctcctaccatttatacacagcaaactgcattggcagcagcaggccttaccacacaaactccagcaaactatcagttaacacaaactgctgcattgcagcaacaagccgcagctgcagcagctgcattacaacagcaatattcacaacctcagcaggccctgtatagtgtgcaacaacagttacagcaaccccagcaaaccctcttaacacagccagctgttgcactgcctacaagccttagcctgtctactcctcagccaacagcacaaataactgtatcatatccaacaccaaggtccagtcaacagcaaacccagcctcagaagcagcgtgttttcacaggggtggttacaaaactacatgatacatttggatttgtggatgaagatgtattctttcagcttagtgctgtcaaagggaaaaccccccaagtaggtgacagagtattggttgaagctacttataatcctaatatgccttttaaatggaatgcacagagaattcaaacactaccaaatcagaatcagtcgcaaacccagccattactgaagactcctcctgctgtacttcagccaattgcaccacagacaacatttggtgttcagactcagccccagccccagtcactgctgcaggcacagatttcagcagcttctattacaccactattgcagactcaaccacagcccttattacagcagcctcagcaaaaagctggtttattgcagcctcctgttcgtatagtttcacagccacaaccggcacgacgattagatcccccatcccgattttcaggaagaaatgacagaggggatcaagtgcctaacagaaaagatgatcgaagtcgtgagagagagagagaaagacgtagatcgagagaaagatcacctcagaggaaacgttcccgggaaagatctccacgaagagagcgagagcgatcacctcggagagttcgacgtgttgttccacgttacacagttcagttttcaaagttttctttagattgtcccagttgtgacatgatggaactaaggcgccgttatcaaaatttgtatatacctagtgacttttttgatgctcaatttacatgggtggatgctttccctttgtcaagaccatttcagctgggaaattactgcaatttttatgtaatgcacagagaagtagagtccttagaaaaaaatatggccattcttgatccaccagatgctgaccacttatacagtgcaaaggtaatgctgatggctagccctagtatggaagatttatatcataagtcatgtgctcttgctgaggacccacaagaacttcgagatggattccaacatcctgctagacttgttaagtttttagtgggcatgaaaggcaaggatgaagctatggccattggaggccactggtctccttcgttggatggaccagacccagaaaaagatccctctgtgttgattaagactgctattcgttgttgtaaggctctgacaggcattgatctaagtgtgtgcacacaatggtaccgttttgcagagattcgctaccatcgccctgaggagacccacaaggggcgtacagttccagctcatgtggagacagtggttttatttttcccggatgtttggcattgccttcccacccgctcagagtgggaaaccctctcccgaggatacaagcagcagctggtcgagaagcttcagggtgaacgcaaggaggctgatggagaacaggatgaagaagagaaggatgatggtgaagctaaagaaatttctacacctacccattggtctaaacttgatccaaagacaatgaaggtaaatgacctccgaaaagaattagaaagtcgagctcttagttccaaaggattaaaatcccagttaatagcccgattgacaaaacagcttaaagtagaggaacaaaaagaagaacagaaggagttagagaaatctgaaaaagaagaggatgaggatgatgataggaaatctgaagacgataaagaggaagaagaaaggaaacgtcaagaggaaatagaacgccagcgtcgagaaagaagatatattttgcctgatgaaccggccatcattgtacatccaaattgggctgcaaaaagtggcaagtttgattgtagcatcatgtctttgagtgtcctattggactacagattagaggataataaagaacattcatttgaggtttcattgtttgcggaacttttcaacgaaatgcttcaaagagattttggtgtccgtatatacaaatcattactgtctcttcctgagaaagaggacaaaaaagaaaaggataaaaaaagcaaaaaagatgagagaaaagataaaaaagaagaaagagatgatgaaactgatgaaccaaaacccaaacggagaaaatcaggcgatgataaagataaaaaagaagatagagatgaaaggaagaaagaagataaaagaaaagatgattctaaagatgatgatgaaactgaagaagataacaatcaagatgaatatgaccctatggaagcagaagaagctgaggatgaagaagatgatagggatgaggaagaaatgaccaaacgagatgacaaaagagatatcaacagatactgcaaggagaggccctctaaagataaggaaaaagaaaagactcaaatgatcacaattaacagagatctgttaatggcttttgtttattttgatcaaagtcattgtggttaccttcttgaaaaggatttggaagaaatactttatactcttggactacatctttctcgggctcaggtaaagaagcttcttaataaagtagtgctccgtgaatcttgcttttaccggaaattaacagacacctcaaaagatgaagagaaccatgaagagtctgagtcattgcaggaagatatgctaggaaacagattattacttccaacaccaacagtaaagcaggaatcaaaggatgtggaagaaaatgttggcctcattgtgtacaatggtgcaatggtagatgtaggaagcctcttgcaaaaattggaaaagagcgaaaaagtaagagctgaggtagaacagaagctgcagttactagaagaaaaaacagatgaagatgaaaaaaccatattaaatttggagaattccaacaaaagcctctctggtgaactcagagaagttaaaaaggaccttagtcagttacaagaaaacttaaagatttcggaaaacatgaatttacaatttgaaaaccaaatgaataagacaatcagaaacttatctacggtaatggatgaaatccacactgttctcaagaaggataatgtaaagaatgaagacaaagatcaaaaatccaaggagaatggtgccagtgtatgataaaatccatgtagtgatgaggaatggtgttaaataatgtaatatataaaaatcatgatataagaatgtttgaaggtgatgcatgtttgattttagtagtataaatgtattttagttcaaatgatgtataaagttttatgaatgtgagtttctgcttttgaaaattgcttgtaattcctagccttcaaattattaaacactccttgagtgaaataattttgcattgcaaagtgttttaggatgaactttgttatagttttaactccaataaagttcatcagtttaattgactgtagtatttaattaccaaatttcttttattaaaatgcctagaaatttttaatttatagaattattaggttttaaaatttttagttcatctgttaaaatttcagtcaaaatcataaaatagcatgatgcttaatttttgcaagttttttgaaactttttgttttttttactcatcaccaaaaaatcccctcttgatcagtctctaaaagcattcattaaaaattcagttcaggccgggcacggtggctcacacctgtaatcccaacactttgggaggccgaggcaggtggatcacctgaggttaggagttcgagaccagcctggccaacatggtgaaacccggtctctactaaaaatataaaaattagctgggcatggtggtgggtgcctgtaatcccagctaacttgggaggctgaggcaggagaatcgcttgaacccaggaggcggaggttgcagtcactcaggatcatgcagctacactccagcctgggcgacaagagtgaaactccatctcaaaaagaaaaaaaaaaaaaatcagtttatttgaaagacagtatatcagaaagaaagaagcaatagagaactagtattgttctttatgggttagactttacataatattagttgtcctgatgtcaatgttactgctttcaattaatttttctactttcccagaatagcatctatattccttttaattttgagggtttaaaaaaaaatgcagtgtatgtcaaatttacagtttagtaccaagccagtagatgtcagtatgatgccttaaattaagtcttctttaattaaagatatttttttaaatt

SEQ ID NO: 460681 - DNA, 3987 bp, Homo sapiens
tctggaatctcagttgacagtgttcccttcttcactttggagccctgagcgaaagggccaggcgtattgagcggtcaggggagcgcgcacgcagaacgtcagccagtaagcgccgttcctccgggagatgtggaggaggggggcggcgtggaggaagagggggaagttggcgcatgcgcctaaagctgacgggtttgaaatggcttcgatgttagccgggacccgactcagatcgatgctatagaagacaaacaagggaaggttttttttccttttgcatcatggctcaatttggaggacagaagaatccgccatgggctactcagtttacagccactgcagtatcacagccagctgcactgggtgttcaacagccatcactccttggagcatctcctaccatttatacacagcaaactgcattggcagcagcaggccttaccacacaaactccagcaaactatcagttaacacaaactgctgcattgcagcaacaagccgcagctgcagcagctgcattacaacagcaatattcacaacctcagcaggccctgtatagtgtgcaacaacagttacagcaaccccagcaaaccctcttaacacagccagctgttgcactgcctacaagccttagcctgtctactcctcagccaacagcacaaataactgtatcatatccaacaccaaggtccagtcaacagcaaacccagcctcagaagcagcgtgttttcacaggggtggttacaaaactacatgatacatttggatttgtggatgaagatgtattctttcagcttagtgctgtcaaagggaaaaccccccaagtaggtgacagagtattggttgaagctacttataatcctaatatgccttttaaatggaatgcacagagaattcaaacactaccaaatcagaatcagtcgcaaacccagccattactgaagactcctcctgctgtacttcagccaattgcaccacagacaacatttggtgttcagactcagccccagccccagtcactgctgcaggcacagatttcagcagcttctattacaccactattgcagactcaaccacagcccttattacagcagcctcagcaaaaagctggtttattgcagcctcctgttcgtatagtttcacagccacaaccggcacgacgattagatcccccatcccgattttcaggaagaaatgacagaggggatcaagtgcctaacagaaaagatgatcgaagtcgtgagagagagagagaaagacgtagatcgagagaaagatcacctcagaggaaacgttcccgggaaagatctccacgaagagagcgagagcgatcacctcggagagttcgacgtgttgttccacgttacacagttcagttttcaaagttttctttagattgtcccagttgtgacatgatggaactaaggcgccgttatcaaaatttgtatatacctagtgacttttttgatgctcaatttacatgggtggatgctttccctttgtcaagaccatttcagctgggaaattactgcaatttttatgtaatgcacagagaagtagagtccttagaaaaaaatatggccattcttgatccaccagatgctgaccacttatacagtgcaaaggtaatgctgatggctagccctagtatggaagatttatatcataagtcatgtgctcttgctgaggacccacaagaacttcgagatggattccaacatcctgctagacttgttaagtttttagtgggcatgaaaggcaaggatgaagctatggccattggaggccactggtctccttcgttggatggaccagacccagaaaaagatccctctgtgttgattaagactgctattcgttgttgtaaggctctgacaggcattgatctaagtgtgtgcacacaatggtaccgttttgcagagattcgctaccatcgccctgaggagacccacaaggggcgtacagttccagctcatgtggagacagtggttttatttttcccggatgtttggcattgccttcccacccgctcagagtgggaaaccctctcccgaggatacaagcagcagctggtcgagaagcttcagggtgaacgcaaggaggctgatggagaacaggatgaagaagagaaggatgatggtgaagctaaagaaatttctacacctacccattggtctaaacttgatccaaagacaatgaaggtaaatgacctccgaaaagaattagaaagtcgagctcttagttccaaaggattaaaatcccagttaatagcccgattgacaaaacagcttaaagtagaggaacaaaaagaagaacagaaggagttagagaaatctgaaaaagaagaggatgaggatgatgataggaaatctgaagacgataaagaggaagaagaaaggaaacgtcaagaggaaatagaacgccagcgtcgagaaagaagatatattttgcctgatgaaccggccatcattgtacatccaaattgggctgcaaaaagtggcaagtttgattgtagcatcatgtctttgagtgtcctattggactacagattagaggataataaagaacattcatttgaggtttcattgtttgcggaacttttcaacgaaatgcttcaaagagattttggtgtccgtatatacaaatcattactgtctcttcctgagaaagaggacaaaaaagaaaaggataaaaaaagcaaaaaagatgagagaaaagataaaaaagaagaaagagatgatgaaactgatgaaccaaaacccaaacggagaaaatcaggcgatgataaagataaaaaagaagatagagatgaaaggaagaaagaagataaaagaaaagatgattctaaagatgatgatgaaactgaagaagataacaatcaagatgaatatgaccctatggaagcagaagaagctgaggatgaagaagatgatagggatgaggaagaaatgaccaaacgagatgacaaaagagatatcaacagatactgcaaggagaggccctctaaagataaggaaaaagaaaagactcaaatgatcacaattaacagagatctgttaatggcttttgtttattttgatcaaagtcattgtggttaccttcttgaaaaggatttggaagaaatactttatactcttggactacatctttctcgggctcaggtaaagaagcttcttaataaagtagtgctccgtgaatcttgcttttaccggaaattaacagacacctcaaaagatgaagagaaccatgaagagtctgagtcattgcaggaagatatgctaggaaacagattattacttccaacaccaacagtaaagcaggaatcaaaggatgtggaagaaaatgttggcctcattgtgtacaatggtgcaatggtagatgtaggaagcctcttgcaaaaattggaaaagagcgaaaaagtaagagctgaggtagaacagaagctgcagttactagaagaaaaaacagatgaagatgaaaaaaccatattaaatttggagaattccaacaaaagcctctctggtgaactcagagaagttaaaaaggaccttagtcagttacaagaaaacttaaagatttcggaaacctgactttccatctctggagaaccaattgatctggacatccgaacttatttaccgcatggtggaaatcccccgggtccccaaggtatgtcgactgacgccatccaaatcccgcgaaaggggcgggcggtaaaaccagcagcaagagaggggggacatgatgtctaaaacacgcatcaaaatagggacggaccactcttagaaagagcacaattccatccaacgatgagactaagaaagtagtctgcaacagaaggtgtactctcataaacgcggcaaaagagagagtgtgcaaccacacctcatagcttacaaactctcgtatcggaacctaatcatcagactatagtctcgtccactatgtctcgatttcgtcacagtaataaagagaggggggggagga

SEQ ID NO: 460682 - DNA, 4968 bp, Homo sapiens
tctggaatctcagttgacagtgttcccttcttcactttggagccctgagcgaaagggccaggcgtattgagcggtcaggggagcgcgcacgcagaacgtcagccagtaagcgccgttcctccgggagatgtggaggaggggggcggcgtggaggaagagggggaagttggcgcatgcgcctaaagctgacgggtttgaaatggcttcgatgttagccgggacccgactcaggtgaaggtctggtccccgtagttggagcagtgggcggccaagccgggtctcttaacatcttgtcgaatctgtggaagggccgggagcgatcttttgggtagcccggcggccccgggcggcgacgatcgatgctatagaagacaaacaagggaaggttttttttccttttgcatcatggctcaatttggaggacagaagaatccgccatgggctactcagtttacagccactgcagtatcacagccagctgcactgggtgttcaacagccatcactccttggagcatctcctaccatttatacacagcaaactgcattggcagcagcaggccttaccacacaaactccagcaaactatcagttaacacaaactgctgcattgcagcaacaagccgcagctgcagcagctgcattacaacagcaatattcacaacctcagcaggccctgtatagtgtgcaacaacagttacagcaaccccagcaaaccctcttaacacagccagctgttgcactgcctacaagccttagcctgtctactcctcagccaacagcacaaataactgtatcatatccaacaccaaggtccagtcaacagcaaacccagcctcagaagcagcgtgttttcacaggggtggttacaaaactacatgatacatttggatttgtggatgaagatgtattctttcagcttagtgctgtcaaagggaaaaccccccaagtaggtgacagagtattggttgaagctacttataatcctaatatgccttttaaatggaatgcacagagaattcaaacactaccaaatcagaatcagtcgcaaacccagccattactgaagactcctcctgctgtacttcagccaattgcaccacagacaacatttggtgttcagactcagccccagccccagtcactgctgcaggcacagatttcagcagcttctattacaccactattgcagactcaaccacagcccttattacagcagcctcagcaaaaagctggtttattgcagcctcctgttcgtatagtttcacagccacaaccggcacgacgattagatcccccatcccgattttcaggaagaaatgacagaggggatcaagtgcctaacagaaaagatgatcgaagtcgtgagagagagagagaaagacgtagatcgagagaaagatcacctcagaggaaacgttcccgggaaagatctccacgaagagagcgagagcgatcacctcggagagttcgacgtgttgttccacgttacacagttcagttttcaaagttttctttagattgtcccagttgtgacatgatggaactaaggcgccgttatcaaaatttgtatatacctagtgacttttttgatgctcaatttacatgggtggatgctttccctttgtcaagaccatttcagctgggaaattactgcaatttttatgtaatgcacagagaagtagagtccttagaaaaaaatatggccattcttgatccaccagatgctgaccacttatacagtgcaaaggtaatgctgatggctagccctagtatggaagatttatatcataagtcatgtgctcttgctgaggacccacaagaacttcgagatggattccaacatcctgctagacttgttaagtttttagtgggcatgaaaggcaaggatgaagctatggccattggaggccactggtctccttcgttggatggaccagacccagaaaaagatccctctgtgttgattaagactgctattcgttgttgtaaggctctgacaggcattgatctaagtgtgtgcacacaatggtaccgttttgcagagattcgctaccatcgccctgaggagacccacaaggggcgtacagttccagctcatgtggagacagtggttttatttttcccggatgtttggcattgccttcccacccgctcagagtgggaaaccctctcccgaggatacaagcagcagctggtcgagaagcttcagggtgaacgcaaggaggctgatggagaacaggatgaagaagagaaggatgatggtgaagctaaagaaatttctacacctacccattggtctaaacttgatccaaagacaatgaaggtaaatgacctccgaaaagaattagaaagtcgagctcttagttccaaaggattaaaatcccagttaatagcccgattgacaaaacagcttaaagtagaggaacaaaaagaagaacagaaggagttagagaaatctgaaaaagaagaggatgaggatgatgataggaaatctgaagacgataaagaggaagaagaaaggaaacgtcaagaggaaatagaacgccagcgtcgagaaagaagatatattttgcctgatgaaccggccatcattgtacatccaaattgggctgcaaaaagtggcaagtttgattgtagcatcatgtctttgagtgtcctattggactacagattagaggataataaagaacattcatttgaggtttcattgtttgcggaacttttcaacgaaatgcttcaaagagattttggtgtccgtatatacaaatcattactgtctcttcctgagaaagaggacaaaaaagaaaaggataaaaaaagcaaaaaagatgagagaaaagataaaaaagaagaaagagatgatgaaactgatgaaccaaaacccaaacggagaaaatcaggcgatgataaagataaaaaagaagatagagatgaaaggaagaaagaagataaaagaaaagatgattctaaagatgatgatgaaactgaagaagataacaatcaagatgaatatgaccctatggaagcagaagaagctgaggatgaagaagatgatagggatgaggaagaaatgaccaaacgagatgacaaaagagatatcaacagatactgcaaggagaggccctctaaagataaggaaaaagaaaagactcaaatgatcacaattaacagagatctgttaatggcttttgtttattttgatcaaagtcattgtggttaccttcttgaaaaggatttggaagaaatactttatactcttggactacatctttctcgggctcaggtaaagaagcttcttaataaagtagtgctccgtgaatcttgcttttaccggaaattaacagacacctcaaaagatgaagagaaccatgaagagtctgagtcattgcaggaagatatgctaggaaacagattattacttccaacaccaacagtaaagcaggaatcaaaggatgtggaagaaaatgttggcctcattgtgtacaatggtgcaatggtagatgtaggaagcctcttgcaaaaattggaaaagagcgaaaaagtaagagctgaggtagaacagaagctgcagttactagaagaaaaaacagatgaagatgaaaaaaccatattaaatttggagaattccaacaaaagcctctctggtgaactcagagaagttaaaaaggaccttagtcagttacaagaaaacttaaagatttcggaaaacatgaatttacaatttgaaaaccaaatgaataagacaatcagaaacttatctacggtaatggatgaaatccacactgttctcaagaaggataatgtaaagaatgaagacaaagatcaaaaatccaaggagaatggtgccagtgtatgataaaatccatgtagtgatgaggaatggtgttaaataatgtaatatataaaaatcatgatataagaatgtttgaaggtgatgcatgtttgattttagtagtataaatgtattttagttcaaatgatgtataaagttttatgaatgtgagtttctgcttttgaaaattgcttgtaattcctagccttcaaattattaaacactccttgagtgaaataattttgcattgcaaagtgttttaggatgaactttgttatagttttaactccaataaagttcatcagtttaattgactgtagtatttaattaccaaatttcttttattaaaatgcctagaaatttttaatttatagaattattaggttttaaaatttttagttcatctgttaaaatttcagtcaaaatcataaaatagcatgatgcttaatttttgcaagttttttgaaactttttgttttttttactcatcaccaaaaaatcccctcttgatcagtctctaaaagcattcattaaaaattcagttcaggccgggcacggtggctcacacctgtaatcccaacactttgggaggccgaggcaggtggatcacctgaggttaggagttcgagaccagcctggccaacatggtgaaacccggtctctactaaaaatataaaaattagctgggcatggtggtgggtgcctgtaatcccagctaacttgggaggctgaggcaggagaatcgcttgaacccaggaggcggaggttgcagtcactcaggatcatgcagctacactccagcctgggcgacaagagtgaaactccatctcaaaaagaaaaaaaaaaaaaatcagtttatttgaaagacagtatatcagaaagaaagaagcaatagagaactagtattgttctttatgggttagactttacataatattagttgtcctgatgtcaatgttactgctttcaattaatttttctactttcccagaatagcatctatattccttttaattttgagggtttaaaaaaaaatgcagtgtatgtcaaatttacagtttagtaccaagccagtagatgtcagtatgatgccttaaattaagtcttctttaattaaagatatttttttaaatt

SEQ ID NO: 460683 - DNA, 4370 bp, Homo sapiens
ggaatccgaggtgataccagtggcaagcgcagctgcggcagttgttacaacagcaatattcacaacctcagcaggccctgtatagtgtgcaacaacagttacagcaaccccagcaaaccctcttaacacagccagctgttgcactgcctacaagccttagcctgtctactcctcagccaacagcacaaataactgtatcatatccaacaccaaggtccagtcaacagcaaacccagcctcagaagcagcgtgttttcacaggggtggttacaaaactacatgatacatttggatttgtggatgaagatgtattctttcagcttagtgctgtcaaagggaaaaccccccaagtaggtgacagagtattggttgaagctacttataatcctaatatgccttttaaatggaatgcacagagaattcaaacactaccaaatcagaatcagtcgcaaacccagccattactgaagactcctcctgctgtacttcagccaattgcaccacagacaacatttggtgttcagactcagccccagccccagtcactgctgcaggcacagatttcagcagcttctattacaccactattgcagactcaaccacagcccttattacagcagcctcagcaaaaagctggtttattgcagcctcctgttcgtatagtttcacagccacaaccggcacgacgattagatcccccatcccgattttcaggaagaaatgacagaggggatcaagtgcctaacagaaaagatgatcgaagtcgtgagagagagagagaaagacgtagatcgagagaaagatcacctcagaggaaacgttcccgggaaagatctccacgaagagagcgagagcgatcacctcggagagttcgacgtgttgttccacgttacacagttcagttttcaaagttttctttagattgtcccagttgtgacatgatggaactaaggcgccgttatcaaaatttgtatatacctagtgacttttttgatgctcaatttacatgggtggatgctttccctttgtcaagaccatttcagctgggaaattactgcaatttttatgtaatgcacagagaagtagagtccttagaaaaaaatatggccattcttgatccaccagatgctgaccacttatacagtgcaaaggtaatgctgatggctagccctagtatggaagatttatatcataagtcatgtgctcttgctgaggacccacaagaacttcgagatggattccaacatcctgctagacttgttaagtttttagtgggcatgaaaggcaaggatgaagctatggccattggaggccactggtctccttcgttggatggaccagacccagaaaaagatccctctgtgttgattaagactgctattcgttgttgtaaggctctgacaggcattgatctaagtgtgtgcacacaatggtaccgttttgcagagattcgctaccatcgccctgaggagacccacaaggggcgtacagttccagctcatgtggagacagtggttttatttttcccggatgtttggcattgccttcccacccgctcagagtgggaaaccctctcccgaggatacaagcagcagctggtcgagaagcttcagggtgaacgcaaggaggctgatggagaacaggatgaagaagagaaggatgatggtgaagctaaagaaatttctacacctacccattggtctaaacttgatccaaagacaatgaaggtaaatgacctccgaaaagaattagaaagtcgagctcttagttccaaaggattaaaatcccagttaatagcccgattgacaaaacagcttaaagtagaggaacaaaaagaagaacagaaggagttagagaaatctgaaaaagaagaggatgaggatgatgataggaaatctgaagacgataaagaggaagaagaaaggaaacgtcaagaggaaatagaacgccagcgtcgagaaagaagatatattttgcctgatgaaccggccatcattgtacatccaaattgggctgcaaaaagtggcaagtttgattgtagcatcatgtctttgagtgtcctattggactacagattagaggataataaagaacattcatttgaggtttcattgtttgcggaacttttcaacgaaatgcttcaaagagattttggtgtccgtatatacaaatcattactgtctcttcctgagaaagaggacaaaaaagaaaaggataaaaaaagcaaaaaagatgagagaaaagataaaaaagaagaaagagatgatgaaactgatgaaccaaaacccaaacggagaaaatcaggcgatgataaagataaaaaagaagatagagatgaaaggaagaaagaagataaaagaaaagatgattctaaagatgatgatgaaactgaagaagataacaatcaagatgaatatgaccctatggaagcagaagaagctgaggatgaagaagatgatagggatgaggaagaaatgaccaaacgagatgacaaaagagatatcaacagatactgcaaggagaggccctctaaagataaggaaaaagaaaagactcaaatgatcacaattaacagagatctgttaatggcttttgtttattttgatcaaagtcattgtggttaccttcttgaaaaggatttggaagaaatactttatactcttggactacatctttctcgggctcaggtaaagaagcttcttaataaagtagtgctccgtgaatcttgcttttaccggaaattaacagacacctcaaaagatgaagagaaccatgaagagtctgagtcattgcaggaagatatgctaggaaacagattattacttccaacaccaacagtaaagcaggaatcaaaggatgtggaagaaaatgttggcctcattgtgtacaatggtgcaatggtagatgtaggaagcctcttgcaaaaattggaaaagagcgaaaaagtaagagctgaggtagaacagaagctgcagttactagaagaaaaaacagatgaagatgaaaaaaccatattaaatttggagaattccaacaaaagcctctctggtgaactcagagaagttaaaaaggaccttagtcagttacaagaaaacttaaagatttcggaaaacatgaatttacaatttgaaaaccaaatgaataagacaatcagaaacttatctacggtaatggatgaaatccacactgttctcaagaaggataatgtaaagaatgaagacaaagatcaaaaatccaaggagaatggtgccagtgtatgataaaatccatgtagtgatgaggaatggtgttaaataatgtaatatataaaaatcatgatataagaatgtttgaaggtgatgcatgtttgattttagtagtataaatgtattttagttcaaatgatgtataaagttttatgaatgtgagtttctgcttttgaaaattgcttgtaattcctagccttcaaattattaaacactccttgagtgaaataattttgcattgcaaagtgttttaggatgaactttgttatagttttaactccaataaagttcatcagtttaattgactgtagtatttaattaccaaatttcttttattaaaatgcctagaaatttttaatttatagaattattaggttttaaaatttttagttcatctgttaaaatttcagtcaaaatcataaaatagcatgatgcttaatttttgcaagttttttgaaactttttgttttttttactcatcaccaaaaaatcccctcttgatcagtctctaaaagcattcattaaaaattcagttcaggccgggcacggtggctcacacctgtaatcccaacactttgggaggccgaggcaggtggatcacctgaggttaggagttcgagaccagcctggccaacatggtgaaacccggtctctactaaaaatataaaaattagctgggcatggtggtgggtgcctgtaatcccagctaacttgggaggctgaggcaggagaatcgcttgaacccaggaggcggaggttgcagtcactcaggatcatgcagctacactccagcctgggcgacaagagtgaaactccatctcaaaaagaaaaaaaaaaaaaatcagtttatttgaaagacagtatatcagaaagaaagaagcaatagagaactagtattgttctttatgggttagactttacataatattagttgtcctgatgtcaatgttactgctttcaattaatttttctactttcccagaatagcatctatattccttttaattttgagggtttaaaaaaaaatgcagtgtatgtcaaatttacagtttagtaccaagccagtagatgtcagtatgatgccttaaattaagtcttctttaattaaagatatttttttaaatt

SEQ ID NO: 460684 - DNA, 6596 bp, Homo sapiens
tctggaatctcagttgacagtgttcccttcttcactttggagccctgagcgaaagggccaggcgtattgagcggtcaggggagcgcgcacgcagaacgtcagccagtaagcgccgttcctccgggagatgtggaggaggggggcggcgtggaggaagagggggaagttggcgcatgcgcctaaagctgacgggtttgaaatggcttcgatgttagccgggacccgactcagatcgatgctatagaagacaaacaagggaaggttttttttccttttgcatcatggctcaatttggaggacagaagaatccgccatgggctactcagtttacagccactgcagtatcacagccagctgcactgggtgttcaacagccatcactccttggagcatctcctaccatttatacacagcaaactgcattggcagcagcaggccttaccacacaaactccagcaaactatcagttaacacaaactgctgcattgcagcaacaagccgcagctgcagcagctgcattacaacagcaatattcacaacctcagcaggccctgtatagtgtgcaacaacagttacagcaaccccagcaaaccctcttaacacagccagctgttgcactgcctacaagccttagcctgtctactcctcagccaacagcacaaataactgtatcatatccaacaccaaggtccagtcaacagcaaacccagcctcagaagcagcgtgttttcacaggggtggttacaaaactacatgatacatttggatttgtggatgaagatgtattctttcagcttagtgctgtcaaagggaaaaccccccaagtaggtgacagagtattggttgaagctacttataatcctaatatgccttttaaatggaatgcacagagaattcaaacactaccaaatcagaatcagtcgcaaacccagccattactgaagactcctcctgctgtacttcagccaattgcaccacagacaacatttggtgttcagactcagccccagccccagtcactgctgcaggcacagatttcagcagcttctattacaccactattgcagactcaaccacagcccttattacagcagcctcagcaaaaagctggtttattgcagcctcctgttcgtatagtttcacagccacaaccggcacgacgattagatcccccatcccgattttcaggaagaaatgacagaggggatcaagtgcctaacagaaaagatgatcgaagtcgtgagagagagagagaaagacgtagatcgagagaaagatcacctcagaggaaacgttcccgggaaagatctccacgaagagagcgagagcgatcacctcggagagttcgacgtgttgttccacgttacacagttcagttttcaaagttttctttagattgtcccagttgtgacatgatggaactaaggcgccgttatcaaaatttgtatatacctagtgacttttttgatgctcaatttacatgggtggatgctttccctttgtcaagaccatttcagctgggaaattactgcaatttttatgtaatgcacagagaagtagagtccttagaaaaaaatatggccattcttgatccaccagatgctgaccacttatacagtgcaaaggtaatgctgatggctagccctagtatggaagatttatatcataagtcatgtgctcttgctgaggacccacaagaacttcgagatggattccaacatcctgctagacttgttaagtttttagtgggcatgaaaggcaaggatgaagctatggccattggaggccactggtctccttcgttggatggaccagacccagaaaaagatccctctgtgttgattaagactgctattcgttgttgtaaggctctgacaggcattgatctaagtgtgtgcacacaatggtaccgttttgcagagattcgctaccatcgccctgaggagacccacaaggggcgtacagttccagctcatgtggagacagtggttttatttttcccggatgtttggcattgccttcccacccgctcagagtgggaaaccctctcccgaggatacaagcagcagctggtcgagaagcttcagggtgaacgcaaggaggctgatggagaacaggcactgaacgctaatccctttttctatttccgcttctcacaggcacaggaacacaggcacaaatgcacaccacacactacataataaacacacatggaggaacataactggtaacagcgactggtaatccagctttcagcagtatagttgtatgttcttttctcttaaaatttctgtcttattatcctaactttaagagtgctgagacctcaaaggaaaataagttgtgcttaaattgcacagaattttgtttttatcataggtctagttgctggaatctgggaccagttgttgaacaagattcagtattaagccattttaaacattttgccattttctaaaatttaaaaaattttctttttcatggtcatcagttctagtcatggatatttgaaattggacaaccacaagtctgagagatttgaaatttcaggctatgtggcaacgtctttggtacatttcaaaggtctgactaaatcagtctttgggtggcttgaaaattgaggcaagatcacacactgtgtggtttgtggagaccggcagtgtttgtgcatccctgatatcctttgtgttgtaatttatcacccttttgtgtttcacagatctggctttgattggctgatgagtgtctttgtgatcagttaaaagtggtagaatgtatgtacgtggacttgcctaaataataactttaggagaagacaatctgaaacatttgtgaccttgcacagatcagcaacagacttttaaaaataaattatttttattttaaggtttcataatagtaattacattcttaactttgtatgtcaggatgaagaagagaaggatgatggtgaagctaaagaaatttctacacctacccattggtctaaacttgatccaaagacaatgaaggtaactttgataaggatggattttatttatttttttcaattaaaaagttctttctgagacagagtttggctctgtcgcccaggctggagtgtagtggcgcgatctcggctcacttcagcctctgcctcctgggttcagtagattctcttgcctcagcctcctgagtagctgggattacaggcaccctgccaccacgcctggctaatttttctagttttagtagagacaaggtttcagaatgttggccagtttggtctcgaactcctgacatcaggtgatccacctgcctcagtctcccaaagtgctgggattacaggcatgagctgccgtgcctggccaattgtatttatatacatataaattaaaaggcaattttataaatcagtacagccaatatctgttgaatgcctataatatatgagggtctatagtgtaactatagtaactttgagaactaagaaggtaggatttctgcactaagtaacttcaaggggatgggactataggcgcctgccaccacgcccggctaattgttttgtatttttagtagagatcgggtttcaccgtgttagccattatggtctcaatctcctgacctcgtgattcacccgccttggcatcccaaagtgctgggattacaggtgtgagccaccgtgcctggccgtaatttggtttttaaaatagaatatttttttgagacagagtcttgctgtgtttcccagactggagtgcagtggaatgatcttggctcactgcagctttggcctcctgggttcaaatgattcttgtgcctcagcctctcgaatagcttggattacaggcacgtacaaccatgccaggctaatttctgtatttttagtagagatgggattttgccatattggtcaggccggtctcacactcctggcctcaagcgatctatccacccccgcctcccagagtgtaaatgacctccgaaaagaattagaaagtcgagctcttagttccaaaggattaaaatcccagttaatagcccgattgacaaaacagcttaaagtagaggaacaaaaagaagaacagaaggagttagagaaatctgaaaaagaagaggatgaggatgatgataggaaatctgaagacgataaagaggaagaagaaaggaaacgtcaagaggaaatagaacgccagcgtcgagaaagaagatatattttgcctgatgaaccggccatcattgtacatccaaattgggctgcaaaaagtggcaagtttgattgtagcatcatgtctttgagtgtcctattggactacagattagaggataataaagaacattcatttgaggtttcattgtttgcggaacttttcaacgaaatgcttcaaagagattttggtgtccgtatatacaaatcattactgtctcttcctgagaaagaggacaaaaaagaaaaggataaaaaaagcaaaaaagatgagagaaaagataaaaaagaagaaagagatgatgaaactgatgaaccaaaacccaaacggagaaaatcaggcgatgataaagataaaaaagaagatagagatgaaaggaagaaagaagataaaagaaaagatgattctaaagatgatgatgaaactgaagaagataacaatcaagatgaatatgaccctatggaagcagaagaagctgaggatgaagaagatgatagggatgaggaagaaatgaccaaacgagatgacaaaagagatatcaacagatactgcaaggagaggccctctaaagataaggaaaaagaaaagactcaaatgatcacaattaacagagatctgttaatggcttttgtttattttgatcaaagtcattgtggttaccttcttgaaaaggatttggaagaaatactttatactcttggactacatctttctcgggctcaggtaaagaagcttcttaataaagtagtgctccgtgaatcttgcttttaccggaaattaacagacacctcaaaagatgaagagaaccatgaagagtctgagtcattgcaggaagatatgctaggaaacagattattacttccaacaccaacagtaaagcaggaatcaaaggatgtggaagaaaatgttggcctcattgtgtacaatggtgcaatggtagatgtaggaagcctcttgcaaaaattggaaaagagcgaaaaagtaagagctgaggtagaacagaagctgcagttactagaagaaaaaacagatgaagatgaaaaaaccatattaaatttggagaattccaacaaaagcctctctggtgaactcagagaagttaaaaaggaccttagtcagttacaagaaaacttaaagatttcggaaaacatgaatttacaatttgaaaaccaaatgaataagacaatcagaaacttatctacggtaatggatgaaatccacactgttctcaagaaggataatgtaaagaatgaagacaaagatcaaaaatccaaggagaatggtgccagtgtatgataaaatccatgtagtgatgaggaatggtgttaaataatgtaatatataaaaatcatgatataagaatgtttgaaggtgatgcatgtttgattttagtagtataaatgtattttagttcaaatgatgtataaagttttatgaatgtgagtttctgcttttgaaaattgcttgtaattcctagccttcaaattattaaacactccttgagtgaaataattttgcattgcaaagtgttttaggatgaactttgttatagttttaactccaataaagttcatcagtttaattgactgtagtatttaattaccaaatttcttttattaaaatgcctagaaatttttaatttatagaattattaggttttaaaatttttagttcatctgttaaaatttcagtcaaaatcataaaatagcatgatgcttaatttttgcaagttttttgaaactttttgttttttttactcatcaccaaaaaatcccctcttgatcagtctctaaaagcattcattaaaaattcagttcaggccgggcacggtggctcacacctgtaatcccaacactttgggaggccgaggcaggtggatcacctgaggttaggagttcgagaccagcctggccaacatggtgaaacccggtctctactaaaaatataaaaattagctgggcatggtggtgggtgcctgtaatcccagctaacttgggaggctgaggcaggagaatcgcttgaacccaggaggcggaggttgcagtcactcaggatcatgcagctacactccagcctgggcgacaagagtgaaactccatctcaaaaagaaaaaaaaaaaaaatcagtttatttgaaagacagtatatcagaaagaaagaagcaatagagaactagtattgttctttatgggttagactttacataatattagttgtcctgatgtcaatgttactgctttcaattaatttttctactttcccagaatagcatctatattccttttaattttgagggtttaaaaaaaaatgcagtgtatgtcaaatttacagtttagtaccaagccagtagatgtcagtatgatgccttaaattaagtcttctttaattaaagatatttttttaaatt

SEQ ID NO: 460685 - DNA, 4633 bp, Homo sapiens
tctggaatctcagttgacagtgttcccttcttcactttggagccctgagcgaaagggccaggcgtattgagcggtcaggggagcgcgcacgcagaacgtcagccagtaagcgccgttcctccgggagatgtggaggaggggggcggcgtggaggaagagggggaagttggcgcatgcgcctaaagctgacgggtttgaaatggcttcgatgttagccgggacccgactcagatcgatgctatagaagacaaacaagggaaggttttttttccttttgcatcatggctcaatttggaggacagaagaatccgccatgggctactcagtttacagccactgcagtatcacagccagctgcactgggtgttcaacagccatcactccttggagcatctcctaccatttatacacagcaaactgcattggcagcagcaggccttaccacacaaactccagcaaactatcagttaacacaaactgctgcattgcagcaacaagccgcagctgcagcagctgcattacaacagcaatattcacaacctcagcaggccctgtatagtgtgcaacaacagttacagcaaccccagcaaaccctcttaacacagccagctgttgcactgcctacaagccttagcctgtctactcctcagccaacagcacaaataactgtatcatatccaacaccaaggtccagtcaacagcaaacccagcctcagaagcagcgtgttttcacaggggtggttacaaaactacatgatacatttggatttgtggatgaagatgtattctttcagcttagtgctgtcaaagggaaaaccccccaagtaggtgacagagtattggttgaagctacttataatcctaatatgccttttaaatggaatgcacagagaattcaaacactaccaaatcagaatcagtcgcaaacccagccattactgaagactcctcctgctgtacttcagccaattgcaccacagacaacatttggtgttcagactcagccccagccccagtcactgctgcaggcacagatttcagcagcttctattacaccactattgcagactcaaccacagcccttattacagcagcctcagcaaaaagctggtttattgcagcctcctgttcgtatagtttcacagccacaaccggcacgacgattagatcccccatcccgattttcaggaagaaatgacagaggggatcaagtgcctaacagaaaagatgatcgaagtcgtgagagagagagagaaagacgtagatcgagagaaagatcacctcagaggaaacgttcccgggaaagatctccacgaagagagcgagagcgatcacctcggagagttcgacgtgttgttccacgttacacagttcagttttcaaagttttctttagattgtcccagttgtgacatgatggaactaaggcgccgttatcaaaatttgtatatacctagtgacttttttgatgctcaatttacatgggtggatgctttccctttgtcaagaccatttcagctgggaaattactgcaatttttatgtaatgcacagagaagtagagtccttagaaaaaaatatggccattcttgatccaccagatgctgaccacttatacagtgcaaaggtaatgctgatggctagccctagtatggaagatttatatcataagtcatgtgctcttgctgaggacccacaagaacttcgagatggattccaacatcctgctagacttgttaagtttttagtgggcatgaaaggcaaggatgaagctatggccattggaggccactggtctccttcgttggatggaccagacccagaaaaagatccctctgtgttgattaagactgctattcgttgttgtaaggctctgacaggcattgatctaagtgtgtgcacacaatggatgaagaagagaaggatgatggtgaagctaaagaaatttctacacctacccattggtctaaacttgatccaaagacaatgaaggtaaatgacctccgaaaagaattagaaagtcgagctcttagttccaaaggattaaaatcccagttaatagcccgattgacaaaacagcttaaagtagaggaacaaaaagaagaacagaaggagttagagaaatctgaaaaagaagaggatgaggatgatgataggaaatctgaagacgataaagaggaagaagaaaggaaacgtcaagaggaaatagaacgccagcgtcgagaaagaagatatattttgcctgatgaaccggccatcattgtacatccaaattgggctgcaaaaagtggcaagtttgattgtagcatcatgtctttgagtgtcctattggactacagattagaggataataaagaacattcatttgaggtttcattgtttgcggaacttttcaacgaaatgcttcaaagagattttggtgtccgtatatacaaatcattactgtctcttcctgagaaagaggacaaaaaagaaaaggataaaaaaagcaaaaaagatgagagaaaagataaaaaagaagaaagagatgatgaaactgatgaaccaaaacccaaacggagaaaatcaggcgatgataaagataaaaaagaagatagagatgaaaggaagaaagaagataaaagaaaagatgattctaaagatgatgatgaaactgaagaagataacaatcaagatgaatatgaccctatggaagcagaagaagctgaggatgaagaagatgatagggatgaggaagaaatgaccaaacgagatgacaaaagagatatcaacagatactgcaaggagaggccctctaaagataaggaaaaagaaaagactcaaatgatcacaattaacagagatctgttaatggcttttgtttattttgatcaaagtcattgtggttaccttcttgaaaaggatttggaagaaatactttatactcttggactacatctttctcgggctcaggtaaagaagcttcttaataaagtagtgctccgtgaatcttgcttttaccggaaattaacagacacctcaaaagatgaagagaaccatgaagagtctgagtcattgcaggaagatatgctaggaaacagattattacttccaacaccaacagtaaagcaggaatcaaaggatgtggaagaaaatgttggcctcattgtgtacaatggtgcaatggtagatgtaggaagcctcttgcaaaaattggaaaagagcgaaaaagtaagagctgaggtagaacagaagctgcagttactagaagaaaaaacagatgaagatgaaaaaaccatattaaatttggagaattccaacaaaagcctctctggtgaactcagagaagttaaaaaggaccttagtcagttacaagaaaacttaaagatttcggaaaacatgaatttacaatttgaaaaccaaatgaataagacaatcagaaacttatctacggtaatggatgaaatccacactgttctcaagaaggataatgtaaagaatgaagacaaagatcaaaaatccaaggagaatggtgccagtgtatgataaaatccatgtagtgatgaggaatggtgttaaataatgtaatatataaaaatcatgatataagaatgtttgaaggtgatgcatgtttgattttagtagtataaatgtattttagttcaaatgatgtataaagttttatgaatgtgagtttctgcttttgaaaattgcttgtaattcctagccttcaaattattaaacactccttgagtgaaataattttgcattgcaaagtgttttaggatgaactttgttatagttttaactccaataaagttcatcagtttaattgactgtagtatttaattaccaaatttcttttattaaaatgcctagaaatttttaatttatagaattattaggttttaaaatttttagttcatctgttaaaatttcagtcaaaatcataaaatagcatgatgcttaatttttgcaagttttttgaaactttttgttttttttactcatcaccaaaaaatcccctcttgatcagtctctaaaagcattcattaaaaattcagttcaggccgggcacggtggctcacacctgtaatcccaacactttgggaggccgaggcaggtggatcacctgaggttaggagttcgagaccagcctggccaacatggtgaaacccggtctctactaaaaatataaaaattagctgggcatggtggtgggtgcctgtaatcccagctaacttgggaggctgaggcaggagaatcgcttgaacccaggaggcggaggttgcagtcactcaggatcatgcagctacactccagcctgggcgacaagagtgaaactccatctcaaaaagaaaaaaaaaaaaaatcagtttatttgaaagacagtatatcagaaagaaagaagcaatagagaactagtattgttctttatgggttagactttacataatattagttgtcctgatgtcaatgttactgctttcaattaatttttctactttcccagaatagcatctatattccttttaattttgagggtttaaaaaaaaatgcagtgtatgtcaaatttacagtttagtaccaagccagtagatgtcagtatgatgccttaaattaagtcttctttaattaaagatatttttttaaatt

SEQ ID NO: 460686 - DNA, 2833 bp, Homo sapiens
agcctgcgacagagcaagactctgtctcaaaaaaaaaaaaaaaaagaaaagaaaactttgatcttatatggcccaacaggaatggatcatgatggaggcagaaaaagatgaagaagagaaggatgatggtgaagctaaagaaatttctacacctacccattggtctaaacttgatccaaagacaatgaaggtaaatgacctccgaaaagaattagaaagtcgagctcttagttccaaaggattaaaatcccagttaatagcccgattgacaaaacagcttaaagtagaggaacaaaaagaagaacagaaggagttagagaaatctgaaaaagaagaggatgaggatgatgataggaaatctgaagacgataaagaggaagaagaaaggaaacgtcaagaggaaatagaacgccagcgtcgagaaagaagatatattttgcctgatgaaccggccatcattgtacatccaaattgggctgcaaaaagtggcaagtttgattgtagcatcatgtctttgagtgtcctattggactacagattagaggataataaagaacattcatttgaggtttcattgtttgcggaacttttcaacgaaatgcttcaaagagattttggtgtccgtatatacaaatcattactgtctcttcctgagaaagaggacaaaaaagaaaaggataaaaaaagcaaaaaagatgagagaaaagataaaaaagaagaaagagatgatgaaactgatgaaccaaaacccaaacggagaaaatcaggcgatgataaagataaaaaagaagatagagatgaaaggaagaaagaagataaaagaaaagatgattctaaagatgatgatgaaactgaagaagataacaatcaagatgaatatgaccctatggaagcagaagaagctgaggatgaagaagatgatagggatgaggaagaaatgaccaaacgagatgacaaaagagatatcaacagatactgcaaggagaggccctctaaagataaggaaaaagaaaagactcaaatgatcacaattaacagagatctgttaatggcttttgtttattttgatcaaagtcattgtggttaccttcttgaaaaggatttggaagaaatactttatactcttggactacatctttctcgggctcaggtaaagaagcttcttaataaagtagtgctccgtgaatcttgcttttaccggaaattaacagacacctcaaaagatgaagagaaccatgaagagtctgagtcattgcaggaagatatgctaggaaacagattattacttccaacaccaacagtaaagcaggaatcaaaggatgtggaagaaaatgttggcctcattgtgtacaatggtgcaatggtagatgtaggaagcctcttgcaaaaattggaaaagagcgaaaaagtaagagctgaggtagaacagaagctgcagttactagaagaaaaaacagatgaagatgaaaaaaccatattaaatttggagaattccaacaaaagcctctctggtgaactcagagaagttaaaaaggaccttagtcagttacaagaaaacttaaagatttcggaaaacatgaatttacaatttgaaaaccaaatgaataagacaatcagaaacttatctacggtaatggatgaaatccacactgttctcaagaaggataatgtaaagaatgaagacaaagatcaaaaatccaaggagaatggtgccagtgtatgataaaatccatgtagtgatgaggaatggtgttaaataatgtaatatataaaaatcatgatataagaatgtttgaaggtgatgcatgtttgattttagtagtataaatgtattttagttcaaatgatgtataaagttttatgaatgtgagtttctgcttttgaaaattgcttgtaattcctagccttcaaattattaaacactccttgagtgaaataattttgcattgcaaagtgttttaggatgaactttgttatagttttaactccaataaagttcatcagtttaattgactgtagtatttaattaccaaatttcttttattaaaatgcctagaaatttttaatttatagaattattaggttttaaaatttttagttcatctgttaaaatttcagtcaaaatcataaaatagcatgatgcttaatttttgcaagttttttgaaactttttgttttttttactcatcaccaaaaaatcccctcttgatcagtctctaaaagcattcattaaaaattcagttcaggccgggcacggtggctcacacctgtaatcccaacactttgggaggccgaggcaggtggatcacctgaggttaggagttcgagaccagcctggccaacatggtgaaacccggtctctactaaaaatataaaaattagctgggcatggtggtgggtgcctgtaatcccagctaacttgggaggctgaggcaggagaatcgcttgaacccaggaggcggaggttgcagtcactcaggatcatgcagctacactccagcctgggcgacaagagtgaaactccatctcaaaaagaaaaaaaaaaaaaatcagtttatttgaaagacagtatatcagaaagaaagaagcaatagagaactagtattgttctttatgggttagactttacataatattagttgtcctgatgtcaatgttactgctttcaattaatttttctactttcccagaatagcatctatattccttttaattttgagggtttaaaaaaaaatgcagtgtatgtcaaatttacagtttagtaccaagccagtagatgtcagtatgatgccttaaattaagtcttctttaattaaagatatttttttaaatt

SEQ ID NO: 460687 - DNA, 2691 bp, Homo sapiens
tctagcaggatcccctgacttggacgcctgatcccaaagacaatgaaggtaaatgacctccgaaaagaattagaaagtcgagctcttagttccaaaggattaaaatcccagttaatagcccgattgacaaaacagcttaaagtagaggaacaaaaagaagaacagaaggagttagagaaatctgaaaaagaagaggatgaggatgatgataggaaatctgaagacgataaagaggaagaagaaaggaaacgtcaagaggaaatagaacgccagcgtcgagaaagaagatatattttgcctgatgaaccggccatcattgtacatccaaattgggctgcaaaaagtggcaagtttgattgtagcatcatgtctttgagtgtcctattggactacagattagaggataataaagaacattcatttgaggtttcattgtttgcggaacttttcaacgaaatgcttcaaagagattttggtgtccgtatatacaaatcattactgtctcttcctgagaaagaggacaaaaaagaaaaggataaaaaaagcaaaaaagatgagagaaaagataaaaaagaagaaagagatgatgaaactgatgaaccaaaacccaaacggagaaaatcaggcgatgataaagataaaaaagaagatagagatgaaaggaagaaagaagataaaagaaaagatgattctaaagatgatgatgaaactgaagaagataacaatcaagatgaatatgaccctatggaagcagaagaagctgaggatgaagaagatgatagggatgaggaagaaatgaccaaacgagatgacaaaagagatatcaacagatactgcaaggagaggccctctaaagataaggaaaaagaaaagactcaaatgatcacaattaacagagatctgttaatggcttttgtttattttgatcaaagtcattgtggttaccttcttgaaaaggatttggaagaaatactttatactcttggactacatctttctcgggctcaggtaaagaagcttcttaataaagtagtgctccgtgaatcttgcttttaccggaaattaacagacacctcaaaagatgaagagaaccatgaagagtctgagtcattgcaggaagatatgctaggaaacagattattacttccaacaccaacagtaaagcaggaatcaaaggatgtggaagaaaatgttggcctcattgtgtacaatggtgcaatggtagatgtaggaagcctcttgcaaaaattggaaaagagcgaaaaagtaagagctgaggtagaacagaagctgcagttactagaagaaaaaacagatgaagatgaaaaaaccatattaaatttggagaattccaacaaaagcctctctggtgaactcagagaagttaaaaaggaccttagtcagttacaagaaaacttaaagatttcggaaaacatgaatttacaatttgaaaaccaaatgaataagacaatcagaaacttatctacggtaatggatgaaatccacactgttctcaagaaggataatgtaaagaatgaagacaaagatcaaaaatccaaggagaatggtgccagtgtatgataaaatccatgtagtgatgaggaatggtgttaaataatgtaatatataaaaatcatgatataagaatgtttgaaggtgatgcatgtttgattttagtagtataaatgtattttagttcaaatgatgtataaagttttatgaatgtgagtttctgcttttgaaaattgcttgtaattcctagccttcaaattattaaacactccttgagtgaaataattttgcattgcaaagtgttttaggatgaactttgttatagttttaactccaataaagttcatcagtttaattgactgtagtatttaattaccaaatttcttttattaaaatgcctagaaatttttaatttatagaattattaggttttaaaatttttagttcatctgttaaaatttcagtcaaaatcataaaatagcatgatgcttaatttttgcaagttttttgaaactttttgttttttttactcatcaccaaaaaatcccctcttgatcagtctctaaaagcattcattaaaaattcagttcaggccgggcacggtggctcacacctgtaatcccaacactttgggaggccgaggcaggtggatcacctgaggttaggagttcgagaccagcctggccaacatggtgaaacccggtctctactaaaaatataaaaattagctgggcatggtggtgggtgcctgtaatcccagctaacttgggaggctgaggcaggagaatcgcttgaacccaggaggcggaggttgcagtcactcaggatcatgcagctacactccagcctgggcgacaagagtgaaactccatctcaaaaagaaaaaaaaaaaaaatcagtttatttgaaagacagtatatcagaaagaaagaagcaatagagaactagtattgttctttatgggttagactttacataatattagttgtcctgatgtcaatgttactgctttcaattaatttttctactttcccagaatagcatctatattccttttaattttgagggtttaaaaaaaaatgcagtgtatgtcaaatttacagtttagtaccaagccagtagatgtcagtatgatgccttaaattaagtcttctttaattaaagatatttttttaaatt

SEQ ID NO: 460688 - DNA, 3615 bp, Homo sapiens
tctggaatctcagttgacagtgttcccttcttcactttggagccctgagcgaaagggccaggcgtattgagcggtcaggggagcgcgcacgcagaacgtcagccagtaagcgccgttcctccgggagatgtggaggaggggggcggcgtggaggaagagggggaagttggcgcatgcgcctaaagctgacgggtttgaaatggcttcgatgttagccgggacccgactcagatcgatgctatagaagacaaacaagggaaggttttttttccttttgcatcatggctcaatttggaggacagaagaatccgccatgggctactcagtttacagccactgcagtatcacagccagctgcactgggtgttcaacagccatcactccttggagcatctcctaccatttatacacagcaaactgcattggcagcagcaggccttaccacacaaactccagcaaactatcagttaacacaaactgctgcattgcagcaacaagccgcagctgcagcagctgcattacaacagcaatattcacaacctcagcaggccctgtatagtgtgcaacaacagttacagcaaccccagcaaaccctcttaacacagccagctgttgcactgcctacaagccttagcctgtctactcctcagccaacagcacaaataactgtatcatatccaacaccaaggtccagtcaacagcaaacccagcctcagaagcagcgtgttttcacaggggtggttacaaaactacatgatacatttggatttgtggatgaagatgtattctttcagcttagtgctgtcaaagggaaaaccccccaagtaggtgacagagtattggttgaagctacttataatcctaatatgccttttaaatggaatgcacagagaattcaaacactaccaaatcagaatcagtcgcaaacccagccattactgaagactcctcctgctgtacttcagccaattgcaccacagacaacatttggtgttcagactcagccccagccccagtcactgctgcaggcacagatttcagcagcttctattacaccactattgcagactcaaccacagcccttattacagcagcctcagcaaaaagctggtttattgcagcctcctgttcgtatagtttcacagccacaaccggcacgacgattagatcccccatcccgattttcaggaagaaatgacagaggggatcaagtgcctaacagaaaagatgatcgaagtcgtgagagagagagagaaagacgtagatcgagagaaagatcacctcagaggaaacgttcccgggaaagatctccacgaagagagcgagagcgatcacctcggagagttcgacgtgttgttccacgttacacagttcagttttcaaagttttctttagattgtcccagttgtgacatgatggaactaaggcgccgttatcaaaatttgtatatacctagtgacttttttgatgctcaatttacatgggtggatgctttccctttgtcaagaccatttcagctgggaaattactgcaatttttatgtaatgcacagagaagtagagtccttagaaaaaaatatggccattcttgatccaccagatgctgaccacttatacagtgcaaaggtaatgctgatggctagccctagtatggaagatttatatcataagtcatgtgctcttgctgaggacccacaagaacttcgagatggattccaacatcctgctagacttgttaagtttttagtgggcatgaaaggcaaggatgaagctatggccattggaggccactggtctccttcgttggatggaccagacccagaaaaagatccctctgtgttgattaagactgctattcgttgttgtaaggctctgacaggcattgatctaagtgtgtgcacacaatggtaccgttttgcagagattcgctaccatcgccctgaggagacccacaaggggcgtacagttccagctcatgtggagacagtggttttatttttcccggatgtttggcattgccttcccacccgctcagagtgggaaaccctctcccgaggatacaagcagcagctggtcgagaagcttcagggtgaacgcaaggaggctgatggagaacaggcactgaacgctaatccctttttctatttccgcttctcacaggcacaggaacacaggcacaaatgcacaccacacactacataataaacacacatggaggaacataactggtaacagcgactggtaatccagctttcagcagtatagttgtatgttcttttctcttaaaatttctgtcttattatcctaactttaagagtgctgagacctcaaaggaaaataagttgtgcttaaattgcacagaattttgtttttatcataggtctagttgctggaatctgggaccagttgttgaacaagattcagtattaagccattttaaacattttgccattttctaaaatttaaaaaattttctttttcatggtcatcagttctagtcatggatatttgaaattggacaaccacaagtctgagagatttgaaatttcaggctatgtggcaacgtctttggtacatttcaaaggtctgactaaatcagtctttgggtggcttgaaaattgaggcaagatcacacactgtgtggtttgtggagaccggcagtgtttgtgcatccctgatatcctttgtgttgtaatttatcacccttttgtgtttcacagatctggctttgattggctgatgagtgtctttgtgatcagttaaaagtggtagaatgtatgtacgtggacttgcctaaataataactttaggagaagacaatctgaaacatttgtgaccttgcacagatcagcaacagacttttaaaaataaattatttttattttaaggtttcataatagtaattacattcttaactttgtatgtcaggatgaagaagagaaggatgatggtgaagctaaagaaatttctacacctacccattggtctaaacttgatccaaagacaatgaaggtaactttgataaggatggattttatttatttttttcaattaaaaagttctttctgagacagagtttggctctgtcgcccaggctggagtgtagtggcgcgatctcggctcacttcagcctctgcctcctgggttcagtagattctcttgcctcagcctcctgagtagctgggattacaggcaccctgccaccacgcctggctaatttttctagttttagtagagacaaggtttcagaatgttggccagtttggtctcgaactcctgacatcaggtgatccacctgcctcagtctcccaaagtgctgggattacaggcatgagctgccgtgcctggccaattgtatttatatacatataaattaaaaggcaattttataaatcagtacagccaatatctgttgaatgcctataatatatgagggtctatagtgtaactatagtaactttgagaactaagaaggtaggatttctgcactaagtaacttcagcctcctgagtagctgcgaccgcgggcatgcaccaccatgtcctagcttttttttttttttgggatattaaaggggaaaacaggcctccccccaggccccccaggctggctctca

SEQ ID NO: 460689 - DNA, 1790 bp, Homo sapiens
tgcggtgactctgcaggatctcgatcacgtgtcattgtggttaccttcttgaaaaggatttggaagaaatactttatactcttggactacatctttctcgggctcaggtaaagaagcttcttaataaagtagtgctccgtgaatcttgcttttaccggaaattaacagacacctcaaaagatgaagagaaccatgaagagtctgagtcattgcaggaagatatgctaggaaacagattattacttccaacaccaacagtaaagcaggaatcaaaggatgtggaagaaaatgttggcctcattgtgtacaatggtgcaatggtagatgtaggaagcctcttgcaaaaattggaaaagagcgaaaaagtaagagctgaggtagaacagaagctgcagttactagaagaaaaaacagatgaagatgaaaaaaccatattaaatttggagaattccaacaaaagcctctctggtgaactcagagaagttaaaaaggaccttagtcagttacaagaaaacttaaagatttcggaaaacatgaatttacaatttgaaaaccaaatgaataagacaatcagaaacttatctacggtaatggatgaaatccacactgttctcaagaaggataatgtaaagaatgaagacaaagatcaaaaatccaaggagaatggtgccagtgtatgataaaatccatgtagtgatgaggaatggtgttaaataatgtaatatataaaaatcatgatataagaatgtttgaaggtgatgcatgtttgattttagtagtataaatgtattttagttcaaatgatgtataaagttttatgaatgtgagtttctgcttttgaaaattgcttgtaattcctagccttcaaattattaaacactccttgagtgaaataattttgcattgcaaagtgttttaggatgaactttgttatagttttaactccaataaagttcatcagtttaattgactgtagtatttaattaccaaatttcttttattaaaatgcctagaaatttttaatttatagaattattaggttttaaaatttttagttcatctgttaaaatttcagtcaaaatcataaaatagcatgatgcttaatttttgcaagttttttgaaactttttgttttttttactcatcaccaaaaaatcccctcttgatcagtctctaaaagcattcattaaaaattcagttcaggccgggcacggtggctcacacctgtaatcccaacactttgggaggccgaggcaggtggatcacctgaggttaggagttcgagaccagcctggccaacatggtgaaacccggtctctactaaaaatataaaaattagctgggcatggtggtgggtgcctgtaatcccagctaacttgggaggctgaggcaggagaatcgcttgaacccaggaggcggaggttgcagtcactcaggatcatgcagctacactccagcctgggcgacaagagtgaaactccatctcaaaaagaaaaaaaaaaaaaatcagtttatttgaaagacagtatatcagaaagaaagaagcaatagagaactagtattgttctttatgggttagactttacataatattagttgtcctgatgtcaatgttactgctttcaattaatttttctactttcccagaatagcatctatattccttttaattttgagggtttaaaaaaaaatgcagtgtatgtcaaatttacagtttagtaccaagccagtagatgtcagtatgatgccttaaattaagtcttctttaattaaagatatttttttaaatt

SEQ ID NO: 460690 - DNA, 1721 bp, Homo sapiens
aggattcactcctacgagcgcatctttctcgggctcaggtaaagaagcttcttaataaagtagtgctccgtgaatcttgcttttaccggaaattaacagacacctcaaaagatgaagagaaccatgaagagtctgagtcattgcaggaagatatgctaggaaacagattattacttccaacaccaacagtaaagcaggaatcaaaggatgtggaagaaaatgttggcctcattgtgtacaatggtgcaatggtagatgtaggaagcctcttgcaaaaattggaaaagagcgaaaaagtaagagctgaggtagaacagaagctgcagttactagaagaaaaaacagatgaagatgaaaaaaccatattaaatttggagaattccaacaaaagcctctctggtgaactcagagaagttaaaaaggaccttagtcagttacaagaaaacttaaagatttcggaaaacatgaatttacaatttgaaaaccaaatgaataagacaatcagaaacttatctacggtaatggatgaaatccacactgttctcaagaaggataatgtaaagaatgaagacaaagatcaaaaatccaaggagaatggtgccagtgtatgataaaatccatgtagtgatgaggaatggtgttaaataatgtaatatataaaaatcatgatataagaatgtttgaaggtgatgcatgtttgattttagtagtataaatgtattttagttcaaatgatgtataaagttttatgaatgtgagtttctgcttttgaaaattgcttgtaattcctagccttcaaattattaaacactccttgagtgaaataattttgcattgcaaagtgttttaggatgaactttgttatagttttaactccaataaagttcatcagtttaattgactgtagtatttaattaccaaatttcttttattaaaatgcctagaaatttttaatttatagaattattaggttttaaaatttttagttcatctgttaaaatttcagtcaaaatcataaaatagcatgatgcttaatttttgcaagttttttgaaactttttgttttttttactcatcaccaaaaaatcccctcttgatcagtctctaaaagcattcattaaaaattcagttcaggccgggcacggtggctcacacctgtaatcccaacactttgggaggccgaggcaggtggatcacctgaggttaggagttcgagaccagcctggccaacatggtgaaacccggtctctactaaaaatataaaaattagctgggcatggtggtgggtgcctgtaatcccagctaacttgggaggctgaggcaggagaatcgcttgaacccaggaggcggaggttgcagtcactcaggatcatgcagctacactccagcctgggcgacaagagtgaaactccatctcaaaaagaaaaaaaaaaaaaatcagtttatttgaaagacagtatatcagaaagaaagaagcaatagagaactagtattgttctttatgggttagactttacataatattagttgtcctgatgtcaatgttactgctttcaattaatttttctactttcccagaatagcatctatattccttttaattttgagggtttaaaaaaaaatgcagtgtatgtcaaatttacagtttagtaccaagccagtagatgtcagtatgatgccttaaattaagtcttctttaattaaagatatttttttaaatt

SEQ ID NO: 460691 - DNA, 1562 bp, Homo sapiens
tgccggccatgggggaagggggcgccgcggcggcgctggtggcggcggcagcagcagcagcagcggcagcggcagcggtggtggccgggcagcggcggcggcggctagggcgcagggcgcgctgccatgggcctggccgggctgcaggcgggaagatgtccaagccctgcgcggtggaggcggcggcggcggcggtggcagcgacggccccgggcccggagatggtggagcggaggggcccggggaggccccgcaccgacggggagaacgtatttaccgggcagtcaaagatctattcctacatgagcccgaacaaatgctctggaatgcgtttcccccttcaggaagataactcagttacacatcacgaagtcaaatgccaggggaaaccattagccggaatctacaggaaacgagaagagaaaagaaatgctgggaacgcagtacggagcgccatgaagtccgaggaacagaagatcaaagacgccaggaaaggtcccctggtaccttttccaaaccaaaaatctgaagcagcagaacctccaaaaactccaccctcatcttgtgattccaccaatgcagccatcgccaagcaagccctgaaaaagcccatcaagggcaaacaggccccccgaaaaaaagctcaaggaaaaacgcaacagaatcgcaaacttacggatttctaccctatgaattgattgaaagtgggaaggaagaaggaatgaagattgacctcatcgatggcaaaggcaggggtgtgattgccaccaagcagttctcccggggtgactttgtggtggaataccacggggacctcatcgagatcaccgacgccaagaaacgggaggctctgtacgcacaggacccttccacgggctgctacatgtactattttcagtatctgagcaaaacctactgcgtggatgcaactagagagacaaatcgcctaggaagactgatcaatcacagcaaacgtgggaactgccaaaccaaactgcacgacatcgacggcgtacctcacctcatcctcatcgcctcccgagacatcgcggctggggaggagcccctgtatgactatggggaccgcagcaaggcttccattgaagcccacccatggctgaagcattaaccggtgggccccgcgccctccccgccccactttcccttcttcaaaggacaaagtgccctcaaagggaattgaatttttttttacacacttaatcttagcggattacttcagatgtttttaaaaagtatattaagatgccttttcactgtagtatttaaatatctgttacaggtttccaaggtggacttgaacagatggccttatattaccaaaacttttatattctagttgtttttgtactttttttgcatacaagccgaacgtttgtgcttcccgtgcatgcagtcaaagactcagcacaggttttagaggaaatagtcaaacatgaactaggaagctaggtgagtctcctttctccagtggaagagccgggaccttccccctgcacccccgaaatccagggacggggtgtgaggaagatgctgcctcccag

SEQ ID NO: 460692 - DNA, 894 bp, Homo sapiens
aagtgttgctgaggtgactctatgaattgattgaaagtgggaaggaagaaggaatgaagattgacctcatcgatggcaaaggcaggggtgtgattgccaccaagcagttctcccggggtgactttgtggtggaataccacggggacctcatcgagatcaccgacgccaagaaacgggaggctctgtacgcacaggacccttccacgggctgctacatgtactattttcagtatctgagcaaaacctactgcgtggatgcaactagagagacaaatcgcctaggaagactgatcaatcacagcaaacgtgggaactgccaaaccaaactgcacgacatcgacggcgtacctcacctcatcctcatcgcctcccgagacatcgcggctggggaggagcccctgtatgactatggggaccgcagcaaggcttccattgaagcccacccatggctgaagcattaaccggtgggccccgcgccctccccgccccactttcccttcttcaaaggacaaagtgccctcaaagggaattgaatttttttttacacacttaatcttagcggattacttcagatgtttttaaaaagtatattaagatgccttttcactgtagtatttaaatatctgttacaggtttccaaggtggacttgaacagatggccttatattaccaaaacttttatattctagttgtttttgtactttttttgcatacaagccgaacgtttgtgcttcccgtgcatgcagtcaaagactcagcacaggttttagaggaaatagtcaaacatgaactaggaagctaggtgagtctcctttctccagtggaagagccgggaccttccccctgcacccccgaaatccagggacggggtgtgaggaagatgctgcctcccag

SEQ ID NO: 460693 - DNA, 1623 bp, Homo sapiens
tgccggccatgggggaagggggcgccgcggcggcgctggtggcggcggcagcagcagcagcagcggcagcggcagcggtggtggccgggcagcggcggcggcggctagggcgcagggcgcgctgccatgggcctggccgggctgcaggcgggaagatgtccaagccctgcgcggtggaggcggcggcggcggcggtggcagcgacggccccgggcccggagatggtggagcggaggggcccggggaggccccgcaccgacggggagaacgtatttaccgggcagtcaaagatctattcctacatgagcccgaacaaatgctctggaatgcgtttcccccttcaggaagataactcagttacacatcacgaagtcaaatgccaggggaaaccattagccggaatctacaggaaacgagaagagaaaagaaatgctgggaacgcagtacggagcgccatgaagtccgaggaacagaagatcaaagacgccaggaaaggtcccctggtaccttttccaaaccaaaaatctgaagcagcagaacctccaaaaactccaccctcatcttgtgattccaccaatgcagccatcgccaagcaagccctgaaaaagcccatcaagggcaaacaggccccccgaaaaaaagctcaaggaaaaacgcaacagaatcgcaaacttacggatttctaccctgtccgaaggagctccaggaagagcaaagccgagctgcagtctgaagaaaggaaaagaatagatgaattgattgaaagtgggaaggaagaaggaatgaagattgacctcatcgatggcaaaggcaggggtgtgattgccaccaagcagttctcccggggtgactttgtggtggaataccacggggacctcatcgagatcaccgacgccaagaaacgggaggctctgtacgcacaggacccttccacgggctgctacatgtactattttcagtatctgagcaaaacctactgcgtggatgcaactagagagacaaatcgcctaggaagactgatcaatcacagcaaacgtgggaactgccaaaccaaactgcacgacatcgacggcgtacctcacctcatcctcatcgcctcccgagacatcgcggctggggaggagcccctgtatgactatggggaccgcagcaaggcttccattgaagcccacccatggctgaagcattaaccggtgggccccgcgccctccccgccccactttcccttcttcaaaggacaaagtgccctcaaagggaattgaatttttttttacacacttaatcttagcggattacttcagatgtttttaaaaagtatattaagatgccttttcactgtagtatttaaatatctgttacaggtttccaaggtggacttgaacagatggccttatattaccaaaacttttatattctagttgtttttgtactttttttgcatacaagccgaacgtttgtgcttcccgtgcatgcagtcaaagactcagcacaggttttagaggaaatagtcaaacatgaactaggaagctaggtgagtctcctttctccagtggaagagccgggaccttccccctgcacccccgaaatccagggacggggtgtgaggaagatgctgcctcccag

SEQ ID NO: 460694 - DNA, 1036 bp, Homo sapiens
ttttactcagccatctctagaatgtcatatggtctcccttcaactggaataacaggggctaaaagaaatggcggtcattgttttggactaaggtcatgcactaggccccaacaaaccaaaccaaaccaaaatggagttgcttgtgctaagactttaaggaaacacatagattctagaacagaccaggttttgttttttctcttgcaaatctctataatgaaaatttctaagagcggaggtatctgccccctgaagttcccattaaatcttttaaccaaattcatttcctcttgcctagagaccttcaagcttcagataatcatgcaacaaaggttccagccaattccaggtgaagacaccgccccaatgccatcaagaaactactccacctccactagacagaacaggatgccaagaacctggacaccctccaccattaacaatgcctgtaataccagcactttgggaggctgaggtgagtggatcgtgtgagcccaggagttccagaccagcctggacaacatggcaaaccccatctctacaaaaagtacaaaaattagctgggcatggtggtgcatgtctgtagtctcagctactcagaaggctgaagcaagaggatcacctgagccagggaggttgaggctgcagtgagctgaaatcatgccattgtgctccagaatggacaatggagtgagaccctgtctcaaaaagaaacaaacaaataaaagcaaataaaataattgagatcatataaaccatgttctgtgaccataattgagtcaaattaaaatcaagaacaggataacaagaaatcctccaataacttggaaattaaacatctgattactaaacaatcaatgagtcattaaatactttctgaaatttgtattaagtatctttgtctaacactgagatgacaggtataggcgggcaagaacagtggataagcccttctctactctggcctcctgctgggatggttggggacaatgctctttcacttcctagagggcctctggttttttgagaggaccag

SEQ ID NO: 460695 - DNA, 2536 bp, Homo sapiens
tgcaggcatggagattctgggctccagccacactttcagctccagggctgaggccgcgctgtccctggagggggctttgaccctggtgctagcactggctcaacagctggcactggaaatagctgtatttctgcacctgaagcaggaattgaaaaaggagagaggtgacctcagcatgtgcctgtgtctcaatgagctccagaggctccagctggacaaggacaatgtgcggatgtggccctggtgggatcactggtcaactccttacctgtacacagttatgtccacccagggcctgcttggacacctgcacctgatgttcaccagaggcctaggaatccacttggggcctgggaacctacaggggcctaatgttaccctgcagattggctgtggcctgatgacctactgcatcctgttgctcacctatggcctggtgtctacctggggcttggtgatcacctgggagctggatatcaacctggggcctggattcctcgtagacatctggtgccaggtggatatctggctgcaggaggacatcaggccccaggtggagacccagtacacaggtggacaacaggtgccaggaggacaccaggacccagttggtcatcaagccacagctgaacaccagttccccatgaacaccagtcctcaggtggatactgaactagaggtttacatcagaccccagattgacattcagtccccaggtggtcatgacacctcaattggacaccaagtcctcaggttgataaccaagtcccaggtggacactacgtcaaagatgaacacaagacctaaggttgtcattcaagccccaaatggacaccaggccctagaggacatctgtccccaggttgacatcactctcaaggtgtacattaggccacagatgtacacccaggtccaaggcagacacgagtccccagtaaaactcaaggccccaggaggatactcaagccctaggtggatgcccagaccccaggtgaacatcaagcttcaggtggacatcatgcctcaggtgaacttccgggtcccagcccagctgaacatcaggctgcaggtggacatcaggtcaaaggtgaacatcagtactcaggtggacatcaggctccaggttgacatcaagcccaaggtggacactgaactagaggtttacatcaggccccaggttgacacccaggctcaggtggacattgggccccaggtggacatcaggcctaatgtggacacccaggatcaagatggacatcaggactcaggtggacatctggtgacaggtggacaacaagcctggtgtgtaccttgtccccgggtggtcatcaggccccagttcaacaccagtccctgggtggattcctcggctccaggtggacatccggtcttcagctgaacatcagaccccaggtgaacaccaggttttaggtggacattaggcccctggtggacataaagtaccagtggacatccatgctgcaggtggacacccagcgcccagatgggcatcaggccccatttggacattgaggccccaggtggatatcaggcctcaggtgaacccaaggtccaacatagacatcaggccttaggttgacactcaagcaccagatggactgctgcacctaagcagaaaatagacccctatctggatatctaagatacaggccacaggtgaacactgaactctagaaggtcttcaggccctgtgttgactacctggccccagggggacaccaggcatagatgaacttcaggcaccagctgtacatcaggttccaggcaaatgtcccagccccaggtggatatcaaacctcagatgaacaccaggccccaggtgcctcaccttcccttcatgggctttctgcccgcctttgggtacccctagcgggcccgaggcccaccctggtttggagccagggatgctagtgtccctggggcccagcgcagcgctgatgggaagggacttttgtccgtggggaacccagggcccacttctccgaggtgcctcacctttccttcctcaaacctcaactgcccctcagagatttctgcccaccttggggtacccctagcaggcccgaggcgcacccgaggctcgaacagggtttccagcgtccacagggcccagcgcagggactgatgggaaggcattttcatccgtgggggacccaggcccagcttttcctaggcgcggcttgttgtttttttttttttctgccacaggttcctcacctttcctccctcaaacgtcaacttcccatcatgggctttctgcccgacttggggtacccctagcagcccaaggcgctccctggactcgaaccatggatgccagggtcgccggggcccagcacaggggctgatcggaaggtaccttcatccgtgggtacccaggccccgcttctcaaagctgcggttttttttctccaccccaggtgcctcaccttcccctcattggccttctgcctgctttggggtaacacgagcgggcccaaggcgctcccgggtctcgaaccagggtcgccaggtt

SEQ ID NO: 460696 - DNA, 1412 bp, Homo sapiens
cacagactagtcccttctgccttctgggcaggtcacatctgaaagattatcctctttgaatcagtttgaatgttctagtgaccaggccacacagtttctcttgacatttaaaaataaagcttccagtcttgtcactaatggatttggggtccagtacccttaaaatcacctcagagctgcctgaatccatagactacttgcagaatcactggttttacttggatcaagccatctgagaagatttttatatacctcaacatattaaaggtatgaaaagatcatgcagaaaaaaacctgttcagcttcatctcacatagtatttctgccacttatttcaccacagatactttgttaatatcttggaactcttgtttttagaaaaaagcattggaaatggaggagactgtcaaggacaataataaatgatgaaaactgatcatcaaactccattccacaccagtttgttttcccctctcgcactctctttgtgtaatagaatctgttcccacaggtttggggaatataaaagaagcctacaatcccccagccccccttcccttttccctcctaatgccccagagcagctagtagggtttattgctcttccccaacattggctcctttctatacatggagtaagattgatgatcctcattctaaaatgtgaagatccagcatgcgcctttgtcctatgtcccttgagagtgaattggcataagcagcactcggtaaagaggcagcactttttggtacatcaggatttggctgaaataaaaactcaaagcccccacaatattgaaccaccattccagacccagccaaggtttggaacataaagtgagctgaatgaatcagcctgcaggcaacccagagaaagtaattgttcatcctagcagcacggctgcttttctgcttagcatctgaacaagttaatttggaaacacagccttctggaaagaaatggcgcttctctcagcatcccatggattcatgagctccttgaatgcaaatattgcctgatattttcatgattcaaagctcttggagagcggaaaccatgatgaatactcctttatttattccatgtaacactccagacaagagtgagggagaatgggagaaacaagaaatgattacattattgtggatacttttattcaccacaatggaagtctttaaacataaagttgatgtacattaagaggcaagacccagggcatatcatctaaagaagattcctcccacttttcttctgcttacaccaatccatccaaccatacatgaatttatattcaatgtactcaatttattcagtgtataatattgctttgtgaactatgggaaatataaatatgactcagtttttcccctcaaataactgacatgctacttgagcagataacatatttaag

SEQ ID NO: 460697 - DNA, 1339 bp, Homo sapiens
cacagactagtcccttctgccttctgggcaggtcacatctgaaagattatcctctttgaatcagtttgaatgttctagtgaccaggccacacagtttctcttgacatttaaaaataaagcttccagtcttgtcactaatggatttggggtccagtacccttaaaatcacctcagagctgcctgaatccatagactacttgcagaatcactggttttacttggatcaagccatctgagaagatttttatatacctcaacatattaaaggtatgaaaagatcatgcagaaaaaaacctgttcagcttcatctcacatagtatttctgccacttatttcaccacagatactttgttaatatcttggaactcttgtttttagaaaaaagcattggaaatggaggagactgtcaaggacaataataaatgatgaaaactgatcatcaaactccattccacaccagtttgttttcccctctcgcactctctttgtgtaatagaatctgttcccacaggtttggggaatataaaagaagcctacaatcccccagccccccttcccttttccctcctaatgccccagagcagctagtagggtttattgctcttccccaacattggctcctttctatacatggagtaagattgatgatcctcattctaaaatgtgaagatccagcatgcgcctttgtcctatgtcccttgagagtgaattggcataagcagcactcggtaaagaggcagcactttttggtacatcaggatttggctgaaataaaaactcaaagcccccacaatattgaaccaccattccagacccagccaaggtttggaacataaagtgagctgaatgaatcagcctgcaggcaacccagagaaagtaattgttcatcctagcagcacggctgcttttctgcttagcatctgaacaagttaatttggaaacacagccttctggaaagaaatggcgcttctctcagcatcccatggattcatgagctccttgaatgcaaatattgcctgatattttcatggtgagggagaatgggagaaacaagaaatgattacattattgtggatacttttattcaccacaatggaagtctttaaacataaagttgatgtacattaagaggcaagacccagggcatatcatctaaagaagattcctcccacttttcttctgcttacaccaatccatccaaccatacatgaatttatattcaatgtactcaatttattcagtgtataatattgctttgtgaactatgggaaatataaatatgactcagtttttcccctcaaataactgacatgctacttgagcagataacatatttaag

SEQ ID NO: 460698 - DNA, 1971 bp, Homo sapiens
gggaagctctcttttacgttccccagcaccatccttcctggcatggttcactcatttgttagatgtttaccgagtgccctgggggcatctgcattgcccaagattgccttcactccaagctcactaccagccttttctctacagtctctaacgaagtgccggagcacccatgtgtatcccctgtctctaatcatgtttatgagcggcggctcatcgagaagtacattgcggagaatggtaccgaccccatcaacaaccagcctctctccgaggagcagctcatcgacatcaaagttgctcacccaatccggcccaagcctccctcagccaccagcatcccggccattctgaaagctttgcaggatgagtgggatgcagtcatgctgcacagcttcactctgcgccagcagctgcagacaacccgccaagagctgtcacacgctctgtaccagcacgatgccgcctgccgtgtcattgcccgtctcaccaaggaagtcactgctgcccgagaaggtgcagcctctcccctgccatcccccaccctgggctggttctgcattggtgcgggtgagccaatggatttgggtgagctggtgggaatgaccccagagattattcagaagcttcaagacaaagccactgtgctaaccacggagcgcaagaagagagggaagactgtgcctgaggagctggtgaagccagaagagctcagcaaataccggcaggtggcatcccacgtggggttgcacagtgccagcattcctgggatcctggccctggacctctgcccgtccgacaccaacaagatcctcactggtggggcggataaaaatgtcgttgtgtttgacaaaagttctgaacaaatcctggctaccctcaaaggccataccaagaaggtcaccagcgtggtgtttcacccttcccaggacctggtgttttctgcttcccccgatgccactatcaggatttggtcggtccccaatgcctcttgtgtacaggtggttcgggcccatgagagtgctgtgacaggcctcagccttcatgccactggcgactatctcctgagctcctccgatgatcagtactgggctttctctgacatccagacagggcgtgtgctcaccaaggtgacagatgagacctccggctgctctctcacctgtgcacagttccaccctgacggactcatctttggaacaggaaccatggactctcagatcaagatctgggacttgaaggaacgtactaatgtggccaacttccctggccactcgggccccatcactagcatcgccttctctgagaatggttactacctggctacagcggctgatgactcctctgtcaagctctgggatctgcgcaagcttaagaactttaagactttgcagctggataacaactttgaggtaaagtcactgatctttgaccagagtggtacctacctggctcttgggggcacggatgtccagatctacatctgcaaacaatggacggagattcttcactttacaggtagaggctggtcctgggctcctgggatctctctaggtgcccaggcccggagggaagcctcactgggttaggaatttctagggcttgcatgaatttacctaagcagctttctgttaccacctgaggcagagctttatgactaaggaagcaactgagtcagactgcatggcagtagatgctagtgcttgttctgccacttccatgccctgtggcattgggcaggttactaaagggagagaaaagtccctctgaagttttgataactgaatctaaaataaatgaacattagacagtgacaggaggagagccattttaattacgtgcatatgcacgggaggcccacattatattagatctgcagaagggtcagatgattgaagcttatacagtttatatatcacttaataatggggatatgttctgagaaatgtcttgttaggtgatatcgtcatgtgc

SEQ ID NO: 460699 - DNA, 1999 bp, Homo sapiens
  misc_feature (1614)..(1614): n is a, c, g, or t
  misc_feature (1624)..(1624): n is a, c, g, or t
  misc_feature (1671)..(1671): n is a, c, g, or t
  misc_feature (1685)..(1685): n is a, c, g, or t
  misc_feature (1691)..(1691): n is a, c, g, or t
  misc_feature (1708)..(1709): n is a, c, g, or t
  misc_feature (1719)..(1719): n is a, c, g, or t
  misc_feature (1723)..(1724): n is a, c, g, or t
  misc_feature (1882)..(1882): n is a, c, g, or t
  misc_feature (1998)..(1998): n is a, c, g, or t
gggaagctctcttttacgttccccagcaccatccttcctggcatggttcactcatttgttagatgtttaccgagtgccctgggggcatctgcattgcccaagattgccttcactccaagctcactaccagccttttctctacagtctctaacgaagtgccggagcacccatgtgtatcccctgtctctaatcatgtttatgagcggcggctcatcgagaagtacattgcggagaatggtaccgaccccatcaacaaccagcctctctccgaggagcagctcatcgacatcaaagttgctcacccaatccggcccaagcctccctcagccaccagcatcccggccattctgaaagctttgcaggatgagtgggatgcagtcatgctgcacagcttcactctgcgccagcagctgcagacaacccgccaagagctgtcacacgctctgtaccagcacgatgccgcctgccgtgtcattgcccgtctcaccaaggaagtcactgctgcccgagaaggtgcagcctctcccctgccatcccccaccctgggctggttctgcattggtgcgggtgagccaatggatttgggtgagctggtgggaatgaccccagagattattcagaagcttcaagacaaagccactgtgctaaccacggagcgcaagaagagagggaagactgtgcctgaggagctggtgaagccagaagagctcagcaaataccggcaggtggcatcccacgtggggttgcacagtgccagcattcctgggatcctggccctggacctctgcccgtccgacaccaacaagatcctcactggtggggcggataaaaatgtcgttgtgtttgacaaaagttctgaacaaatcctggctaccctcaaaggccataccaagaaggtcaccagcgtggtgtttcacccttcccaggacctggtgttttctgcttcccccgatgccactatcaggatttggtcggtccccaatgcctcttgtgtacaggtggttcgggcccatgagagtgctgtgacaggcctcagccttcatgccactggcgactatctcctgagctcctccgatgatcagtactgggctttctctgacatccagacagggcgtgtgctcaccaaggtgacagatgagacctccggctgctctctcacctgtgcacagttccaccctgacggactcatctttggaacaggaaccatggactctcagatcaagatctgggacttgaaggaacgtactaatgtggccaacttccctggccactcgggccccatcactagcatcgccttctctgagaatggttactacctggctacagcggctgatgactcctctgtcaagctctgggatctgcgcaagcttaagaactttaagactttgcagctggataacaactttgaggtaaagtcactgatctttgaccagagtggtacctacctggctcttgggggcacggatgtccagatctacatctgcaaacaatggacggagattcttcactttacagagcatagcggcctgaccacaggggtggccttcgggcatcacgccaagttcatcgcttcaacaggcatggacagaagcctcaagttctacagcctgtagnccctggcccntctgatggaagctgggcctcatctcagtagaggggtagaattagggnctgggggggggccngggcgnacctatggggggagggnnccctgtgggncggnncattcacatcatttcactctggtctgagtggtggcctgagaaccatggtggcatggaccaccctcatccatgcaactccaggccccatgggaacggatgtggaaggaagaactgtcaccctcttaaggcccagggtcggagcccagggcctctccctncctgtcgttcaatggacgtggtggtggctgttccacacccattttgttgcagttcctgtgagacaggagaggctgagccaagggaactgtgaaggggatgggcaggaggggcttgng

SEQ ID NO: 460700 - DNA, 1367 bp, Homo sapiens
tacaataaaccacattcttttgtaaattgcccagtcttggatatgtctttatcagcagtgcaaaaggaaacttacacacttccatattttcagtcagctcaattagacccctgccttatctcaagaagagagggctttctgtatcccaggttcttgtcttggtgtaccggaagaattggatcacacgtgggcttggggaatgagtacaaggttttattgagtggaattagctctcagcagatgggggagccagaacggagatggttttcccctagagtcgagctgctcagcggcccgcgctctcctctgaccaccccagccaaactctgcgtcattccatgggtggatggcctgccggtgtgttggtgtgctcttccacaggtgtgctcccctcaacatctagccgcttgtgtcttcttcgttgatgtgttcctctcgatgtcaagcagctgtgtctttgcctgctagggtcttggggtttctgtaggcacaggatgggggcctggtgggccagggtggtcttggaaaatgcaatatttggtcatgaaggcaggagtgcttgtcctcacctagcctgggcaacagagcaagaaaaaggaaggaaggaagaaggaaggaaggagaaaggaaggaagaaggaaggagaaaggaaggaaggaagaaggaaggaaggagaaaggaaggaagaaggaaggaaggagaaaggaaggaagaaggaaggaaggagaaaggaaggaagaaggaaggaggaaggaaggaaggaaggaagcatgtacctctccatagggcaggaaacacatggcagctgggttcagcacagcaagcaagagagaatgtgtaagaaaatgctagcaagatgagagccatggtgttttggtaacctaaatacagtttgccttttgtgtttgtggattcctgtgtatggatttaatcaaccactaatcaacagtagagactccaaaaagcggtaaagaagaagggggacaaggactaaaaactacctactgggtattatgtttactatttggccggtgtgttcaatagaagtccaaaccccaggattacacaaaatattcatgtaacaaatccatacatatattccctgaatctaaaaatacatgtatatgttcaaaaaattgtgtctgtactgaatatgtacagattttttcttgtcattatttcctaaacaatacagtataacaactattaatacagtataacaactattaacaacagtataacaacaatacagtataacaactatttaatacagtatactgtattaaacaatacagtataacaactatattaagtttattataaataattatagattattatagtaatctaaaaattatttaaagcat

SEQ ID NO: 460701 - DNA, 1422 bp, Homo sapiens
tacaaccagtagagcagaggtatgcaggtgtccaagaatattctagctgtgaacattcagtgcgccatggacatcaatcagtgtcggcagggttggttccttctggaggttctgagggagaatctgttccatgcctccctcctagcttctaatggttgctggcactccttggctggtagacacatcacatcacatcaccttctgcccccatattccaatggagttctctcctctcctcggactatttttaagatcaaaatcatggcctttttaatcagatggagcagaggacagccaccccatgtgagggggccaggggccaaccgggctgctaacatgctgccatccatcgggctgtggatggcagaactaaaaaagctcatcagcacactaccaccccctctggggctttggggcagtggatatgaggatagaggagacactcctgaagacttcactttctccatttctgtacttgaatttttacaccaagcatacagcttgaaaaaattaaatgagtatgcagtattttaaaaatcaacaaaagcttcacattttaattttcacttgaaaaaaaaacatgagtggtactcagcagaacaacaactatatcgtataagctgcatcagagacaaatgaagatgaaaaaactatcctcctatataactaatctgtgctgtgccccaacaaagcctgctttaaatttccgtgccaattacaacccccattctgtatcaggcaaggaagactcctctacccttgattctggattggaaaggtcacaaggcttagattccacaggaggaggtgaagacatctgcagagtctgtactgcgagctgaagctttatttgcttgtcagatccccaaaaggtccaaatccagtctgcaccaaacaggaaggcttggtgcttggtcatcttggtggtggtcagccactcatcaactcccttttcttggcagaaagtgatgaaatggattaagaagatctcattcagagtatttgcagctgggcagagtttacttggaggatattcaaatccaaggtactccttcagtttctgagctgcatggactatagcttcactgaccacctcacagacgacgggcacctctttgctgtccttcagagccaactgttgcgatgctttctgccccattttctctgcatccaaatatcaaacatgtgaatctggttcagacgtacttctttttcaaagtaaaagttctgcagggaggccacatctgttaatggttcatgtttttctaactctacagcttcctcgggtgtagttaagcatatatacatacagctaaataaacatgttagttctctaaagaaaaaatgaaatcgggcgcacgaaaaaaggtttctctttctttctcccttgtcctcgagtgtctggttatataaaataatata

SEQ ID NO: 460702 - DNA, 1334 bp, Homo sapiens
acttttgagtgctagacttattatttcaaacagacactttttttttgcaaatcaaactttaaatgtgactttattatctctcttccatttttattattgaataagtgaatgaaatattaaactaaattataacttttcctgaactgtttttaaatcataggcagagccagggttttctttttttctctctctctctgtaattgcgacatgaatgtactttgatcccagtaatcattttcaatcaatgggaaaacaaatgaaaaaaaatcccatgctggaatgatgcaaataggtgagcttgcttattagaatctttttttcttttcctcttacaggccactcacataatacatatccaagtcagagaatgctgatataaaccttgcccacctctctcagcccgtctttcttactcagacaatttctgagcagctctttgatgaacacacaatcttcagtttccaggacaaactgagccacagccttccctcctggcagatggctcctcaccatctgacttttgacactgtccaggacaactcccctgatgtctttaggctttcctggcataccaaagatgataaacagacccaggcaatcctctcctattaagttacagaattcttccagcttatcaaatctacttttcttccaggaagactcctctacccttgattctggattggaaaggtcacaaggcttagattccacaggaggaggtgaagacatctgcagagtctgtactgcgagctgaagctttatttgcttgtcagatccccaaaaggtccaaatccagtctgcaccaaacaggaaggcttggtgcttggtcatcttggtggtggtcagccactcatcaactcccttttcttggcagaaagtgatgaaatggattaagaagatctcattcagagtatttgcagctgggcagagtttacttggaggatattcaaatccaaggtactccttcagtttctgagctgcatggactatagcttcactgaccacctcacagacgacgggcacctctttgctgtccttcagagccaactgttgcgatgctttctgccccattttctctgcatccaaatatcaaacatgtgaatctggttcagacgtacttctttttcaaagtaaaagttctgcagggaggccacatctgttaatggttcatgtttttctaactctacagcttcctcgggtgtagttaagcatatatacatacagctaaataaacatgttagttctctaaagaaaaaatgaaatcgggcgcacgaaaaaaggtttctctttctttctcccttgtcctcgagtgtctggttatataaaataatata

SEQ ID NO: 460703 - DNA, 1292 bp, Homo sapiens
ggaaacacgttggtctgcgcactcagagccgagtcaaatgtgcaggaagattcccccaaactgaaagaagtaatgaaaagaaaacaaaaaaaatccttaaaaatcgagtgaatcagttcgtagagaattgcagagtggtactcagcagaacaacaactatatcgtataagctgcatcagagacaaatgaagatgaaaaaactatcctcctatataactaatctgtgctgtgccccaacaaagcctgctttaaatttccgtgccaattacaacccccattctgtatcaggcaaggccactcacataatacatatccaagtcagagaatgctgatataaaccttgcccacctctctcagcccgtctttcttactcagacaatttctgagcagctctttgatgaacacacaatcttcagtttccaggacaaactgagccacagccttccctcctggcagatggctcctcaccatctgacttttgacactgtccaggacaactcccctgatgtctttaggctttcctggcataccaaagatgataaacagacccaggcaatcctctcctattaagttacagaattcttccagcttatcaaatctacttttcttccaggaagactcctctacccttgattctggattggaaaggtcacaaggcttagattccacaggaggaggtgaagacatctgcagagtctgtactgcgagctgaagctttatttgcttgtcagatccccaaaaggtccaaatccagtctgcaccaaacaggaaggcttggtgcttggtcatcttggtggtggtcagccactcatcaactcccttttcttggcagaaagtgatgaaatggattaagaagatctcattcagagtatttgcagctgggcagagtttacttggaggatattcaaatccaaggtactccttcagtttctgagctgcatggactatagcttcactgaccacctcacagacgacgggcacctctttgctgtccttcagagccaactgttgcgatgctttctgccccattttctctgcatccaaatatcaaacatgtgaatctggttcagacgtacttctttttcaaagtaaaagttctgcagggaggccacatctgttaatggttcatgtttttctaactctacagcttcctcgggtgtagttaagcatatatacatacagctaaataaacatgttagttctctaaagaaaaaatgaaatcgggcgcacgaaaaaaggtttctctttctttctcccttgtcctcgagtgtctggttatataaaataatata

SEQ ID NO: 460704 - DNA, 475 bp, Homo sapiens
  misc_feature (7)..(7): n is a, c, g, or t
cctcagnatcatcgcttgaactgtgcttttgaacgatctcataccatgagctcgagctagatacgactcactttacttggaggatattcaaatccaaggtactccttcagtttctgagctgcatggactatagcttcactgaccacctcacagacgacgggcacctctttgctgtccttcagagccaactgttgcgatgctttctgccccattttctctgcatccaaatatcaaacatgtgaatctggttcagacgtacttctttttcaaagtaaaagttctgcagggaggccacatctgttaatggttcatgtttttctaactctacagcttcctcgggtgtagttaagcatatatacatacagctaaataaacatgttagttctctaaagaaaaaatgaaatcgggcgcacgaaaaaaggtttctctttctttctcccttgtcctcgagtgtctggttatataaaataatata

SEQ ID NO: 460705 - DNA, 1230 bp, Homo sapiens
cggctctttataaactgtgagagggctgtgcatatgaggggctgttactaccactgctcattcattgggtgatgacatgcattttggtgatgtctaggtattttatgtgtctctgctacaggcagctcttcctctgcccccttcagctgaaattgtctaagaactcattcttggcgttcactgcaagctataagctctgcaagtggtgaccccgacgtgatcgccttgaagttacgcttgaaggaggaaaactcatcaattttcggggaatcccgcctttgtttcccaggctctctgagcacgatgtctgcagctcccgccagcaatggagtgtttgttgtcatcccgccaaacaacgccagtggcctctgcccacctccggccattctgcccacatccatgtgccaacctccagggattatgcagtttgaggagccaccgctgggggcacagacaccaagggccacacagccacctgacttgcggcccgtggagacattcctgacaggagagcccaaagttttggggacggtgcagatcctcatcggcctcatccacctaggctttggcagcgtgctgctcatggttcgccgcggccacgtgggcatcttcttcatcgagggcggcgtccccttctggggaggagcctgcttcatcatctccggatccctctcagtggcagccgagaagaaccacaccagttgcctggtgaggagcagcctgggcaccaacatcctcagcgtcatggcggcctttgctgggacagccattctgctcatggattttggtgttaccaaccgggatgtggacaggggctatctggccgtgcttactatcttcactgtcctggagttcttcacagcggtcattgccatgcacttcgggtgccaagccatccatgcccaggccagtgcacctgtgatcttcctgccaaacgccttcagcgcagacttcaacatccccagcccggcagcctctgcgccccctgcctatgacaatgtggcatatgcccaaggagtcgtctgagtagcagatgtggcacctgcgggtggagtccagccttttccctctgggcccagcctctccccacccccaccttgttcatcaggggccagccccatcccagctgccctccctcaccacatctacacatactccggcatctgagtgaagtgtccccagggacatctctcccacactttccccagtgctttctttctaaaagacacc

SEQ ID NO: 460706 - DNA, 943 bp, Homo sapiens
cggctctttataaactgtgagagggctgtgcatatgaggggctgttactaccactgctcattcattgggtgatgacatgcattttggtgatgtctaggtattttatgtgtctctgctacaggcagctcttcctctgcccccttcagctgaaattgtctaagaactcattcttggcgttcactgcaagctataagctctgcaagtggtgaccccgacgtgatcgccttgaagttacgcttgaaggaggaaaactcatcaattttcggggaatcccggctttggcagcgtgctgctcatggttcgccgcggccacgtgggcatcttcttcatcgagggcggcgtccccttctggggaggagcctgcttcatcatctccggatccctctcagtggcagccgagaagaaccacaccagttgcctggtgaggagcagcctgggcaccaacatcctcagcgtcatggcggcctttgctgggacagccattctgctcatggattttggtgttaccaaccgggatgtggacaggggctatctggccgtgcttactatcttcactgtcctggagttcttcacagcggtcattgccatgcacttcgggtgccaagccatccatgcccaggccagtgcacctgtgatcttcctgccaaacgccttcagcgcagacttcaacatccccagcccggcagcctctgcgccccctgcctatgacaatgtggcatatgcccaaggagtcgtctgagtagcagatgtggcacctgcgggtggagtccagccttttccctctgggcccagcctctccccacccccaccttgttcatcaggggccagccccatcccagctgccctccctcaccacatctacacatactccggcatctgagtgaagtgtccccagggacatctctcccacactttccccagtgctttctttctaaaagacacc

SEQ ID NO: 460707 - DNA, 1977 bp, Homo sapiens
gtgagtctgtctccgttcctgccagggctgcagaaaggggcctctctctgagtcgcggacttgggccctgcagtgagctctgaaggacgctgcctccctccttctaagtcgcagacgtgggccctgcagcgagctctgaaggacgctgcctccctcctgaagttgcagacgtgggccctgcagcgagctctgaaggacgctgcctccctcctactgaagtcgcagacgtgggccctgcagcgagctctgaaggacgctgcctccctcctgaagtcgcagacgtgggccctgcagcgagctctgaaggacgctgcctccctcctgaagtcgcagacgtgggccctgcagcgagctctgaaggacgctgcctccctctactgaagtcgcagacgtgggccctgcagcgagctctgaaggacgctgcctccctcctgaagtcgcagacgtgggccctgcagcgagctctgaaggacgctgcctccctcctgaagtcgcagacgtgggccctgcagcgagctctgaaggacgctgcctccctcctactgaagtcgcagacgtgggccctgcagcgagctctgaaggacgtgcccctccttcacagctgggcttctgtggccgttgttgatcccttcattccatcccttcattccatcccttcattccatccctctctgcttcaagcccagctctgctgtggttccccgaaggaatcatggcagtttgagatttgcgtttccagcacttctgctttaagccagactgcagaggctgacgcccttgggaatcataggtttcctccaccgaggaaactttcaccagaattgtggcctgagtggtggaaggctaaggttaaatataggtatatttgtgaagacggcagatagtggatgtccgctggctgagatggtgatctattctgagatctgggcgactgcggtggggcacggagagcaaccgctgcctggcggagactttgatgtgcggctgaggcctggcgaggaattttatcgtcaggcatcagctgagataggaacgctgtcagtcgagaattttcacattctagaatacgcattcaccccagacattgtcgtggaagttctccgaatcctggttttgattggtcagattcttttttcactagcggcggtttttcttttatgtcttgttataaagaagtatctcattggaccctattatcggaagctgcacatggaaagcaaggggaacaaagaaatcctgatcttgggaatatctgcctttatcttcttaatgttaacggtaattctcaaactatgtgttatttatgtaatctgatacataatctctttcactgaaatcttgtgatccattctttacctttccattttaataatggttaaaatatttgaaacatttactagtattttttattttatacacactttcttatactacccatcaaaatataatacagggagctaaacccgtttaactggtttgactcatactcttaagcactttgctaaaatagtgtttgtgagtatttcattaaaaacaaatccgtgggccgggtatagtggctcacacctgtagtcctagcatgtggggaagctgaggcaggagaatcacttgagctcagaagtttgggagcagccaggacaacagagtgagaacccctctgctacaaaaaatagaaaaaccagctggggcgtggtcgcgctcatgtatagaccagctgctggagagactgagctgggaggatggcttgagcccaggaggccaaggctgcagggagctgtggtcgcaccactgcactctagcctgggtgacagagcaagaccccatatcaaaaaaaaacggccgggcgtggtggctcacgcctgtcatcccagcactttgggaggctgaggcgggtggatcacaaggtcaggagatcgagaccatcctggctaacatgatgaaaccccgtctctactaaaagtacaaaaaaaattagct

SEQ ID NO: 460708 - DNA, 609 bp, Homo sapiens
ccttacacgactatgacacgcctatgtcgacctctcgtgtgacaacaaacacagtgtatcgcgttaaagacaagcaccccagccttggttgtaagtacgtgtcatcacactccccactcataaaaccaacaagatgccgaggagttgataccagtgccctagcatttccttgttcccttgctgggaagctgtgtagggatccttataagggttattccctagatgtctgggtgagctcgagggagaagctgagccctggcactactctctcctgcagcgtcactggtgtaccgcctgccccagtcgtgggtggggcccaaactgccctggaaactcctccatgcagccccgcacctgatggcttcgtcctcactgttgtggggctggttgctgtctttacgtttcacaaccatggaaggactgccaacctctactcccttcacagctggctgggcatcaccactgtcttcctcttcgcctgccagtggttcctgggctttgctgtcttcctcctgccctgggcgtccatgtggtgcgcagcctcctaaaacctatccacgtcttttttggagccgccatcctctctctgtccatcgcatccgtcatttc

SEQ ID NO: 460709 - DNA, 908 bp, Homo sapiens
agaaaggaggccatctaaaaaagcgattggtgttgaaaagttgctgctcccgtcctagcagcacaactcttcacttcatagtaatgggacgatgtgcattttgtaagcactttggagccactatcaaatgctgtgaagagaaatgtacccagatgtatcattatccttgtgctgcaggagccgacacctttcaggatttcagtcacatcttcctgctttgtccagaacacattgaccaagctcctgaaagatcgaaggaagatgcaaactgtgcagtgtgcgacagcccgggagacctcttagatcagttcttttgtactacttgtggtcagcactatcatggaatgtgcctggatatagcggttactccattaaaacgtgcaggttggcaatgtcctgagtgcaaagtgtgccagaactgcaaacaatcgggagaagatagcaagatgctagtgtgtgatacgtgtgacaaagggtatcatactttttgtcttcaacgaattatgaaatctgtaccaaccaacggctggaaatgcaaatgaataccgaattggaaaaacagatttctaatgaggctgatagtgaagaaatgaaaatgtcttctgaagtgaagcatatttgtggcgaagatcaaattgaagataaaatggaagtgacagaaaacattgaaaactcagtcttaataaaacttacatatttgaataaagtgtcatggccactgaaagcaagcatggaggtatagctgtacagcagaggtcttaaactgtatactccatggacctgactgtggcctgggggttggggacccctgctatagaggattcagatttaaattcagaagttagaatgaaaaagaattatattctttatctaaatgatttcacagttaactgagagaaagtcagtat

SEQ ID NO: 460710 - DNA, 704 bp, Homo sapiens
ctagaggatcccggttcactttctacactgaccaagctcctgaaagatcgaaggaagatgcaaactgtgcagtgtgcgacagcccgggagacctcttagatcagttcttttgtactacttgtggtcagcactatcatggaatgtgcctggatatagcggttactccattaaaacgtgcaggttggcaatgtcctgagtgcaaagtgtgccagaactgcaaacaatcgggagaagatagcaagatgctagtgtgtgatacgtgtgacaaagggtatcatactttttgtcttcaacgaattatgaaatctgtaccaaccaacggctggaaatgcaaatgaataccgaattggaaaaacagatttctaatgaggctgatagtgaagaaatgaaaatgtcttctgaagtgaagcatatttgtggcgaagatcaaattgaagataaaatggaagtgacagaaaacattgaaaactcagtcttaataaaacttacatatttgaataaagtgtcatggccactgaaagcaagcatggaggtatagctgtacagcagaggtcttaaactgtatactccatggacctgactgtggcctgggggttggggacccctgctatagaggattcagatttaaattcagaagttagaatgaaaaagaattatattctttatctaaatgatttcacagttaactgagagaaagtcagtat

SEQ ID NO: 460711 - DNA, 2856 bp, Homo sapiens
  misc_feature (1)..(2): n is a, c, g, or t
  misc_feature (8)..(8): n is a, c, g, or t
  misc_feature (12)..(12): n is a, c, g, or t
  misc_feature (14)..(18): n is a, c, g, or t
nngaagtngagntnnnnnagaaagttgggtgagttcagttccagggcttcggaggtaggcagggcataccaggacagggagccaagttctgagcagaaggaaccccccgaggaggctgagcctgtggcggcagctgagccagaggtccctgagaacaatggaaataactcgtggccccacaatgacacggagattgccaacagcacacccaacccgaagcctgcagccagcagcccggaaacaccctctgcagggcagcaagaggccaagacggaccaagcagatggacccagagagccaccgcagagtgccaggaggaagcgcagctacaagcaggccgtgagtgagctggacgaggagcagcacctggaggatgaggagctgcagccccccaggagcaagaccccttcctcaccctgcccagccagcaaggtggtacggcccctccggacctttctgcacacagtgcagaggaaccagatgctcatgaccccgacctcagccccacgcagcgtcatgaagtcctttattaagcgcaacactcccctgcgcatggaccccaaggagaaggagcggcagcgcctggagaatctgcggcggaaggaggaggccgagcagctgcgcaggcagaaggtggaggaggacaagcggcggcggctggaggaggtgaagctgaagcgtgaggaacgcctccgcaaggtgctgcaggcccgcgagcgggtggagcagatgaaggaggagaagaagaagcagattgagcagaagtttgctcagatcgacgagaagactgagaaggccaaggaggagcggctggcagaggagaaggccaagaaaaaggcggcggccaagaagatggaggaggtggaagcacgcaggaagcaggaagaggaggcacgtaggctcaggtggctgcagcaggaggaggaagagcggcggcaccaagagctgctgcagaagaagaaggaagaggagcaggagcggctgcggaaggcggccgaggctaagcggctggcagagcagcgggagcaggagcggcgggagcaggagcggcgcgagcaggagcggcgcgagcaggagcggcgggagcaggagcggcgcgagcaggagcgacagctggcagagcaggagcgtcggcgggagcaggagcggctccaggccgagaggtgagggacctgctggcccgcctgcctgccttccatgtgtgtggaagagagacggtgtgaaccttgcctggacacagccccacctgcatgtgacggtttgcaggtgctttccttggcaccaaacccagaggcccacctgaatacactgcccattggctatgggagatccaaggagctcttgctgggtcctcagggagctgcaggagcgggagaaggccctgcggctgcagaaggagcagctgcagagggaactggaggagaagaagaagaaggaagagcagcagcgtctggctgagcggcagctgcaggaggagcaagagaagaaagccaaggaggcagcaggggccagcaaggccctgaatgtgactgtggacatgactccgcaagggcacagggcccctcccaagatcaacccagataactacgggatggatctgaatagcgacgactccaccgatgatgaggcccatccccggaagcccatccccacctgggcccgaggcaccccgctcagccaggctatcattcaccagtactaccacccaccgaaccttctggagctctttggaaccattctcccactggacttggaggatatcttcaagaagagcaagccccgctatcacaagcgcaccagctctgctgtctggaactcaccgcccctgcagggcgccagggtccccagcagcctggcctacagcctgaagaagcactgaggctggcctgcggccttcttggcagcctcgcctcctgtccatgtctatctgtctgtctgtcggtctctgtcttggtctgttgccctccttcttggcatgccattgtggagggcttggccaggtgtatataaacgtcctctgtgctgggtgtttctgctgcaggtggcaggtggccccaggcctgtttggaggatgggctgggtgggtgggtggggaagaaatgggcccagccccacatggcctgcagacagtgctctgtaaatagttgttttaatttagctgaatgttagcattttagtctttggcattttagcgtttgggaggtagattaataaagtatattccttcaagcctgctgttgataccatgaagactgggcgcctcagtcccagccctgtagctgtgtgtcttgggccaccagtggcctgcaggacgaaggtactgttccatcacctgcggtgtgcctcaggatcaccaggtgcaggcccccaccctcggagatgctgctgcagtgagtggttccactgcctggataacccttgaggaacacgtcagttactgtcacgatggggcaggtggagctccttcctattttttggggtgctccctgtttgtaaaggggagtttgttcattgggaaagacctgggtcttgacacggccctgccacttagtcccctaccctctccattccccaggctccacccgtgctgctcaggtgcaaatggacttgagagcatctatgtgctggtgaagcatgaggtctgagtagaaaaggggtatcccttgagaccaccttgggaccagtgcttgcaagcagcgagatatttccccagcaaaaccaggcagctgctaattaaatgcttagaaccaatgaaagctggctgtggtcctgcctgtgagctgcctactgctgccttctgaatgcatatatctgctactgtagccccgggttgtcaaactatggcctgtgggccaa

SEQ ID NO: 460712 - DNA, 860 bp, Homo sapiens
tgcaacatagaggtcacatgcctgctgtggtattatttaaagcccttatggtattttcattctggaaaatcttttttaaatgttcatttttttcattcatttgcttaaaaagaagtattacactactactttgtgatgaaaactctgctattccatcaaatttaggctttacatattttttcatgaagactgaagatgatgcaaggctgtttgaacacctccagggctctgatgcttggggagccctgggagacagcatctgggagaagctgcagcaaggcctgagaagactacagtgtatctggaaagtggctgccccatatactcagcaacagctcagccaatgcctgctggagaacaaatgtgaaaattctggggactcccagaaatgctctggaaattgggatttgcagataagtggggagcctgagagccggccgggtgctgggctcctggctatccctgtgatggtagctcagcgagatctggggacctggcgctgagcgcgttgccagccgggatcttcctcttcatctaggcctgggcgctggcgtgagaactcggactgggtcctggacgagcgccccccgaaactccttggaaccttgaacaagtaaaatgcaggaagtttgctaataaagacatcaccaaaggttaaagagaaaatcatctagaggaaatgctggcagtatggcatgtgttctttaacaaatctctacagcagattctctcgttttagggactatccagattatgattggcatctttcacattttcatgtggtactttctattggttttgtatatgggacaaattaaaggagcctttggaacgtatgaacctgtaacttacaaaacagg

SEQ ID NO: 460713 - DNA, 667 bp, Homo sapiens
acctctatcacatcctcaagcttcggccaaacttgtagtaatcatgaccattgtacacaatctcctttttctgcggtattggtgtgatgcaggctctccctcttcctgtccccatctgcaggttgaggctcccacagctgtggccttgacttattggacatctccctcaaaggctccctggaatacagacatgaaatcacgcaatatcgcaattgcaacattgcaaatgcctcagggaataaaagtatggaaatctttgtcctctgaaaatgtgtgcctggataccagaggcaccataacagacatgctgtgtcatgaggtcacaaaggtggtggcaagacaattaacgttgaggctgggggaaaagacaccagaagaagaaggcaacaacaggaagaggagaagcagcaattcagaaagacacactttcttcttcgcttgccctgaatcggatagtgcttgaagcctggatttgtcagcagccacacaagccagccaacgcagcagagaacagggctgaggacagagaaaaactgatggccatgcttaggccatggatcaaggcatgcccaaaccagccccaatcttgtgcttctccgttatgccagtcaataaattgcctttgttgttcaaaactgtatagttggtgtttgatcatttgcaacac

SEQ ID NO: 460714 - DNA, 1463 bp, Homo sapiens
ttagaatttggaatcttattgctaaagacttgtttgagtaagtatgggctgtgttgaaacccctgaaataggactatataggtgcaagttattggttaaagatttaggtagctttcacaggagaaaagggctattagaaggaaacatgaattcaaagatgcactttctaaagaggtgtcccacctattcggaaggacctcttggtgctggagcctttatgctagatggccagtccaggttaagttatggttgtgctaaaaaggccaagcaggaccagaaaggcacctgtaggaaagaggaactaaggattcctaaattcaaacttggtctttcagccattgtgaagctaggaacaagaacacagaacacagaactggcccagagtggtgaggttgctcaggttgcagagggcctgtcatttcagaggatggtgactgggtagccagctgtgaggcaaagcctttcaggagcaaaggcaagacctgaagaagggagtgtggacggcagcacttctgtggaggaagctggctctaaaggctatttgaggaaggtacctcacataaatgaactcttgtgctctgaaagaaaagtttgttcttgccctgcctcaaggtcagcagaaagaaaatattctcttacaacatggcatgtaagaaatagagaaaagaggaaagaaaatctatttgaaataaagcaaccatttctcatgatgaaaaatctgcacaattactttggacgcaatatattgcacctgtttctggctgatgcctcctaaattaggcttttaagtgatcaaatactgcacgtttcacacataccctaaaagtagtatgaaatacaagtgactgggataaaacataagtaaactaggaatgaaaatgtcatttttttctataaaattgaaataattgctttgggaacagttttctatttgatagctacatgagtatatctatcttgacctgtcaactttttttgagaaataccatttttaatgataattctaaatacaaatgtggttaaagtccagggagaaaatgtgccagtatttggacataagataattaaggggtaattagggttaaatgatgtcattagggtgggcactaatctaatatgactggtgtcctcgtaagaagagatgaagacacagatcaacataaagaccatgcagaaacacagggagagggggagaggagggtcatctacaaaccaaggagagaggtctcagaagaaaccgaccctactgacaccctaatctcagacttctagcccttcgggactgtgaggagataaatttctgtttaagccacatagtctgtggtactttgttatggtagccctagacaactaaaacaaaaccacagcattcattcattcaacaaatagttattgagcctttatatgagctaggcactgttataagaccatggggaaataggagtaaacaaaactagtttaaa

SEQ ID NO: 460715 - DNA, 5169 bp, Homo sapiens
ggcccagccaagatggcctggggcagctactacccaaagtgattcccggaaagagtaggtgggtagcggggtccctagggcactgagagtgagagggcatcagaggttataggttagggggaaagtgaggcaggggaaaggggcagcctgtctctcctctgcaccagctccttagcttgtcttctctcttccctcttaaaagagggctctggttagcaaagaaagagtttccacggcatggagctgtgcactctgctcctgtagcagcctgctggtgtcgtcagagtgggcatagttcctgtcactttactggaacttggagtgacacgtctgaagtcagctactgacggggtggtgcgtaacggcaaaagcaccgccggacatcagcgctatctctgctctcactgccgtaaaacatggcaactgcagttcacttacaccgcttctcaacccggccgcagtcggtaacctcgcgcatacagccgggcagtgacgtcatcgtctgcgcggaaatggacgaacagtggggctatgtcggggctaaatcgcgccagcgctggctgttttacgcgtatgacagtctccggaagacggttgttgcgcacgtattcggtgaacgcactatggcgacgctggggcgtcttatgagcctgctgtcaccctttgacgtggtgatatggatgacggatggctggccgctgtatgaatcccgcctgaagggaaagctgcacgtaatcagcaagcgatatacgcagcgaattgagcggcataacctgaatctgaggcagcacctggcacggctgggacggaagtcgctgtcgttctcaaaatcggtggagctgcatgacaaagtcatcgggcattatctgaacataaaacactatcaataagttggagtcattacccagggttgtgtgataatagagttgattgttccaggcactgccgtggcttttttacacattgtccgatctaatcctcaaaacaattgcctgaggtagggactgttttcctcatcctatgattgagggaaatgagacttaagttaatcaggcccaacagcacacagcttttaggcatttagattgcttctacttttctcctaaaatacataaaaatatttcactttttaaagaacgattttcttaaattcctggaactgggattcctagatcaaagaataagcacatttaaaagtgtattttggtggactcttctatttaccttatattaaaaagcaaaaaagttatggtgtggtgaggcggctgcaggccagcttgggtgaggtccctgcttctgaccattgtgcacagaaggctgcctccttgctgctcacttgcttcctggcggacagtacaatcagcctcttgtggtttgccagtgaaatttaagtactgggtcagcctttccagtgcttctctgtctgtcaggaagttcatctgtgaatctaacctaaatctcatctgctgcattttaaatcctcacctgctgtcgcttcccctcagtggagtggaacagagcaaagctgcgcactgtctgcaggcagccttgttcacctctctcccgtgaccactgcgacgccagctgccagccttatgttaccctggaggaaatttgagggtctctggctactgctgtcgagactgggagggcagtccttgcatcgagttgctgctgataacaccaggtagggtttctgaatcctagagtgcccatgctgtgcgggccagcatctcccgcgccctctgcagaacttgtgggggcaattagcattcagagtggcactctcctctggatgctgtgggtctatcagattcattctttgggggaaaaaaaaatgtggctggagcagggactaattgcatttcagccccaattgcattggccaagcggtaaatgtacagtgaaggaagatggccaggcaaggaggggcgtttgagaacattctggtaataggaaatccggctgtcattgtgggagggaaaggtcccaccctgggcctcccacccttggcataaagcagctgtgccctctaccagaacagccttggccacctttcttagcgtgggtccattgttgagagctgacagctttattatggagcagtaggatgttaatttggaagagaaatgaatatagctgcaacttcatgggcagcaagaggccccttgtgtcccctcacttaggcattttagagctggctggcaattggccagcagggtggagcgagtcacacaggaaagagtctgggaattgagtccttgcagcacctgtgagaatatctgagcatggctagaagcccagaggagatggagcctgaagcctcccggggacccagtctgggctgactgacctccagctccctgccctcccctctatcacagcacctggagatcctgccttaatgttaactgcttgatgctcccagcttgtccttggaagttctacacacgtaagatgagatgccttgttttacactttgctattccctccttcagtgtctcgtacagtgtaggtcttgattgaaatgaagtcagcatttaagaggcaaaacccagtggttttgggcactcagtaaagaagctagttctctgctcttcagctcccatttaaaatatccatgtcagagtattattcatccttttgaagaggggaagctttttctgtctccctttatagttataccaaattctctttggtgctgaatgtcactgtacttttagcttagtgggttgaagttggaggccaaagtccccactgcaaggccttagcccagtgagtgccacccctggctgcacattagaatgccttggggagcttttaaaaaatatgtctgggacctagtgccagagattctgatttatttgatctggactggggctctggcatcattttagaaacattccactgaataaggagtaaggtgtgtctgccataccctatcagcagtttccctttatgggaagatacatagtagaagcctgtgacatctgcagcagtaggttactccacatcctttttggaagcagaaagggtaaagtgccaaatgagagcattgcatcagggctttcatgtgagggattggcttgatgggaagcctccaaagatgtatcttgtgcccatttctgttaccagggtgtgctctggctgtgtcgctctgcttggtaattaagcaggtgccgtggacgggatgaggatgctttggtttaggttaaagataaaaaggaagaagcaggatatgagtgtgtctctatttgattcatcagcacagggactggattaacttttttctcaagcttttggagcaggtgggagagcgtggggaaagagctctgagtgaattgaggatggcttttcagtttgggtctagaagacaggtcaaagaggtgggtgcctgcagtgagtgttcaaccctgcatggctctctgttatccccgagacctcacttctgccagtttcctcttgaatgttgtagagacctctttacagaggagtcaataagggacaagactactgccatgagtgaataagcaccttggctgtgtgtgtttggatttggccgtgggttcctttttgtgactgagaaagattgcactcctttttggctaatgcacacgacttgatgtcctgagtcttaccccttctccgatgccctctggggtgtttgtggttggagctttgttccaagagtagcctcccaggttgaagggctgtttttgtggttgcagctgccccttagcttctgtctcatggctggcctgctccctggccctgtcagccttagagaagttgaagctcccttgagagaacccctgtagttttcccacaggtgaggaggcctgcgggttaacacctggggtgctgatgatgccattccccaaactggcaaatcctgcttagaaaaaagatacacacattttgatttcctcgtgctgtttcaaactgcaatttgctaatcacctataacagattcctcttgggtgcttgttaaaaatgcacaatccctgggaataaaaccgaggaatttgcattttagccaggatgccaggtcatcagatataggaatgtttcagaatcactcagttaaaaaatgtcacatcactcttgctttacagtcgggaaatgtgacagagtggttaagtgacttgcccaggatcacacagtagattacagctggagccaagcctggaagaactcaaagccaagtccagaatgttatctccacttcatatttgtatggagctttgttctttgtaaagtgtagtccatctttctgctcctctagtttgcttagatggagaatgcccttgttgattttgggccagattattctttgttgtggggggctgtcctgtatattgcaggctgttcagcagcatccctggattttaccccctggatgccagtagtgcttcccagttgtgacaaccaaaaatctctccaggcattatcaaatgtcccctggggggcaaaattgtcccagttgcaacccagttgtcccagttgctttagtgggggaagccgtgttccagggatgttccctagtggtatcccatgacatttatttttatgtttggggacttgtaaaatttgcagagctggcttcttcccagcttcgctaataagctggattacaaacataaatgaagtcacactgaatataagctctctcctcatctttgctttggcttacagagggaaggcataaataagcttggaaagatcactgactttggactccaatctgcaatttgcctgccaccctgggctttctaggtgtgtgatcttgggcaagtcgcttaattttctggaactcctttccttatctgattatgatagaaagaaatgtttgttgtgaatgagaattaagtgacaccttggatgtggaagtgtttataaaacattactcatatattaattggtgctgataaaattcaggtctaattactagcacttgagattttctcaaatttaaaagtgcagaactcagcacagcaattctagacttgtatttggccaagtatattatccttgtcatcttcccataaagttaatcttcccctctcccactttaaatttgatctacctcttcttggtggccattgccgtatctctttagggtcattgtctctgcaagattggccattaggttattacctctggcaacag

SEQ ID NO: 460716 - DNA, 5457 bp, Homo sapiens
aagcagtagtatgggctaaaaatcagccccctgtctatgggctaagagatttctagcttggggaccaaggttggacatgacacagaacccattcagtttatcccagtgggtgactgaggaagctctttctgcccatcttagtgcccactgggcagctgagcttgccgggtccaaactcaagcctcagtatcaagcctctgtcttgggtttggggttagaatattccaagccccacagcaaacgaaggcagactcctgctcaaaactttttgatggatttccagtgcatggaggagggaaccagaacggacctcagcatagaaggccccctaagaacagtctctccagtttcagcaaacagagcactcttaactccaatcatgatatccaccaacaccagcttccaagctctctctgcttttgcatcttgccatacccctagagctgttgggtacatagtaatttacaaatatctgtgaataaataagtgagtttaggaaatgtaatgaaaggaatatttaaagacacatcctaaagccaccttaggaagtaagggaagaggagctgatgtagtggaataaatagagagctggcatagagggattgaggtccagaccacctagttccaaagcacagaacaacatgtccagtcttcattccacacacccagtactactagaataacctgggaatttggcccaagtgtattagatggggaaggtcctatttgtcctttctccctgcctctccactggtcatcttagcactttggcccacttgtgtctggtagcttctttatggccagttcctttctcaatggacttgctttatagagaaccattcagaagaataaggtttccttctctgcagccgccgccgccgctgctgctgctgtttaaaggtgcttaacaatgctgagtcatatattagattatgttccagaatcctacacccacagcatgtgaggcagataagctgtacttacccaagaaatgtaaacaccacaatagtccttggttgtcaatctggtagggtcacgaagacctgcctggtatcagtgttttttaaagcaacagctgaaaaagtgacacctaactagtcaaagaacagagttacaagagacatgctgattcaacgaatggagatgagtaaactgaattgcagagagcttagatgacttgaaagagacttgacagctgagcagggagaccatctgtagccacctccctgtcacaaggaagcctgcacatagagacctcccatagagacgaaatatatctacaaaagggtcactgcccttgcaaggaaaatgcgatcccagcacggcctggcgtgttcctggcggcagaaaggactcctgccaggacaggaggagaagttgccgctgagacgaggagacggcgggaagccctgcagatgccccaagcccactgaagccacaggaggggaagggaggaggctgctgtgctttctgtgtaccttgttctctgcccagaagggtcagcacagccaggcagccccgaaacccagtggaggctaaagaaaggagggccctctctcctagagaaggctcagtaggctcccgaggaaagggaaggagcaactttttccgtttgacttcaaggaggagggggaaagggtacagaatcaaaatgtatggcacttgcgattcagttggcttatttctgaaaaaattggggtagattgggcgcccaatgcaccataagcgttatgtgtgtttgtaaacacacacgggggtgtacacaggggtaggggtcttagagagaaaagtaaaaagggaaaagaaggaaagtagcagaggctactttacacataaaagtacataaataagtttacttatgaagaccatggtttcccactaacagccccatcttggtagcagaatgggacaaactgtcacacacgcacagtgaattgtaaatagcagggaatggaaggacaatgctcatatgcattggatgtataataagaatacatatgtgacctacatatgtctgtttaattaggacaagtgtccatccctagtgaagattgattagtcactgtgaccttgtttttgaaaggataatgagagcagatgagacttttgctttaacaaacttacttggccaaaattttaaaagctggcaattctaccttgctaccaatcctgattgatttgttgttgttgttgttgtttttccaactttacttgtctctgatattgaaatgtctaggaactgtaacctatgacatggaagtgctatataatttgttttcaaatttcaagcctctttaactaatgtggatttttattaagcagttgtttgacattcaatgtcagatgggttacaaggaaagctgatgtttagaaggatgtactgtgtgttgggcatcatcccagactctgtcttttaattcgggtcgtaaaacttacgcatctttatacagtagatacgacttaacccaatattttttcaaaagagaaacaagttttataccttgcacaaaaccacaggtggtgaaggcagaatacaaactgagggcctgtctgactcagaagcccacgatgtttcctatcctatctcctcagttaccaaaaagaggttcacagcactggaccagagagagaccttggatgttaactccaccagcctctaattttgcagagaagaatgcgctacagcagaggttaggttacttgcctaaggcttactcagtaaatttggtgatgtagctaaattcatcaccaaatttggctgccactcagtctctaaatcgcttgcctggtgtcctctccaccctcacccccacccctaccccagccgtgccccaggcactatccatagatgaaaagagacagccatcctcagcaccctccagaccagagcaagctgagaacagttgatgcctccccagagctcctgacacaactccagtgctgtggaggaggcccatcccacagagctgctgcaagaagaagatgctgggagctgagctgctccctggcaatcgcctccaggccagctcaagccatgctaagggatgggggtcatagggacaaaagggcattgtgtgtgagagagggagtggggagggagtgtggggaggaatgcactggcaatttcttcctctcccaaagctttcctcgcccagctgtctcgtggcaaaggaaggaccctccctggaggggctggcagcccaccatggatgcctggagactggagctgattgattgtgttattagatttcctccaaaggacagagggcttcatttagctggcattgtgtcacttgctacaatggcccctgagtatatagacgctgccttatgccgttccctttaattcccttcaaatagggacatttaaaaagagtccaataacatttttctgaaaggaacctccacctcctttttttaaagaacagaatcatttgtttccaaaagggggccctccaaaagaagctggaggagcagaaaccattttaatagcatcttctctttgctgaattgtgtcttcattttacactgcggctttattctctgcccctttgacacagccagctgcctttcacgttccagctcagaaacaggctggcttcaggctgtaacaggcaccagcttccaaagccctttctccagatgactcacgttagcttgtgtgagcctgtgagccccacaccacagctcccagacctttgttcctttgcaaagtgcatttaagctccaagtactaaaacagtgtctacctaagtctcctgccttacattggagtgaaataattaattacacagtggagtgtctggttcctatcttgttcaggttcatcctgttatcaactcagcagctggaggaagtgacatcacgtgcccaagctcggctttgaagctggaggtgcataccgagacactgtatgtggtactgcactctggccaggaaacatcacccttggaccatctgttaaactatttaaaaaaaaaaaaaaagttgggacatcagtttcttaactagagtttcaaatcctattgttcaaatggtgagaaaagccttttgtgaattctgctcttagcctggaaggttataaaaggagtggagataagttcctgcaagtgtcttgaaaattaaatccttttatagaaagcataaatatatgtggggctaggtggggggaatgctccactgagcaggctcccatgtaactagtgaagcagatccatttaatgctagtcaccaggatttctttgcccgagtattccaagccctggtctggggctgcttttctactcctatgaaaaagtgctttatcaactgcttatctcaagtttttcttagtgagtaacagctctgggaactctctgtgtggatctgaacagcatgcaaaatcattttacttttaagacaaaagacattagcttcctgtagctttcttagccatctctacctctcttcctttcccacccacttttccctcccctccccttcttccaacccccatggcactaaataaaatgcttagaaaatgaaggccacagctgccctttcttcccattaaaacaatcaagaatgatggtgggtttaatatatttgattagagaaactccaatttggtgcacttgaatcagctgcctttgtcttcagctcccgatggcccgatttcagtggaatgtcctctgctgtccactgccagctcaggctgggagaaaattcagacgctgaaagcattggcttggcatgctcagaaacacggtatttatgctgtagaagatgccaggcccacttcttcctaatcagagggagcgccacttcattaaatcgtggtcacttactggtgaccctcatagttgtagccctggggggcctgtggtactctttagcaatgttaatttttcatggattttattgctttccttcattgatattggctgttgaaattccagcctgaatcctgttcaaacaacccaggagattctggtacccaacttgcacagaggaagttcagagaataataatcacatttacatatggagtctctttcattcaaagaacaaatagaaaactaatggaaaataagaaaatgtgtcatcatttccccacaaggtgttattaaacaggtttgaaatattgcctgggcagccccaaacttgtagggtacttgagaaggaattgatctccttgggggctggaggcttggcaaacacagcttatttgcacttaaagtttatagagatttttaggaagggctctcttgaaatattctaaataaatgtatgctccaagaataagtacaagaatgaattcaggataagagtttaaattcctatcaaagacatattgaaatgctacagagtttgtaggggtttatttgaatatattttaatccctaccatggccaaagtcagagattggagttagatggatgaggtcacaaagactgctaaactcattttctacactttt

SEQ ID NO: 460717 - DNA, 1245 bp, Homo sapiens
taccttgattttgcattcatctgagctattcgcggaactcagtggtgagttttctggtaaaaatggctctagaattacaaaaatttcagttcacagatacttgaaaatgttacattgcaaaaaaactcagtattctaaaactaactgttcaagttgggagacagccaaacaaagattgaaaaccaagcctccggctgttggtaaacccaaggaccctgtgattgtagaagaaacaatcactgtggatccccggcactgtaggggaaccccagaagctgttcagtccagcttccatccttccatcctgcttccgtcctcccgggagaagcagacaggctatgccagcctatgggactctgacacattcactcatttgaaaaggaattcatggtgccagttctgtgacaagctctgtaagatgcccaattctgatgccaaagaaagtcgggagactcgcgagggacttaaagagacagcacagcttttccaggtacaactggtttgctccacgcagggactctgagataaagaaaccaaacaaagatccagtaggaaggagggagtgaatggtgggagagaatgtgacaaaagcaatgttgtgtaacttccaaagtcaggacttaagagatttgcaacttttgctttccctttcttggaacactcctgcttggaattcagtgctatgctgtgataagctccagcctagtagagagcccatatggaaggaaaatgaggtgcttctatcgacagctcacctgagcccctgactgactgccagcaggaactgccaactaggccttgggttacactctgatgatgccaggataatcagaccagcctctgggagaccctccccaccaggcaacagctgtccctcatcctcccagctctgttcccatctggcctggggaagtgagcttaaggatttttccggaaacgaggagaggtcaggatgctgaagtgtttggaaggcatccgacggaatgacggctgaggccctcactctccactgaactctgcttgcggctggggactgctctgtgtctgcacgtgttcgcatttattaaatgtggaggtgcaaaacaaaacaaaacaaaacaaaaaaaaaccagtgagatttctggactgctgatggaatctatcaaatctctcctcctcctcattataaggcaggcccccacatagtagatgcgcaagggtgtccatacccacagggacccagacagcatccgagacttgacttgc

SEQ ID NO: 460718 - DNA, 661 bp, Homo sapiens
ccaatccatttggaaggagatctaaatgcttaattgtccatccttgacagccccctgttgtccttgtagaaccagtccttgggcaaatataatatatgtagacagttggcgtccaccctcaatttacccaatggcattcaatatccctgaacaatgtcaaactaatactacctattggtaccgcgcctctcatttactaaaacatcctgactggttccaccccatcatctccacagggatgacgtacagattggacaggacaactgcttccctgaaggcatcactgatcatgcagaagagaggagtaatgggtgctaatggacataaacaaactgtaagaacaattcatttctggcaccctctgaggatgctactcttaataacagaaagtgtagagctgggtatcacctctgagaaaatgtgttcatgaaaacatccattgtgcaggagtcggaagatctgtcactccccctaagaaattggagtaaatagctcattaaatttacatagcatactaaggtgagagagaaactataaaaatcaagaaagaaggtaaataaacaaaaaggctgcatgtctccaatggaaactgtttaatatgtattaggaagaaaataagttacatattaagcaagaatttaaccataagttgtaataaaaa

SEQ ID NO: 460719 - DNA, 1575 bp, Homo sapiens
ggcggccgctccctcccggactcccggcctcccggcctccctggtcccgcctgggaagggatgcaaggaagccctccggcgctgcgctccgaggcgggagacagcgtccccctccgcccctcgggtcctggcgcctcagagcccggcccaggccgcggaacggtgatgctcgggccggacgggcgggcgcggatccctgcgtcccgctgaaaatgtgtgtctgacatgcaagctcagtggggcagagacccgtggattgctgtgccctgccctccggacccggatcatgaaggtgttgggaagaagcttcttctgggtgctgtttcccgtccttccctgggcggtgcaggctgtggagcacgaggaggtggcgcagcgtgtgatcaaactgcaccgcgggcgaggggtggctgccatgcagagccggcagtgggtccgggacagctgcaggaagctctcagggcttctccgccagaagaatgcagttctgaacaaactgaaaactgcaattggagcagtggagaaagacgtgggcctgtcggatgaagagaaactgtttcaggtgcacacgtttgaaattttccagaaagagctgaatgaaagtgaaaattccgttttccaagctgtctacggactgcagagagccctgcagggggattacaaagatgtcgtgaacatgaaggagagcagccggcagcgcctggaggccctgagagaggctgcaataaaggaagaaacagaatatatggaacttctggcagcagaaaaacatcaagttgaagcccttaaaaatatgcaacatcaaaaccaaagtttatccatgcttgatgagattcttgaagatgtaagaaaggcagcggatcgtctggaggaagagatagaggaacatgcttttgacgacaataaatcagtcaagggggtcaattttgaggcagttctgagggtggaggaagaagaggccaattctaagcaaaatataacaaaacgagaagtggaggatgacttgggtcttagcatgctgattgactcccagaacaaccagtatattttgaccaaacccagagattcaaccatcccacgtgcagatcaccactttataaaggtagacattgttaccataggaatgctgtctttgccttgtggctggctatgtacagccataggattgcctacaatgtttggttatattatttgtggtgtacttctgggaccttcaggactaaatagtattaaggaagtcgctgtgcctgttagtgaaggggcggtgttactggagacaacgcccctgctcgtttccattagttttaaggactccatttccagtaacgtgctggaccaggttattcagaccacctttcacgtgctgaatgtaaccaaatctattgtgcaagtggagacattaggagaatttggggtgttttttactctttttcttgttggcttagaattttctccagaaaagctaagaaagcaaaagtttttaagtgactgtcagatgtaacaggcattcttgaaccagattcgtgagaatcacaactgtacaccctttctgtatttttggggttttttttccac

SEQ ID NO: 460720 - DNA, 1144 bp, Homo sapiens
ggcggccgctccctcccggactcccggcctcccggcctccctggtcccgcctgggaagggatgcaaggaagccctccggcgctgcgctccgaggcgggagacagcgtccccctccgcccctcgggtcctggcgcctcagagcccggcccaggccgcggaacggtgatgctcgggccggacgggcgggcgcggatccctgcgtcccgctgaaaatgtgtgtctgacatgcaagctcagtggggcagagacccgtggattgctgtgccctgccctccggacccggatcatgaaggtgttgggaagaaacagaatatatggaacttctggcagcagaaaaacatcaagttgaagcccttaaaaatatgcaacatcaaaaccaaagtttatccatgcttgatgagattcttgaagatgtaagaaaggcagcggatcgtctggaggaagagatagaggaacatgcttttgacgacaataaatcagtcaagggggtcaattttgaggcagttctgagggtggaggaagaagaggccaattctaagcaaaatataacaaaacgagaagtggaggatgacttgggtcttagcatgctgattgactcccagaacaaccagtatattttgaccaaacccagagattcaaccatcccacgtgcagatcaccactttataaaggtagacattgttaccataggaatgctgtctttgccttgtggctggctatgtacagccataggattgcctacaatgtttggttatattatttgtggtgtacttctgggaccttcaggactaaatagtattaaggaagtcgctgtgcctgttagtgaaggggcggtgttactggagacaacgcccctgctcgtttccattagttttaaggactccatttccagtaacgtgctggaccaggttattcagaccacctttcacgtgctgaatgtaaccaaatctattgtgcaagtggagacattaggagaatttggggtgttttttactctttttcttgttggcttagaattttctccagaaaagctaagaaagcaaaagtttttaagtgactgtcagatgtaacaggcattcttgaaccagattcgtgagaatcacaactgtacaccctttctgtatttttggggttttttttccac

SEQ ID NO: 460721 - DNA, 3715 bp, Homo sapiens
agctgcagagcgcaaggcgcgcccactgcgcgtgcgcttcggcccggctcctcctgcgcccccggcccctgcgactgggacttggtacggccgggcggttggcgtcctctgcggctcctgccaggggcgggcttttcaaatcttccctttgaaggagtggcgacggcccggacagttcgcgttggagatggaggggccgagcctgaggggtcctgcgctccgcctggcggggcttcccacccagcaggactgcaacattcaagaaaaaatagacttagaaattcgaatgcgagaaggaatatggaaactcctttctctgagcactcagaaagatcaagttttacatgcagttaagaatctcatggtgtgcaatgctcgactaatggcctatacatcggagctacagaaattagaagaacagattgcaaatcagactggaagatgtgatgtgaaatttgaaagtaaagaacgaacagcatgtaaaggaaagattgccatatcagatattcgaataccactaatgtggaaagactctgatcacttcagcaataaagaacgatcacgacgctatgccattttttgtttattcaaaatgggagctaatgtgtttgatactgatgtggtgaatgtggataaaacaatcacagatatatgttttgaaaatgtaaccatattgtaagtattttttaatcttcagagaataaaaataatttaaaattcttcttttttaaaagaaagttcttattattggttctttggattcattttatgtttaaatgtttaagtgatctttaaatgtttaatatgattttaaaaatcattttgttcagaagaagtccatttctctatctgcagttttctgatgtgaaataaaaatggaaatcttgtaattactattagcagtaaatatttgacttattagatatgacccatttttaaattgttaataaatatagttcagttattaacaaagctatgcatacaacagaatatcctgtaatgttatttgatatagagagaatttaagcataaaacaggatttttatctcatgtaggatatttggttgcagaaatactaaaatagtatagcaactttatttacaagatagtcctgaagtacatgctatataggaagagcactttgaaattttggggtgttctttttcttatggtgcacttctttcatgtacttcaaagcaataaaaaaaaatgggtgatctcagggctgtttttattgtccctgctcttttacaggctcattttattgtggtcataatacagaacaagaaggaactccttgggtagccatagaaatcatttttaactaacatagtttttcctgccctccttcaaaggttctatgtgcctaaatcagtgtgggatttgtattttagacttttaaagacacgatctttagatctaaatgttaatagctactaactattaatataaaaatccatgtgcatggtttttgccattttcagctatggagctagacaggtgagattttagaggcctagttttgccactcacataacattaaaaaaacctatagtaaaccatattttgtagcttctggtccagtgtctcatagtaatagtatagcctggaaaaataaaatgcattgttctgagttataagtagtaattcaggccttcttacaagctgtattgaaccaaaggaatttatttaggatccaaaacatatccccaaatgcttatataattgaggctaaaaaaattacttttttcttggttatctgaatacatttatttccattatcaactattgctagtgaacttttttttctgccaaaattaccagttgatgggcccttttcttcacatcattttgctattgtttgttttgatcatggagacaaaaatcagacttttttttccagggaaagaacaatagaagttactgaggaagacaacacatgatttataattttttgagaattctgtaaatattttaaattgtactaaaaataactgctgacaaatgttctacatgttgaaaaatgtgctttttgttatgatgattgtttttaataagtattcaatatttatgaatctctggtttttctctaaatattgacatttgttagtcattaccaggaatactgcatgtttaaaagttgccaaataataaactataaaaatagctggaagttattcctgggattttttcaaactatagattggccatttatatctttaaaagtctgtgctccattttttaaatctctgaaactgatggatcttccatctgcaagtaacatctgctgctgatggacctcttttgcagtcttaagtatattttattgttagtaacaccaccacagtctttaatgctaaaggtagttcaaaggtagttcgttgtgtctgaaaaagggtaaagccaatcttaacatttgctaaaattgcagaattttgcgtatttatttgataaatatatatctaatacctcctacattccaggccaatactagattaagaacacaaagatcacccagacagcacccattctcaaggagttcatgctttgaagtacatttttcccctgtataaccagatagtaaaatgttatttatagttattaggtacaaaagtgggggagggtcaggggacacagtgacgagtgcactataagtgactctttataaagaagaaatgaaaactaaaggtttagcagattttttttggaagaacagtcatttcagaaaattacacatataaataccttaaaaatgtattaaaggaatgacaaggagaaatagtattggcaacaaaatgaccagggtattttatgctttctttaacatgcctatgtatatattggttaaattgagttaagattgccctagttttgaagctgatatctgtgaaagttgcggtaactctctcaggccatttagatgctaaataaacactgagagattctgtctcattaacatacattaacataaacttattccaaattcttattttttttcccataaaccttgcacttattgaggagattttgcaatcttctcttggctcccctgcagtcttttatttattttaaaaagaaattttattgtgtatatttgaggtttataacacgatgttacaggatacatataaatagtaaaatgttactataatcaaacagattaacatctatcatctcacatagttactttttgtgacaaaagcagctaaaatctatttaacaaaaatctctaacatgatttgattaacattcacctcatgtttttacagtacattatatctctaaacttattcatcctacatatctgctattttgtgtcctttgacctatatctccccatttcctctcccccagtccttgcccatggtaaccactgtttttttctctatttctatggttttgagctcttttttttttaatattccacatataattgagaacacacaatattttcatttctatgcttggcttatttaacttaatatcctccaagttcatccgtgttgtagcaaatggcaagatctccttttttaaggcagaatggttgtccgttgtgtgtgtgtatacacacgtagcttattttctttatctgttttaccattgatggacataccttggcgattgtgaataatgctgcattcttatagtttcttcaatatcttggctattgtgaataatgctgcaatgaacaggggagtgcagataacttcacaag

SEQ ID NO: 460722 - DNA, 723 bp, Homo sapiens
agaccgtgccttatagtagtcccatgtttgatcttacaaggagtctaagtggagatgatgtgaacgccaggcctcgttttctctcctggtgccaacagcaatacctggacatcagaggcagatgcagtcaagggaaggatcataaactttctttggaaagagaccatcttactaccaagccagtcgggggcttggatcttgccctaacagcaactgaaggatttgaggctttttctgaaaaggcagccccaggtcctagggaagatgcacctcctcacaggatgttttttactctccaggaggctcagatcctgattgggctgatgacacgatgcctgcgtctcacaatggcgctttttgtttcaactgtttatgcagttggagttctccatataattaatatgaactatcatttatggggatccttctcagaagaactgctgaatgctggatatgaaagctaatgtctttgagagtcagtggacaagtctgtaacaggggctttgctgctggaaggaaagcgaccaagggtctgatccaaggcagcctggggatgaatacagtcagtgccaccacagcaggaacaggcacagttctgatggctgtggaagtaatatatatctttttaagaagaatttgtatctctacttatagcacatttttttctgtagtaagtactgttgcactaatacaataatataaataggttttatattcaggagg

SEQ ID NO: 460723 - DNA, 1154 bp, Homo sapiens
atctccttagggttccctatactctgcccacactgaatcaatatgtcctttattaaactcttctcctacgacccaatcggggtgtgccctccaccaccctggttcctgcctggactgtggcacacagtgtcctgttcatcttcattgccccaggatccagctcagtgccttccacaccacagagcagtgccaaggacagaagagagagtagatccagccttggccctgctaggctgggcagcctggcaggtagagtcagcagggatagagcttgctttcctgttcacgatcttcagccaagttcagggaggtctgaatactgaggccttcatagccactgcaccccaggtagctcaggagaacctccgagcgcaggagtgcaaaggctggcattcttcaggctctgaggctgtcccttccggtggaggtgaactgcttcttattgatgtggacaagactgtggataaagtttgctgacccctagagaggaagtcatggcccatggctggcagatggaagcctcaggacctgaagatttctcaaagaaagggacctgctgctgacagcaattaatatatgttcacagcttgcagctgaagcctgatgatggctgtaggagaaaggacatcacccagatgacattttgcctccaaagctctggggaccaattgtggaagaactgcagggatattatgttagaatgttcttgtgtctggataggatgagaactgtcttataacaaagtgcagcccccatgtctgagggcatgtttcctgtgtttaggcacttccgaagcagggagcaccttcaaggggcactggccttcccagaaacagtgtttgacctgtgatgatgtcctgggggaggggacctaggaaaagaccttagcctttccataaggcacgattattctcctctatagagcctcaaaagtcaagtcaagtagcaagcacactgtgctccagtctgtggccacagacacacacaaggactggagcaaaaccaaacatagtgtatcatcaccgctgaacccccaggagcccccagatgcttttgaacgtgaaaggagaaagaagctgtcagagatcaggttgaatgtggtgggttaggtgtgcggcattgcctctgggtccctgctttggtttaattaaact

SEQ ID NO: 460724 - DNA, 402 bp, Homo sapiens
gtttctctatgttggccaggctagtctcaaactcctgacctcaggcgatccacccaccttggcctcccaaagtgctgggattacaggcctgagccaccacacctggcctcacctgtattttaaattgagttttactgggtaacagccatggtcattcatttacatattgtcaaaggctgctttcaagctacaacagcagaatttaacagtctcaagaccatatggcctgcaaagcctaaaatatttactggccctttacagataaagtttgctgacccctagagaggaagtcatggcccatggctggcagatggaagcctcaggacctgaagatttctcaaagaaagggacctgctgctgacagcaattaatatatgttcacagcttgcagctgaagcctga

SEQ ID NO: 460725 - DNA, 319 bp, Homo sapiens
cccccatgtctgagggcatgtttcctgtgtttaggcacttccgaagcagggagcaccttcaaggggcactggccttcccagaaacagtgtttgacctgtgatgatgtcctgggggaggggacctaggaaaagaccttagcctttccataaggcacgattattctcctctatagagcctcaaaagtcaagtcaagtagcaagcacactgtgctccagtctgtggccacagacacacacaaggactggagcaaaaccaaacatagtgtatcatcaccgctgaacccccaggagcccccagatgcttttgaacgtgaaagga

SEQ ID NO: 460726 - DNA, 1003 bp, Homo sapiens
agctcccagtgcacagtcaaagaattttaaaaacagggaactttgtaactgtgaaatactctccaggatttaaaaggctgtggagctccagataaagaatcgtttatctttcttctgaagaaattcctttggttacaagtttaccccataaacggcaacacactcacctccatccaagacagactcaaggtggaggaagcgtggaaatgtgcttccggacaaagctctcagtatcctgggtgccattgtttcttctactcagccgtgttttttctactgagacagacaaaccctcagcccaggacagcagaagccgtgggagttcaggccaaccggcagacctgctacaggttctctctgctggtgaccacccaccccacaaccactcaagaagcctcatcaaaacattgttggagaaaactgggtgcccacggaggagaaacggaatgcaaggagattgcaatctgtgctttgaaccagatgcactattactaatagctggaggaaattttgaagatcagcttagagaagaagtggtccagagagtttctcttctccttctctattacattattcatcaggaagagatctgttcttcaaagctcaacatgagtaataaagagtataaattttacctacacagcctactgagcctcaggcaggatgaagattcctctttcctttcacagaatgagacagaagatatcttggctttcaccaggcagtactttgacacttctcaaagccagtgtatggaaaccaaaacgctgcagaaaaaatctggaatagtgagcagtgaaggtgctaatgaaagtacgcttcctcagttggcagccatgatcattactttgtccctccagggtgtttgtctgggacaaggaaacttgccttccccagactactttacagaatatattttcagttccttgaatcgtacgaataccctccgcctatcagaactagaccaactcctcaacactctctggacagaagtacttgtatc

SEQ ID NO: 460727 - DNA, 1459 bp, Homo sapiens
agctcccagtgcacagtcaaagaattttaaaaacagggaactttgtaactgtgaaatactctccaggatttaaaaggctgtggagctccagataaagaatcgtttatctttcttctgaagaaattcctttggttacaagtttaccccataaacggcaacacactcacctccatccaagacagactcaaggtggaggaagcgtggaaatgtgcttccggacaaagctctcagtatcctgggtgccattgtttcttctactcagccgtgttttttctactgagacagacaaaccctcagcccaggacagcagaagccgtgggagttcaggccaaccggcagacctgctacaggttctctctgctggtgaccacccaccccacaaccactcaagaagcctcatcaaaacattgttggagaaaactgggtgcccacggaggagaaacggaatgcaaggagattgcaatctgtgctttgaaccagatgcactattactaatagctggaggaaattttgaagatcagcttagagaagaagtggtccagagagtttctcttctccttctctattacattattcatcaggaagagatctgttcttcaaagctcaacatgagtaataaagagtataaattttacctacacagcctactgagcctcaggcaggatgaagattcctctttcctttcacagaatgagacagaagatatcttggctttcaccaggcagtactttgacacttctcaaagccagtgtatggaaaccaaaacgctgcagaaaaaatctggaatagtgagcagtgaaggtgctaatgaaagtacgcttcctcagttggcagccatgatcattactttgtccctccagggtgtttgtctgggacaaggaaacttgccttccccagactactttacagaatatattttcagttccttgaatcgtacgaataccctccgcctatcagaggagccttactctgtggccagcaccaccacaggtccatggggagagctgccacactactgccaatgttcccttaaggcccaagggctcttgaatcaacttctggtgaatgctgcctaccctaggactcacccttcagggttgtgcctgggcctttccaagggctgtgggcagcagcagtaccacctgggaacttgttggaaatgtacatcctcagaccccaacccagaatctactgaatcataaaccccaagtgtagagcccagaactctgtcttttaagaagccctgcaagtaattctcaaaactaaagattagaaaccactgcttttgaatatgtttgtaaagcttctgtagaaatctgataacatcaacacaagtacaaacatatttcaaaattacataggaaggaataaagatgttttaaagattgttggctgcataacctaaattttcattttctttataaaaaatatgttgtgttcaaaattttatagaatataa

SEQ ID NO: 460728 - DNA, 236 bp, Homo sapiens
ccaatgggctgtgtctacagtactatgtaggaaagtgctgcaagagagagcccattttgcctaaacaagaaccacgattatgtaaagttctttctgtcacctctctgaagacctggttcatatctgcagctgcaactctatccctgaactcatctttgaaactacccagagatagactgtcaagagcttcagagctttacaacaggatcttccaagtgccctgagaggtcatgatg

SEQ ID NO: 460729 - DNA, 687 bp, Homo sapiens
ctacaagcacatgccatctgatgtctggctatttttttttttctagagacagggtcttcctttgtgtccagtccagtcttgaactcgtagccttcagtagtccacctgccccagcttcccaaaatgctgtgattgataggtataagccacatgccaggactcctggagtatcttttcatatgcttatttgccatttgtatatcttctttggtgaagtttctgttaatatctttggtctattttttaattatattttttattgtacagttttaagagttatttgtgtatttgggataaaagtattatcagaaaatagtatgaaaatgggagttaaagtcacagcacacattcagcccactgagaccatcactgctgccatggttgaattttacaagccagagatgcagtgccatggccgcaagctctgaatcccagcaaaggatttttttttaatctttgcatttgtattttaacttttatttttttctcttataaagagagcccattttgcctaaacaagaaccacgattatgtaaagttctttctgtcacctctctgaagacctggttcatatctgcagctgcaactctatccctgaactcatctttgaaactacccagagatagactgtcaagagcttcagagctttacaacaggatcttccaagtgccctgagaggtcatgatg

SEQ ID NO: 460730 - DNA, 1182 bp, Homo sapiens
ataaaatatcaggctcttcacagttcttgagaggcacaaagtaggcctgagcctcaagaaagaaggggatggacaagcagcaaatatgaccgagagcagcaaagctaacctgggtcagggttagtgctaggggtagggcagagctgtgtggggtcacagggctctacctggtggaaaaggagggaagaagagaccaggattcaagatacccttttagggatgttacagtgcagacaaagattctggtgcctcacaagatttgacacaagccagcgctttgttgtttttctcacctgttggccagaagattatcttggagcaggaaaaggagccaagagaagcctctgaaggattgtaaacagaagaatgatccaattgtgtttgtaaattaaaaggtcaccctggctgctttgtgggaaatggatctgaatgggtgggaaaagaatgaagccagagaaagtccagtggtaggtagcctggcctcaaacaaatgtcttgcttccacccgccctggggcagaggctgggagatgtgggagagcagcccacttggctcagagggcagcctgccctgcagacagagccctggtgactggctttcaagcccagcgtgggaaggccccaaggaagcacacgaggaagtgggtacatcagcatgagagcaggaaacgttttcattcacagacgctgtggataaatcccaaagagagagctagcaaaagagggagcttttttaagtttaaagaaaaaaaaataataaaaggtccgacaaaaggagccagcacggctggggatcaaggcgaggcgggcgcgcccacaccttgtgggaagcggaggcggccaccgcgtgcaggaagggtctcccaggtggccggagaacccacaggcgtgtacggacaaggtgccctgggtgccctggctgacccctggtcagcccggccaggggtagagaccttcccggaaggcgaagatcgcatagtttgaagggtgtcttcttaccctagatgcttaaataaactgtaaaaccttagtcagaggaggtgttaataatatcacctccatattatccctgtgcaaatataattttggggtggttacatgaatcatgttaatggaactccctttgcaaaggaaatctattttgataccattataacttatggcaatgaacaattttcatata

SEQ ID NO: 460731 - DNA, 873 bp, Homo sapiens
aggcagatgcttttagcctgaaaaggagaatagaaatgcattttctctaaacatacaagagcactcatttccagagagatcctggactggagggacaggagcgtgacccaggctgttcatcatgaatggctggctggggcttccagggagctcaagatcaaatccgggggcaaagagacagaagaactaaaactcagagtgaccaccaatgcagctatgaaacaggtggcaacagccaagtggaagaagccaagtgaagggctatggggacctagaagatggagtcgtcacacagtggaagaattgcagatctctgagtcaccatttggacaagaacctactagaacaggtgcctgaacaagaacactggactttgtgtgagtgagaaacaaacttttattgtgttaagccaccgagattttgggttggtttttatagtagctggtgttgcttacactgactaatacatcttgaaagtaaatgatgcaaaacaattctacttattcacagggggtggtatttataagggaaaagaataacagggtggtgtcagtgatgggtcctgataagtaagcaacaacaaggaaggggccccaggtagggaagaacaattgttctgagagactgttaatcacaaacaacctgctagccccacatcctgttctcaaatactttgctcagcatgtagccccagcagcatgactttgtctgcatgtagaccctccagcatgaccctataaaatttccctccagccactgcctcttggcagacagtcccttctctgctgtgctgcccactgctttcttacaacgttatctttgtactttctctaataaatctgcctttctttacccacaactgtcttgaaaaat

SEQ ID NO: 460732 - DNA, 520 bp, Homo sapiens
gccttgctctattgctcgttggcactgagggaagctctctggggagaggagcccaccaatgcttggctgacaagacctcagtcatgtctgatgtggcttcacctttgctgccgtcttcgtatcactaggggagccctgtggagtggggtggagttcaagatggattctcaagaagttataggaagctctttatcaattcaattcctgagaagggcccacttcagggatgttacagtgcagacaaagattctggtgcctcacaagatttgacacaagccagcgctttgttgtttttctcacctgttggccagaagattatcttggagcaggaaaagccaagtggaagaagccaagtgaagggctatggggacctagaagatggagtcgtcacacagtggaagaattgcagatctctgagtcaccatttggacaagaacctactagaacaggtgcctgaacaagaacactggactttgtacaggacctggactagcttagacgaatgaggcacttgcctctg

SEQ ID NO: 460733 - DNA, 3125 bp, Homo sapiens
gaagtcaggtagtgtgtgtaggacactgtgttgtctagagtacttgggacccaatcataccaaggggtcccgcgtctggcacctctttcccctctctcttccttctgctctctcaccttgtgatcgctggacatcccagctctgcttcatgttctgccatgagcaaaagtagcctgaagccctcaccagaagcagatgctggagccatgcttcttgtacagcctgaagaattaaggagggacagggaagtgatgggaggagaatggtgtggtccctggcaagggctccacctccagcctgtgtccgtggacctaggcaggggtctaatagacctgacgaacacaagccgcctatggacaactaaacaaaaagagcaccctgtaacacatgcccactggggcttcagctgtaaacactcacccctaaacactggattgggaaggcgagatgatgtagatatgaataagtcacagttgatgagaaaattactgagaattttctacgctgatgaaaacaccccaaccttcagcagccaccaccctgatcagtcagcagccatcaacatcaaggcaaggccctccataagcaaaaagagtatgactggctacagggtcatataatcattatttttggggggggaaataaagcatttttaaactaaggtatgtgcattttttaagcataatgttatttgacactctatagactatagtatagtgtaaacataagttttagatgcactgagaaaccaaaacatccatgtaaccgactttagtgcaacatttgcttcttacagtggtctggaaccaaactcacaatatctctgaggtctgtctgtagagagattttatataataaatatttaaatctttgaaaacatatttaatagacaaacttttaacaatactgatcgagaaaaattgagatataaattagtacaagtaacaataataataatgtgagaggtattatttcaggttaaaatgtaataaaaataataaatttgaaaacttggaaaagcattttataaaatagcataattatttaataatactcaatatataatagaacacataaattgttttacgactgttacacatatttaatttctagtttagcatccatccatcaatatcactgagcacagatggttttcagagaagtgtttatcaaacattcaagaaaataataactcaaattatttttcaaattattttagagaataagcaaaaagaaaccacaatccattatctgaaataaaaatacagtttactacttaactcacattataagaaaggtaagttactacatactataaattataaccctagattaaaaaccttgtatattagtaaaataaatgcacaattatataacatgtgcattaataacaagtgtgtttttctgtgtatagatgcaatttaagaaagttataattacagagtatatacaattagatatgtgttcacttaaagtgacaaaagaaactgttcacattttatgacatgctaccagagagtttcttgaaaacgtggtgactaaagaaaattaccataatagtaagtgagaataaatttaaaaaaacaatgagaactcaaaattctagtgtagtggaagaagtaatgaaaatattattaagaaaactaattaaaatgaagtatttcaaagtgaagatgattagtttaatatggatgtgccaatgctgaggtggtaataagacatccaatcgtccaagttacaaatatctagtagaaaaatggagcaatcaatctaggcaatttgttcaaatataactttttctttgtgagtgtaaaatagtatacagtgcacatcataaatactgtggttacatttcagtggtatggaaactatctccacttatgggatacatacatacatattcataaaagtaatatatgtgtttacaatacatatgtgtgtctatttatataaaaatcaataatagtcattagcttcatttgagtataactcaaatcaatgtatctattaatggtgtagcatcactaccaaaaatataacatgtacgattgcagtcaattacgataaaaacttttattatagttacatttgattcagaattcagttacctatagtaaattttaactagttacctaatttgtcagacatcaactgcaagatatgggttaagaatctgtagtttcggaattgccaggtattgtgcagagttaaaaaaaaaatcattgagatgtttgacggcacagaggttgactgaaaagttgttaggttctaaatgctaatattgactgaaatttttaaatcaggtaaccttgcactttgttatcaaaggcagttaaataacattgagactaaataaataaaactagaaaagaacatatcattaagcatagaaggatacaaatgtgttgcgtgttgtgtgtgtgtctgtgtgtgtgtgtgtttgtccatgtgaaagtctgaggaacactaagatatgagttcatataatcaggttgtagtcttgccttttaaaaatattttatgatttaatactgagaaagtcatggtctctgatgtttctatctatatacagacattttcactagatcatattgaaaatctcttttagctttctgactcagcatttaaatattaatgtgttttattttgaataatgaaagctataaaatacaagcagtctactttcatctcttaggaggtgtaatttttttgcagtttcgcatatgctcagacctaatcctagcaagacatgttattttcatgacatatattgacactgcattaatcaatcagctttaaaacttaaaaattccaattcagtgtatgtgctattttttaaatatgctaaatttaaagcaaaactacaaaaggtaatgtctaataggaagaatctgttttttctcatacaatttaaacatcatatagtgtgaagtaacagaagatgcttgcttctgtcctaatatagtattcagacaaagtttcttttgttttattgcatactgagtgatttggcctctattgaaaagcagttcagaaaatctcagaggaggataatgtctgttgacgataactgatgctggcttccatggaaatgctaatttggtaacagttgctgtcaatcagtc

SEQ ID NO: 460734 - DNA, 875 bp, Homo sapiens
ctgttcggttctgagggttgctgaatgttccctttttttttttttttttttttacgtggccagactcaatccacaatctctgggtgctgttgttcgctgacagtcctcctgcctggctttaacctgttcaacatcttcatcggtgagttgctggaaaacacagaaaatcatggaatcatgctagtcaatatggcagagaggatcagtgcttaccagaggtatactaggttcccattcatgccaagaggtgacatcaaaacttctgcaacaggagaaagcagtgaagcagtgtgcatagcaaggagtcaaggcctggagttgtgtgacagggcagcacaaaccagtgtgtgtctggagctaacagtggaatctgcagcaagaccacagaaagccctgtctgcagttgaaaggtgcctggactctactgttggtctgtttcctaaacttgcctgacatgaaccaccagggtacttgttaaaagctgttccccaagttctataccagatctacagaatcagaatcttcagaaaagaggctttgaatcagtacttttaacaagccctcagatggttcttatgatcaggcaagtttggaaacagcctgggagtgatgccggccatggaaattaattctggagcagttctgaacgatgataagggctgtgtttgcaaggtgcgctagctacagactgactgaacattgcaatgataaaaaggacagaggaaagcaagagggtacatctgggaggagacattaaagtggtgaacggaaatgtttatgggtcagaaaatcacagttgtagccatttggcatagtgttctagaacatgccttgatgaagagataaatagaatctcaatagaatctccttcttct

SEQ ID NO: 460735 - DNA, 3804 bp, Homo sapiens
gactcccaccaggcgataaatatcaaagcttagtatacacttagactgagagttcaaagagaggcagattcaccatggggctagagcctgaacggagacgccctttgtggagggcgactggattctccccatgggaaaggcttaggatttgtgcacattccaccctagacctctggggaaagcagcagaccaacttcgcgggttgtgaaaaaccatccgggctggtcgattgtgtttccagcgggctccacatctatcctgagagcaagatgccccatttggccagttcagccgcagcacccatgaccttctttcaagttctctatatttcagccaaattaaacctcatgctgtgtccccaacacaatggccccctggattgggatggccgctggttgaaagcctgctgcaataatccaaataaaacacaaccagggctgccccagcccagtaagtctggaaagatagagaataacgtgggagactgggatgcatcagacacgggatcccataactagatcatgcattggcagaaattcctgcttcaatgaagacctcccctcacaattgccttagttagctacagaagaattcattcaaaggcaacccaaatctggaaaaaaatcaaagatgtgggaaatgggaaatagaattcatacatttatttgctataaatataattatgtcaaaatgttttctatcaaaaacattggcccaatggaccaatgctaagaagtttaaaaaaaaaaaaaaaaaagcaaagcggcttcttctgccccctggtggcttttggggaaaagtcactgaaagggcagaaagagcaaaggggaccagtttctctccactttgtacccaagggtcaactgagcacgcaacacccttaaaaataagggagaagtgcagagggctcgctcccctcccgcgccagctctctctcggtcaaggttgggccacagccagtgtctcctccactagatccgagccagtggctctgcccaggtggacagcagagtcgccgctgagattctaactgcttccatcggggctctcggagcagctgttggaacaggatggggagcagagcaattctgacagtgtcaggaaaacatccccctggcttccccgtgcccaggcttgaagacccaggggctggatacacagccacggacacaacagaattcacttttaacgaggcttcagaaaacaacgtttaactatataaacacctgtttttggaaaatgctgcagatctatttccaaatactgtcttccagcccactctcgctcccactgaggcagcatcccacgggacccaacgtcaccacttttccagtccaaaaaatgtgctttcgatgtcctgatttgaggctgctcttcctctaacctgtgcggctctgtgaaaagccaattttaagatgcgatgcctcctccagaattcgcctgtatgcagaagaatgatgcagaaggaggcagaaaagccggagcagttgggggcaagatgaaaacagtctagtcattatcagttaaactgtaactgcgtgcggcagcgtgctgagcgagacaatcagcggagcccgtgaaatgttgctggttttccagatagcccgtttagttttgtctcaaacaaaacaaacaaaaatgtgcataattgtacccaggtctcaagcccgttttatttctccattataccaaggaaaacttgaatggtggccccactggagtgaggctcccgtgaatatgaataattgttcatgaatatgaataatgggttcctatgaataattgtttatccacattcgattagagagcagcagccattagcatctttttagccttctgacattagggtcttctttgtgagcaggtatttaaaatggattcaattccacggtcttgaaggcctgttccgatatcgtgaattttgcagataactgtaatttatcctgtaagagaaccttttgattgctttaactatgaaatatttccattgcattatacatttgcttataatagagtataggaaatgtattttaaccatttcctggacaattcaacattgtcattaccaaagtcaactctccgactggcctgaaactaccctgttgtttagataaccttagctaagtagagtttactccaccttttttctgtaatgtttgttaaaacttgaatcttgtgacctttcttttttggttgatacctgctttgatcaagatataacgggctgaagaacagcagcgaggctgcgtgctgagctgtctacacctgcaaatctcatcaactcctatcagctgggcagcaggttgcccagttcaccactcctgatgaggaagctgaagtttgctgaacttccttctggcactaacgtcacacacttcatagcgctcctaggacttgaacttagtctggtttgccttccaagtccagattctccaaaacattttttctttttcttttaacttactaaatggtgaagtggccagataagcagcctacagataagtgaggtctacaattcatcacacaccgataatgctgacatataacagtttccgtatctttacaaaggcaataaatggatgaagagatgtgatgaggaaaccacgctctctatatgcatgcaagctatttggaagctctaataaaaacttgggaaacaaaacgtctacagcaactttaattcttagtctacactgaaacgtgaaaggtagtcaggagttgttgccgatgggattaaaattgtttttacttttcttcagtattcttttctatattgtctaaatgtttcctgatgaacactgtccatttcaactaagaaaaggctaagtccattctggaggaaaaaaatgacagtgggaattgtaactaatatttaaatcacttggaaataggattcattttatcaccaacctaccaggaccctctttactgtaaagagataaaacactagtaaatgtattgcataaatataccacagactattatgaacaattaaagcacactttatattttttaaaatttctctgtaaacgttctaagataaattatatttgaatttgataaagtcctattttgaatccctttgggttataaaagtctattccctaatttatcttgtgaaaatccagacttctggcttaaaatgggatttactttactctctgagaaaggaatccaccgtactttgatttagataaccacatggtctggaactccatttagtgaaaattaaattttatgactcatatagccaatgttttacctctgttttctacatattcacagcaggtgaaatgtgttcaggaatttaaagatgaaaacatatgtcttttaagtaatgaccaccaagagccactgcagatagaaacagctttattttttccattcaggctttatcaaatagcttgttcaaaaagcatatacaagagcaaaaaataccacatgcagtcaaacttcttttgccttatagtcattggctttcttttagaaaagagtgtgcacttgaataacttctaattcaaacattttccaactgtttctacttcatttttcaagttagcaacgacagatacattttagttaactgtttcatattccttatctttattcatactgaaataatataaagcctataaaatcaaagcatatactgttcagaaatctggaaaggttcttttacataatagattctgacacgttaagaaactacacacaacaaatatttgcaaaatgaatgaaaaataggataaagctatttaaaagtcaacatagtaatatttatctaaataattttaatcaaatgta

SEQ ID NO: 460736 - DNA, 1125 bp, Homo sapiens
cacctgtgccatggcaacatctgggagttaccacccctttctatggcaatgctaccttcagcacactgtctgtggggtagccctgctctgcaaaggcagtcacaaagctgtaacaccaccagagctgagacctgtggccctcttcagatcccccaccagttctctagtgcaaggttccaccttaaggtcgtcaggcacccctcccacttatccaacaagccctggcccgtatcctctactgcctgaagaagtaaacctaaccagtaccaccaggaacggggccccatatcagcccccagaattgaaaatgttttcattgcagtgggtagctgatggagatggaggagtggccggagtgtatgtgcctttttctatgcctgatttggctttgtgcaagcaaaaatatggaaccgctcctgttttggcactccataacttagaaaaacctttcaccctctatgtggctgaaaaacaagggatggctttgggcgccctaactcaaaggctcgggattatccctagaccaatgacttatttttctaaacacctagaccaggaagtcccaaactttcccacatttttctgtcttcttctgagccctccaaactgttccaacctctgcctgttacaccgttccaaaatcgtttccacattttcagtaatgatcaaagttttcttcttctcccagagagacgagaatgtgtttctccaggggccaaagcctggggtgaagctgtacgtcggcagccccagccccagaaaaggaacctactctccatgcacgtctctctggagcaacctgaagacaggatcttggcctcaggacagccatggccacaggagagcacacccctgatgaccctctgctcagaggcaaaaggaggcaagacctccaagagatgctgagagaagtgggcctggatgttgagtactggttacccaagctgcaggaacacctgggtgtgacctgtgcccaggccttacaacacctagacaaaaacaacctcaagaagctgtaatcccagacacaacatccatgggagaaagctgcttaatctgtcacactcaaaaagtctttcagcgttacaggagtctcagcctctgagttggtctgggtcaatgtga

SEQ ID NO: 460737 - DNA, 1262 bp, Homo sapiens
cacctgtgccatggcaacatctgggagttaccacccctttctatggcaatgctaccttcagcacactgtctgtggggtagccctgctctgcaaaggcagtcacaaagctgtaacaccaccagagctgagacctgtggccctcttcagatcccccaccagttctctagtgcaaggttccaccttaaggtcgtcaggcacccctcccacttatccaacaagccctggcccgtatcctctactgcctgaagaagtaaacctaaccagtaccaccaggaacggggccccatatcagcccccagaattgaaaatgttttcattgcagtgggtagctgatggagatggaggagtggccggagtgtatgtgcctttttctatgcctgatttggctttgtgcaagcaaaaatatggaaccgctcctgttttggcactccataacttagaaaaacctttcaccctctatgtggctgaaaaacaagggatggctttgggcgccctaactcaaaggctcgggattatccctagaccaatgacttatttttctaaacacctagaccaggaagtcccaaactttcccacatttttctgtcttcttctgagccctccaaactgttccaacctctgcctgttacaccgttccaaaatcgtttccacattttcagtaatgatcaaagttttcttcttctcccagagagacgagaatgtgtttctccaggggccaaagcctggggtgaagctgtacgtcggcagccccagccccagaaaaggaacctactctccatgcacgtctctctggagcaacctgaagacaggatcttggcctcaggacagttttgcaggctgggaagtccaagataaagccaccagcatctgacaatggccttcttgcaacatcctccaacagagaggaacaacatgtcctcacatggcagaagagcacagaggaaaaagaagaccaaactcactcttttataagagcattaatcccacataggaaggcagagccctcatggcccttttgcttcccaaaattctcatattctaataccaccacggtgggaaccaaatttcaacatgagttttggagcagacaaacattcaaaccatagcaccgctcaaacctttgatgagaccacatcctcagcaaacacctagattaaaatctggtgagctcttaaagcagagaacataactacactatgcctggacttctgacttatagaaactgtgagataataaatgtgtgtctttaaaccctcaagttt

SEQ ID NO: 460738 - DNA, 1542 bp, Homo sapiens
tccgggaggtccccgtcccggcagcccgcggccgcgtccttggccctcctccgggggaacctcgttcattccaaactctggaaggccggctgtccttcggttactgataaggacgcgagctcttggaaacccgggcacagagaggttaagtaacttgccccagggcacacagctagctgatgtcagtgccagaattccaaccgcggctgtcggaccccatgccatcctcatgtcaacccactaaggacgggatccttctgtccatcttaaagatgaggcaactaaggcacatggaaatttaagtataataccttgcccaaggtcacctagctggaaaatggacgagacagaaagcgaacccagggctcctttctgtacgcagaacccgcggtcttggccataggcgatgccacttccgacagcccagcagggtctggccctgggtcccagaggcgcagcccctgcggggtttggatgggttcctgcggcctccgatccgctggtgaattgggtgtgtctgagcatcgtccctgctcagcccgcaggcgtaggatagggaggcgtctccgggagtctactccgggacgggtccgcggtcctcagtcgggatggagcgggggcggaggcagccggagggaactggagtccccattgcagaactgcggggccgggctctgggctgggcgcctgccccgcgcggccggcagagggcgctgccgcacacgccttggatctcactgtcactgggacctcggggcaggctgacgtcggcctgcagacgcctggactcagaaccccgaagcaagaagcttcccttcctggtggctgccatccctcaggcccaccatttcagccctggacctgctttccctgaccacttttccccatcttctgtgctcctgccatcccaccactggccttcaagacttccccagtccctgcacagcgggttttgtcatctgctgagaggcgcggacactgattcccatcccattaaaaggcctagatgtctgcaagtcaaattcagccttgcttccccttctcgccctctggtgatttaaaatagggatacatcatctacttggaataaatgactaatttttctcttctccaaaatacggtgggtatggggagggttggttaaaaatttgctctggaaattcaatcaagtaccttcactccacagacatgtattgagagcccattatatgtaggtgctgggaggacagcagagaacctagcatgagctcatgggctcaccttctcctgttcccacctccacctggctcctttcttcatggctccaactttcaggagcagaacttgggaatgttctagctccaggacctgccaatgccgtcccatcctttcctagttggctttccttccattcataagaacactgtgacaactgaaataattcaggtcatatttatgaaacatctattacaatgagaatcccatagtgacataatactccactgttcacaggaaaatgctagctaaaacaaacaacagtgactgtctggcaagggacgcatc

SEQ ID NO: 460739 - DNA, 867 bp, Homo sapiens
ccggatcttaaaggaaaggctttcagtttttcctaattcagtatgatgctacctgcagccttggatacccaggcttcccagaaaaagcagctgcaactccaccaaagtggggggttagaccccttctttgcagaatgggtttgtttagaaaaacttcatcgaacagccaatccagagattctaggcaggctgtctgatgtggtctgcggggtaggcccaaatcttgggtccaggaggactggtctggagcctgagtctggagggatgttgacagatcctcggtctgtgggagttggcctggcactggggcctactggagaagtaaatagacaaaatgaaattaacacttgggactcaatgccctggtgggtttcctggaaccttgcaaaaggaagggccatatggcatgaaagaaaaagtcgtatggaagacctacacaaaataaaagcaagtctcattacttttcaaggggagtgtagaagcgattagtctctgatgataataagggtaccccccatgtaaaactgccacaagctctcagaagtgagactttagctccttacaaatgctgagcagacgtgaacaccctcctgggagattgatgagtcctattaaccttgttgcatagatggaaactcagaaacaaagtgactctgaggattaagaggaagtcaatgtcagcaccaggattagaattcacacttgcctggtttctcagcccacaaccagctcccccatggattcctgctttgtctccctccccaagtgaggggacagggtgtttccaaactttaaaagaatcctgttatcctcaggcctctgccttgtaggaagatcctttcttttaataaattacagagctgagaa

SEQ ID NO: 460740 - DNA, 728 bp, Homo sapiens
tacaagaagcatggcgccagcatctgctcagcttctgcgagtagccaaatcttccctctctagagccactggccaacacttttccgttgccgagttccttagtgccagggctcggccagggatgcaggtgctggagctaggcctaggaacagaggcaaaatgatcccaaaagctgatgagagggtctgggcagcaagaactaaatctctttccttcctccaggacaacaccttcctccagcacaacaggggcagaggagccggtcttctggggagaagcttttacacatctggccctctcctttgtgatattgggaagctgcatgtccagaggcagcagatactctcaggtgttctggatgtgattctcgagtgcctgggcttcaaatgggagctccatcagccccagctttttcagtctgagaccttggccaagctctacctgaaagccctggcgcagggcaccacacaccccctgagggagctggaggagcttctgcgagctcaatcacctaagaagaccaaagaaaaatcccctgcaaagaggatcatcatttccttgaagatcaatgacccactggtcactaaagtcggtatgtatatacccgtctatattctgagaatgccattgaacaaatggtcctcccagatttaaaaatgcacaagcaacaacaaagcaaaacaaaccaacagtagacagtgttcagtgctttcttattaaaaaggccc

SEQ ID NO: 460741 - DNA, 3668 bp, Homo sapiens
ggacagagcctcagacggttgggcggacggacggcccgacaggcgggcatgcgggcggccagactgtagccgagcagcgaggctccggccgcagccatggagcggcggctgcgcgcgctggagcagctggcgcggggcgaggccggcggctgcccggggctcgacggcctcctagatctgctgctggcgctgcaccacgagctcagcagcggccccctacggcgggagcgcagcgtggcgcagttcctgagctgggggacccgcacccccacgggcttccctcgcagactccctgcagtggccctgacgcgtaccaccggacccccgcggcccgcacactcgcctgcacacctcaccctcactccaattctcacacacgctctctccctctcacagaccccgacacatgcacacacacaccaacttgtgctcagccccttcgtatcaaaggtgaaagaactgcgtctgcagagagatgactttgagatcttgaaggtgatcggccgaggagcctttggggaggtcaccgtggtgaggcagagggacactgggcagatttttgccatgaaaatgctgcacaagtgggagatgctgaagagggctgagacagcctgtttccgggaggagcgggatgtgctcgtgaaaggggacagccgttgggtgaccactctgcactatgccttccaagacgaggagtacctgtaccttgtgatggactactatgctggtggggacctcctgacgctgctgagccgcttcgaggaccgtctcccgcccgagctggcccagttctacctggctgagatggtgctggccatccactcgctgcaccagctgggttatgtccacagggatgtcaagccagacaacgtcctgctggatgtgaacgggcacattcgcctggctgacttcggctcctgcctgcgtctcaacaccaacggcatggtggattcatcagtggcagtagggacgccggactatatctcccctgagatcctgcaggccatggaggagggcaagggccactacggcccacagtgtgactggtggtcgcttggagtctgcgcctatgagctgctctttggggagacgcccttctatgctgagtccttggtggaaacctacggcaagatcatgaaccacgaggaccacctgcagttccccccggacgtgcctgacgtgccagccagcgcccaagacctgatccgccagctgctgtgtcgccaggaagagcggctaggccgtggtgggctggatgacttccggaaccatcctttcttcgaaggcgtggactgggagcggctggcgagcagcacggccccctatattcctgagctgcggggacccatggacacctccaactttgatgtggatgacgacaccctcaaccatccagggaccctgccaccgccctcccacggggccttctccggccatcacctgccattcgtgggcttcacctacacctcaggcagtcacagtcctgagagcagctctgaggcttgggctgccctggagcggaagctccagtgtctggagcaggagaaggtggagctgagcaggaagcaccaagaggccctgcacgcccccacagaccatcgggagctggagcagctacggaaggaagtgcagactctgcgggacaggctgccagagatgctgagggacaaggcctcattgtcccagacggatgggcccccagctggtagcccaggtcaggacagtgacctacggcaggagcttgaccgacttcaccgggagctggccgagggtcgggcagggctgcaggctcaggagcaggagctctgcagggcccaggggcagcaggaggagctgcttcagaggctacaggaggcccaggagagagaggcggccacagctagccagacccgggccctgagctcccagctggaggaagcccgggctgcccagagggagctggaggcccaggtgtcctccctgagccggcaggtgacgcagctgcagggacagtgggagcaacgccttgaggagtcgtcccaggccaagaccatccacacagcctctgagaccaacgggatgggaccccctgagggtgggcctcaggaggcccaactgaggaaggaggtggccgccctgcgagagcagctggagcaggcccacagccacaggccgagtggtaaggaggaggctctgtgccagctgcaggaggaaaaccggaggctgagccgggagcaggagcggctagaagcagagctggcccaggagcaggagagcaagcagcggctggagggtgagcggcgggagacggagagcaactgggaggcccagctcgccgacatcctcagctgggtgaatgatgagaaggtctcaagaggctacctgcaggccctggccaccaagatggcagaggagctggagtccttgaggaacgtaggcacccagacgctccctgcccggccactggaccaccagtggaaggcgcggcgactgcagaagatggaggcctcggccaggctggagctgcagtcagcgctggaggccgagatccgcgccaagcagggcctgcaggagcggctgacacaggtgcaggaggcccagctgcaggctgagcgccgtctgcaggaggccgagaagcagagccaggccctgcaacaggagctcgccatgctgcgggaggagctgcgggcccgagggccagtggacaccaagccctcaaactccctgattcccttcctgtccttccggagctcagagaaggattctgccaaggaccctggcatctcaggagaggccacaaggcatggaggagagccagatctgaggccggagggccgacgcagcctgcgcatgggggctgtgttccccagagcacccactgccaacacagcctctacagaaggtcttcctgctaaggtcagtgcccagaggggcaagcagggtgggggcaccaagcagttctgccaggctgaatgggcactgtggggacactccacgtgcatcgtggctagcaggcacaattggggtggaggtggtggcgatgagcttgcctgccgccatagattggctgggactcggaggtcactgttgcctggctcagccccttgtctttcctgacccctcagggatggggcatggggccctgggaggccttgggtaatggctgtccccctccccagcccggctcacacacgctgcgcccccggagcttcccatccccgaccaagtgtctccgctgcacctcgctgatgctgggcctgggccgccagggcctgggttgtgatggtgagagtccccacccactatgctccagccacggtcccagcctgcggctacttttgtcacacaacctgtgccccacaggccccaccctgccccgtgccccctgacctcctccgcacagccctgggagtacaccccgaaacaggcacaggcactgcctatgagggctttctgtcggtgccgcggccctcaggtgtccggcggggctggcagcgcgtgtttgctgccctgagtgactcacgcctgctgctgtttgacgcccctgacctgaggctcagcccgcccagtggggccctcctgcaggtcctagatctgaggcccgtccttgccccattatggcgctggtcgcatggctctggagttgtctgtttgcctgtctggcctactccctgctgctgacagtgcac

SEQ ID NO: 460742 - DNA, 3405 bp, Homo sapiens
ggacagagcctcagacggttgggcggacggacggcccgacaggcgggcatgcgggcggccagactgtagccgagcagcgaggctccggccgcagccatggagcggcggctgcgcgcgctggagcagctggcgcggggcgaggccggcggctgcccggggctcgacggcctcctagatctgctgctggcgctgcaccacgagctcagcagcggccccctacggcgggagcgcagcgtggcgcagttcctgagctgggggacccgcacccccacgggcttccctcgcagactccctgcagtggccctgacgcgtaccaccggacccccgcggcccgcacactcgcctgcacacctcaccctcactccaattctcacacacgctctctccctctcacagaccccgacacatgcacacacacaccaacttgtgctcagccccttcgtatcaaaggtgaaagaactgcgtctgcagagagatgactttgagatcttgaaggtgatcggccgaggagcctttggggaggtcaccgtggtgaggcagagggacactgggcagatttttgccatgaaaatgctgcacaagtgggagatgctgaagagggctgagacagcctgtttccgggaggagcgggatgtgctcgtgaaaggggacagccgttgggtgaccactctgcactatgccttccaagacgaggagtacctgtaccttgtgatggactactatgctggtggggacctcctgacgctgctgagccgcttcgaggaccgtctcccgcccgagctggcccagttctacctggctgagatggtgctggccatccactcgctgcaccagctgggttatgtccacagggatgtcaagccagacaacgtcctgctggatgtgaacgggcacattcgcctggctgacttcggctcctgcctgcgtctcaacaccaacggcatggtggattcatcagtggcagtagggacgccggactatatctcccctgagatcctgcaggccatggaggagggcaagggccactacggcccacagtgtgactggtggtcgcttggagtctgcgcctatgagctgctctttggggagacgcccttctatgctgagtccttggtggaaacctacggcaagatcatgaaccacgaggaccacctgcagttccccccggacgtgcctgacgtgccagccagcgcccaagacctgatccgccagctgctgtgtcgccaggaagagcggctaggccgtggtgggctggatgacttccggaaccatcctttcttcgaaggcgtggactgggagcggctggcgagcagcacggccccctatattcctgagctgcggggacccatggacacctccaactttgatgtggatgacgacaccctcaaccatccagggaccctgccaccgccctcccacggggccttctccggccatcacctgccattcgtgggcttcacctacacctcaggcagtcacagtcctgagagcagctctgaggcttgggctgccctggagcggaagctccagtgtctggagcaggagaaggtggagctgagcaggaagcaccaagaggccctgcacgcccccacagaccatcgggagctggagcagctacggaaggaagtgcagactctgcgggacaggctgccagagatgctgagggacaaggcctcattgtcccagacggatgggcccccagctggtagcccaggtcaggacagtgacctacggcaggagcttgaccgacttcaccgggagctggccgagggtcgggcagggctgcaggctcaggagcaggagctctgcagggcccaggggcagcaggaggagctgcttcagaggctacaggaggcccaggagagagaggcggccacagctagccagacccgggccctgagctcccagctggaggaagcccgggctgcccagagggagctggaggcccaggtgtcctccctgagccggcaggtgacgcagctgcagggacagtgggagcaacgccttgaggagtcgtcccaggccaagaccatccacacagcctctgagaccaacgggatgggaccccctgagggtgggcctcaggaggcccaactgaggaaggaggtggccgccctgcgagagcagctggagcaggcccacagccacaggccgagtggtaaggaggaggctctgtgccagctgcaggaggaaaaccggaggctgagccgggagcaggagcggctagaagcagagctggcccaggagcaggagagcaagcagcggctggagggtgagcggcgggagacggagagcaactgggaggcccagctcgccgacatcctcagctgggtgaatgatgagaaggtctcaagaggctacctgcaggccctggccaccaagatggcagaggagctggagtccttgaggaacgtaggcacccagacgctccctgcccggccactggaccaccagtggaaggcgcggcgactgcagaagatggaggcctcggccaggctggagctgcagtcagcgctggaggccgagatccgcgccaagcagggcctgcaggagcggctgacacaggtgcaggaggcccagctgcaggctgagcgccgtctgcaggaggccgagaagcagagccaggccctgcaacaggagctcgccatgctgcgggaggagctgcgggcccgagggccagtggacaccaagccctcaaactccctgattcccttcctgtccttccggagctcagagaaggattctgccaaggaccctggcatctcaggagaggccacaaggcatggaggagagccagatctgaggccggagggccgacgcagcctgcgcatgggggctgtgttccccagagcacccactgccaacacagcctctacagaaggtcttcctgctaagcccggctcacacacgctgcgcccccggagcttcccatccccgaccaagtgtctccgctgcacctcgctgatgctgggcctgggccgccagggcctgggttgtgatggtgagagtccccacccactatgctccagccacggtcccagcctgcggctacttttgtcacacaacctgtgccccacaggccccaccctgccccgtgccccctgacctcctccgcacagccctgggagtacaccccgaaacaggcacaggcactgcctatgagggctttctgtcggtgccgcggccctcaggtgtccggcggggctggcagcgcgtgtttgctgccctgagtgactcacgcctgctgctgtttgacgcccctgacctgaggctcagcccgcccagtggggccctcctgcaggtcctagatctgaggcccgtccttgccccattatggcgctggtcgcatggctctggagttgtctgtttgcctgtctggcctactccctgctgctgacagtgcac

SEQ ID NO: 460743 - DNA, 798 bp, Homo sapiens
  misc_feature (22)..(22): n is a, c, g, or t
gttggggtaggatgcatggcanagacactatatacaaggaacatttttttaacccatcgaataatcacaaatgatgcaagccaaaagacaatggatcaaaatctttaaagtaaaaaactatctacctagaattctatatccaacaaaaagtccttcaaaatgaaggccacaaggcatggaggagagccagatctgaggccggagggccgacgcagcctgcgcatgggggctgtgttccccagagcacccactgccaacacagcctctacagaaggtcttcctgctaagcccggctcacacacgctgcgcccccggagcttcccatccccgaccaagtgtctccgctgcacctcgctgatgctgggcctgggccgccagggcctgggttgtgatggtgagagtccccacccactatgctccagccacggtcccagcctgcggctacttttgtcacacaacctgtgccccacaggccccaccctgccccgtgccccctgacctcctccgcacagccctgggagtacaccccgaaacaggcacaggcactgcctatgagggctttctgtcggtgccgcggccctcaggtgtccggcggggctggcagcgcgtgtttgctgccctgagtgactcacgcctgctgctgtttgacgcccctgacctgaggctcagcccgcccagtggggccctcctgcaggtcctagatctgaggcccgtccttgccccattatggcgctggtcgcatggctctggagttgtctgtttgcctgtctggcctactccctgctgctgacagtgcac

SEQ ID NO: 460744 - DNA, 2364 bp, Homo sapiens
gatccagctatggagaaagccgcagatctgcaggacacagcctcgttaactctgaagtttaagtttaacccaaagctgggcattgataatcctgtcctctccctggccgaagaccacgacccctatgatccctggagcctggagcggcctcgcttctgtttactgagcaaagaggagggcaagagttttggcttccacctgcagcaggagctgggcagggctgggcatgtggtgtgcagggtggacccaggcacctctgcccagcgccagggtcttcaggaaggagacaggatcctggcggtgaacaatgatgttgtggaacacgaagactatgcggtggtggtacgccgcatccgggccagcagccctcgggtgttgctgacagtattggcacggcatgcacatgacgtggcccgagctcagctgggagaagatgcccacctctgtcccaccctaggcccaggggtccggccccggctgtgccacatagtgaaagatgagggtggttttggcttcagtgtcacccatggcaatcagggtcctttctggttggtgctaagtactggaggagcagctgagcgggcaggggtgccccccggggcccggctgctggaagtgaatggggtcagtgtggagaagttcactcacaaccaactcaccaggaaggtgtgactgcctgtctcccactctcctcccccaatccgggcctgggccccacctcgggaagacgcctccttccccatgcgcctaacctccttatctggtctcctacctttatcaccatcctccccctctacagtttgtgccaggctccacttagtgcctgggaggaggggctgtggggggagcatacctcttctctccctgcccaggtgttatactgatgccctgctgggtccccacagctttggcagagtggacagcaggtgaccttgctggtggcagggccagaggtggaagaacagtgtcgccagctgggattgcccctggctgcacccctggcagagggctgggcactgcccaccaagccccgctgcctgcacctggagaaagggccccagggttttgggttcctgctccgggaggaaaagggccttgacggtcgccctggtgagtgggagccctgggggcggtgggggaaggtgggccttggggtgggcacacaagcgtatatacacctttcagtgcaccgaagaggtgtccctgtctgagctctggccctgggccgcctcttcccgttcactctggggtcagtcccctggtgtgtacacagtggcctaggatagctggagaggagcagtgaggatgtctatgccccaggacagttcctgtgggaggtggacccgggactgccagccaagaaggctgggatgcaggctggggaccggctggtggctgtggctggggagagcgtggaggggctgggccatgaggagacagtgtccaggatccaggggcagggctcctgtgtctccctcactgtcgtcgaccctgaggcggaccgcttcttcagcatgaatagcctgtccccactccttttcttggagaacacagaggctcccgcctcgccccggggcagcagttcagcctcagtggttgagacagaggacccttcactggaagacacaagcgtgcattctgtccttcttggctcccgacagtgcttcctgtaccctgggcctggtggcagctatggcttccgactcagttgtgtggccagtgggcctcgtctcttcatctcccaggtgactccaggaggctcagctgcccgggctgggctgcaagtgggagacgtgattctggaagtgaacgggtatcctgttgggggacagaatgacctggagaggcttcagcagctgcctgaggctgagccacccctctgcctgaagctggcagccaggtctctgcggggcttggaagcctggattccccctggggctgcagagccagaccagagggactcagacaccaccgatcacaggctggcccaggtgctccctcccttcctgcaggcccacctgccagcagagggtgtggttggaggcctcagacaggtccctgaaggagtctgaggctccagaggatgtcatatgggagttttagagagctgtgtcccaaggatgaaggtgtggctgtgggtctggctaggattgaagccatctggaccttttctagatatgactccaggacccttgagtgtaatgcaaaaatttggagaccagctatgcctgccctctgtgggtgccttagcattgcgggagggtggtgcttggtcaccgttgcatttgttatagaaatggccattcgccataaatctgactgcctgtgtttgtgttggtgggggtaaggggcagtggtgtgaag

SEQ ID NO: 460745 - DNA, 2083 bp, Homo sapiens
gatccagctatggagaaagccgcagatctgcaggacacagcctcgttaactctgaagtttaagtttaacccaaagctgggcattgataatcctgtcctctccctggccgaagaccacgacccctatgatccctggagcctggagcggcctcgcttctgtttactgagcaaagaggagggcaagagttttggcttccacctgcagcaggagctgggcagggctgggcatgtggtgtgcagggtggacccaggcacctctgcccagcgccagggtcttcaggaaggagacaggatcctggcggtgaacaatgatgttgtggaacacgaagactatgcggtggtggtacgccgcatccgggccagcagccctcgggtgttgctgacagtattggcacggcatgcacatgacgtggcccgagctcagctgggagaagatgcccacctctgtcccaccctaggcccaggggtccggccccggctgtgccacatagtgaaagatgagggtggttttggcttcagtgtcacccatggcaatcagggtcctttctggttggtgctaagtactggaggagcagctgagcgggcaggggtgccccccggggcccggctgctggaagtgaatgggctttggcagagtggacagcaggtgaccttgctggtggcagggccagaggtggaagaacagtgtcgccagctgggattgcccctggctgcacccctggcagagggctgggcactgcccaccaagccccgctgcctgcacctggagaaagggccccagggttttgggttcctgctccgggaggaaaagggccttgacggtcgccctggtgagtgggagccctgggggcggtgggggaaggtgggccttggggtgggcacacaagcgtatatacacctttcagtgcaccgaagaggtgtccctgtctgagctctggccctgggccgcctcttcccgttcactctggggtcagtcccctggtgtgtacacagtggcctaggatagctggagaggagcagtgaggatgtctatgccccaggacagttcctgtgggaggtggacccgggactgccagccaagaaggctgggatgcaggctggggaccggctggtggctgtggctggggagagcgtggaggggctgggccatgaggagacagtgtccaggatccaggggcagggctcctgtgtctccctcactgtcgtcgaccctgaggcggaccgcttcttcagcatgaatagcctgtccccactccttttcttggagaacacagaggctcccgcctcgccccggggcagcagttcagcctcagtggttgagacagaggacccttcactggaagacacaagcgtgcattctgtccttcttggctcccgacagtgcttcctgtaccctgggcctggtggcagctatggcttccgactcagttgtgtggccagtgggcctcgtctcttcatctcccaggtgactccaggaggctcagctgcccgggctgggctgcaagtgggagacgtgattctggaagtgaacgggtatcctgttgggggacagaatgacctggagaggcttcagcagctgcctgaggctgagccacccctctgcctgaagctggcagccaggtctctgcggggcttggaagcctggattccccctggggctgcagagccagaccagagggactcagacaccaccgatcacaggctggcccaggtgctccctcccttcctgcaggcccacctgccagcagagggtgtggttggaggcctcagacaggtccctgaaggagtctgaggctccagaggatgtcatatgggagttttagagagctgtgtcccaaggatgaaggtgtggctgtgggtctggctaggattgaagccatctggaccttttctagatatgactccaggacccttgagtgtaatgcaaaaatttggagaccagctatgcctgccctctgtgggtgccttagcattgcgggagggtggtgcttggtcaccgttgcatttgttatagaaatggccattcgccataaatctgactgcctgtgtttgtgttggtgggggtaaggggcagtggtgtgaag

SEQ ID NO: 460746 - DNA, 969 bp, Homo sapiens
ctacgctgggaagagatgagctgatgcccagctcagctgctcttctgagtcttcaatttccagaccaacctcccttaaggtgactgacagtggggacctcaacctcacctacagggatgtggactgatcccatggtctcagtgagagacccaggcaatatttctacatgaagcatgttggatttctgaattatccagcctcaaatgacaccgggatgggacagtgttaacccagataagaaaactgaggctctgagaagttgagggacttggtcaaggccacatgtcagtgagtgccagaagtttctgctactcctacaaaatcagaagttccccaaatccaaaccatctcgacctacccctgtgacccgccaaaagaagctggccttccccatcctcctgtctccgcagtgccatttgcctttcagtctcctaaaaagaagcacttactctcttccccaaatcgcagagggaagcttcaaatacacttctaatcatcctcagtacccagcagtatataggaagttattgtcccaaagttgtgtgtcatgcccgaagtgtctgggatccccgagtgcctgtggtgcccaagagctatgaatctgctatcatcaacacagagggtaccttctgaatgggctatgtctacagtgatgctgcaaatggaagctaaccctaggatgactggcctctgacacttgagccatcccatcatctgtcatgggttgacccatccatcccctcaatgagcctgaccttcaggaccactgacagaggagcagtcaatagaaattaattgttaaatacccagaaaatctgaaatggtatttaatatgcagttcatcaagagcaaaagttccttaaatcttcatctagaaaagttatttataagggatgaatatgttgtatgaatatgttgtatgcaaatattatattcaagggcaagaccatgaaaacagtttaagaatcc

SEQ ID NO: 460747 - DNA, 1714 bp, Homo sapiens
cctcagctggcttttgagtttgcacggacctacgttaaaacaagcatcacatttagaataaaggcgatgatgctcttctcttacaagctgctcaggcctgtcctggagttttccgttctgtttcctcatcacattcaagaggcccctacatcaataagaaaaggtcaagaggagaaacagcaggattgttacacagctggaagccatgaggcccctggaatccagattgacaaccagttggacacagccatttcaaatccctttcttgttttaagaggcttctttgactgccaccttttacacacagcaggtttgcaagcccttctagcacccacagatgacggggcggctggtcacagacgctcctcacctcccagacggcgtggcggcggggcagagacactcctcagttctcagacggggtcgcggctggacagaggcgctcttcacatctcagacggggcggcggggcagaggcgctccccacatcccagacgatgggctgccgggcagagacgctcctcacttcctagacgggatgacggccaggaagaggcgctcctcacttcccagactgggcggccgggcagaggggctcctcacatcccagacaatgggcagccaggcagagacgctcctcacttcctagatggggtggtggccgggcagaggctgccatctcggcgctttgggaggccaaggcaggcggctgggaggtggaggttgtagcgagccgagatcacgccactgcactccagcctgggcaccactgagcactgagctgctcttctgagtcttcaatttccagaccaacctcccttaaggtgactgacagtggggacctcaacctcacctacagggatgtggactgatcccatggtctcagtgagagacccaggcaatatttctacatgaagcatgttggatttctgaattatccagcctcaaatgacaccgggatgggacagtgttaacccagataagaaaactgaggctctgagaagttgagggacttggtcaaggccacatgtcagtgagtgccagaagtttctgctactcctacaaaatcagaagttccccaaatccaaaccatctcgacctacccctgtgacccgccaaaagaagctggccttccccatcctcctgtctccgcagtgccatttgcctttcagtctcctaaaaagaagcacttactctcttccccaaatcgcagagggaagcttcaaatacacttctaatcatcctcagtacccagcagtatataggaagttattgtcccaaagttgtgtgtcatgcccgaagtgtctgggatccccgagtgcctgtggtgcccaagagctatgaatctgctatcatcaacacagagggtaccttctgaatgggctatgtctacagtgatgctgcaaatggaagctaaccctaggatgactggcctctgacacttgagccatcccatcatctgtcatgggttgacccatccatcccctcaatgagcctgaccttcaggaccactgacagaggagcagtcaatagaaattaattgttaaatacccagaaaatctgaaatggtatttaatatgcagttcatcaagagcaaaagttccttaaatcttcatctagaaaagttatttataagggatgaatatgttgtatgaatatgttgtatgcaaatattatattcaagggcaagaccatgaaaacagtttaagaatcc

SEQ ID NO: 460748 - DNA, 1017 bp, Homo sapiens
acaaatttaaaggcaataacattttaaatgttgcagatgaaggtgcttttattaattcccctgaaatataagcacaaatttattccacatttacattttttcaataaatacgaaatagcaaaccatgacacttcagcaattttaaaaaattacagcacacaacttcactgtcacgctgtcttccagctaaatttaaaaagctacgtctacatggagtatcacatttcccttctagaagtgaagattggagtgtctgttgggagatgcactgattcacatgcacccaaatacaacaccaaccccacaagctctcagctcaccagtcacagacatcaccttctacggacatatttttatttcactgagctacaactacgggcaaggcaacgacgagctgtgtggagacttcaaaacatagaggacaacctctgccctcaaagacaacatccaactgaagaaaggatcaagaaagatgaaaataaataagttgtttgattatgctgtgttaataaatgacccatagaataattgtcagagaaattcagaagaagaagaaattaccctattttgagttgtttggaaaagtttaacagagaaaaatatgacaatatctggggtttaaagagtaaaactcgcacaaagacctggagggaaggaatcaagagatgccaacactgaagaaaaaaacatgttcatagtgtattcgtggtgaaaagaaagggtttttgtgcgcaaggaagtaatggaccaaaatgcagtagtcccagtgcctagaatcatgctgagcacaaaacaagtatttgtttaatgagcaaatgaaagtagagtttcatttgtccagttaacaaaatacacaagtattccctgccctcctctttttaaaattaattaattaattaatttttaacagacaaaaaattatatatattttcatgtacagcatgttattttaaaatatatacacatttgtagagtggctaaattgagctaataaacgtatgtattacctcacatact

SEQ ID NO: 460749 - DNA, 2357 bp, Homo sapiens
agaaacaactccttagtgactgaatttattcttgctggattaacagatcatccagagttccggcaacccctctttttcctgtttctagtgatctacattgtcaccatggtgactttcatcctggtctgaggccttcatcgctgactcttgctccctccagttttatccttaataggcatttataacaaaatatgacttcttgatgccaaattatgaactgagtggaacactgagtcccaaaggagccaatgctggatctgtgacacaagttgtaaacacaggaggctcctataaggtggttgttttcctgcatgcaggaggagagaaccgtctgggaaaattctcagacagatattatggcatattccctagaatacctcttctagcatgtcgaagatggaggtctgtgctgttggcaattacctccttcatcatcagcaactttgaccctctcaggacagtggggaggaaggaccctgaaggtcctgcagcagttagtcctccaaggatagaaaggccctggcagggggtagggggtgtcacaggccatggaagtccccagttggcaaagtggctgagaaaaatcctgcatcattactactgtgaatgaacttagggcaagatgcccctcaaaggatatatcatagaataatattacattgtgtgaatataccacgttttatttaccaaattactagttggtagatatttggtgttttttcctacattttgacaattataaaacaatggtgctataaatattcatatataaggttttatgcgaatgtatgttttttatttctctgatgtatataactaagagagaaatttctgagtgaagcagtaattctgtttaaccttttgagaaactgcatgaccattttccaaagtggttgcagtcagttggcattgccaccaggagtgtacaaaggtttcagttcttcacatccttaccaacacgtggttttattatttttaaaaaattatagccatctttgtgtgtgtgaggtcatattttactgtggttttgatttgaatttccctaattactaatgatattgaacatcttttgatgtacttattggccatttgtgtatattctttgaaacgtctattcagatcatttgcccatttcaaaattgagtgttttatctttttattattgagttttaagtgttatttaggcattctgcatactaggtcttttaagattatataatttgcaaatatttctcccattctgtgggatttttcactttcttgataatgtcttttgggaatgacccttattttgaggagtttgaaaacattcagagagtctgcggctttttggctaataaaaaaccctctataaatatacaatgatttcctttttcttttaattacataaggactgtgtgggtaaatatgaactcaatgtatacatatatttcacatatatgtttttataattgtttgaatatgctagggcagctgatttgatttaaagcttcagagagtaactcacttaacaaataacaagtatactctatagttaaattgaacaaacacaatttcctattatgaacatctttcacaagcttcactgaggtagaagatgttggtgtcctgccctatagaagacattgttccttcccttctaacgccacaaaatttctctcgtgatagtggctgaaaataagagataatcatttgacagttctccctgcaatgaggttggctgtgtgttttatttctgactgataagacatagagggaagtcatttttaggcttctggagaagacttacctccgaataaaaagagagggatatgtgaggagagttattctgcattgttttcttgctttcttctttggatacaggtgattgttggagctataacagatgttttgtgaacataaagtgaaaaccccgaggaataaggtcagcagactgaggacagtggaatggatgaggatgggtctttgatgagagggtttagttgctgaatcaacactgggacactctgcctctagatttattgttatgtgaatgaaatgagctcctattttcaatagcaaagacttggaaccaacccaaatgtccaacaatgatagactggattaagaaaatgtggctcataggtgggaattgaacaatgagattacatggacacaggaaggggaatatcacactctggggactgtggtggggtggggggaggggggagggatagcattgggagatatacctaatgctagatgacgagttagtgggtgcagcgcaccagcatggcacatgtatacatatgtaactaacctgcacaatgtgcacatgtaccctaaaacttaaagtataataaaaaaaaatgtatttt

SEQ ID NO: 460750 - DNA, 1294 bp, Homo sapiens
cgtcgttgatggtgactgacacgccccagagatagtgacatgatgattaagagtgacagcctgagggagctgagcgcagcatggctggtctggcagctgctgtcggtgtcgcgaccccaccccacttccccggctccctgcctccttcgctggagaagcatcctcagccaatggagccacaatacctgtgccccacttgaattcctgcagagggtgaatgagtgtcctgtggttgctggaaaaaagtgccacaaaccagacagtgtgaaacaacagaaactcacacacagtcccgggggccagaagtctgcaatcaggacacgggatgaagagggtcagacagaggcacgggatgaagagggtcccacacaggcacgagatgaagagggtcccgcacagacacgggatgaagagggtcccgcacagacacgggaggaagagggtcccgcacaggcacgggaggaagagggtcccgcacaggcacgggaggaagagggtcccagcacagctccccagccgctcgtctcctgctgtgtggcctggtaccagtctgtggcccaggggctggggacccttgccctaaaggctcccggggcccaccacataatgccctgtgtcccagatcctaaattcctgaaaaggctaaaaatctgtatggctgactccctcaccactgagtctttactcatacacgaccttcttgacgacactgaccttgaccgccccacttgtaattgcacttccgaccactcctgatccccctcccggctactctgcttagtcttattcctatagcatttaccaccttcctgcaagctagagatcaatactggccaacacatgatgggacatttttcttgaccctctccaatgtgaattacttccttttatatggaagattgtgagccctttgaagacctgatggaagctattggacagtagaagacacagagtgtacatgcagaataactgttgattgtgctgggagtgcaacaacttgagataagaaggaactggctggaacagtccaaggtctctccctgtccctcctagaacaagatgtcctgcaacacttgtgctcagtgagtcaacttcccctaggtataaaacctagagtggagcatcttttggcgtcccttggctgtggtgctgcctagggcatgtgcagatggactctacccaccctggccagcttgcctgagccttgtcggggagcagggaccctaggctcctgctgtcccctgatgccgatccgcgaataataaagttgcttttcttaatttacagtgtgagc

SEQ ID NO: 460751 - DNA, 4669 bp, Homo sapiens
tgggtgccaacaccgaagaggcaccgagagcgagcgagggctgccagcatgctgtcacctctcaacaccaggcagttgctgaggcgggagggaaacttctatgcacactgtggggtccaaggagctgtctgtggaattagggtgggctcaggaggcttcaggaagctgcgcaaagaggatcgggtgcccaaggtggagtcacgggagtcaaagatctgtggggtcaatagtgccctcgaccttgtgtggttccaaggagcaatcttctacattacaacgcgggaaggatgttctgatgaatctcttgggcaggctgcgattccccaggtacccccgacttctgcagtggaagtggcgcttggtgatgcacatgacctttggggacagaaatgttggttgctgacaaatgtcatgttctgggtggaagaatgcagtgaacggatgttgaccaactttcggtggtgacgtagtgaaatgttccctaagtgggttgcttgtttttttaatgttgagatttttcctgaagattgccttctattttttcttctaaaagttttgcagtttttattttatatttatatttgtaatctatttttaaataatgtttttacagtataactttcagtccaagttttgttttttgttgttgttgttgttttttgcttttatcttatatatgtaatagctccagcaccatttaaaacatttgtgttaaaagacacatactataaaatttaccatgtcaagcattttttaactgtgcagttcaggggcattaattacattcacactgttgtgcaaccagcaccaccatccacctccagaactttttcatctttccaaactgaagcttggtacccattaaacaataattcccaatttcccatccccccattctttggtaaccacatttctactttctgttgctatgaatttaacaaatctagatgcctcataggaatagaatcgtgtcatattgttccttttgtgactggtttatttcatttagcgtaatgtcctcaagattcacccatgttgtataatgtgtcagaatttatttcatttttaaggctgaatagtatttccttgtacatgtagaccacattttgtttatgccaaaaaaaaactgaaagcaggaccttgaagaggtgtttgcatacccatgttcatggcagtgtcattcacagtagccaagaggtgaaagccatcccaatgtctgctatcactttttatttttggaaaaactattctccctccactaaattgcttttgctcttttgacaaaaatccatttggtatatttgtgttgttctatttctggggtttctgctctgttcccttgggccatgtgtctgtccctccacccatatcatagtcttgattgtggccactgcagaataagtcttgaggtcaagcaaaatgcgtccttccattttttttccccaaaattatttgaattgttccagttttttcatctttccatgtaaactttgctataaactcgtcattgtctaccaagccttgtgctgggatttttataagaattgaggggatcaatctggggagaaatggcatctttcccacattaaaccttccaatccttgaacacagcatgggttttttaattcatttagatattctttgacttataataatgcgctttctaagattatacacagctttttgtctgtttgtttttgtaaagataggctgaaattcaggaaatcctcagcaagagacaaaaaaaaaatgaaattgtgtcagtgatgtgttgatggcagctcatacacactcacgagggccaactatgtgtatctcctccccgccttgagttcagtgatggcaccttggtagggggaactggcaatagtggacaaatggtggacaaatgccaaagcccaccatacaagtggacaaattccatgaagcaggctgtcttccttccttcttgcccttccccttcccctcccctcccttcccctcccctccctccctccctccctccctcccttccttccttccttccttcctgctttccttccttccatccgtctctcacccttctgtctcccttcccctctctttctttgaagggggttgttaaacacccacctgcatacccctgactatatctaattcatggctctactatgaagaagagtgagcccatggtgaggggcagcatgaagagaggttgattcatgggcataaatatatgcagctaaggaagggctaacacctagtgctccctagatcagtagggtgactatagtttacaatcatctattgtacatttcaaaattgttagaaggtaatcatttaaatgcttctaacataaataaaagacaaacatttaggctgctggatattaattacactgatttgatctttccatgtgatatgaatgtatgtgccctgaaaatatgtgcatctcttatgtatcaatataaacaattagcaaacaataaataagaacaatcccttgtgtctatgccctggttgtttctggagctggtgttcccgctgtcaacacccgtcttcctggtcatcacatttgctttcttatctagcactgaacgatggatctacccatttgtcagaataaaaatgtggcttggagtgcaaaagagggaaaaataaaataaaagttccaaaccaaccaaccaaacaaaaaacaaggaataaatatgagcttatatttttcagttaacttcctgttgtgaatatttttatttgtcataaaatcatgtttctgtgaaccctgggagattcagtaatagttgcaaatatgtgaagtgataggcaaaaaacaatgaacacctactatccatatttctgagaataaaataacaagagctgagttaaaacgtaatagaaaaggacatttatttcagtcctaagttgtattatccctggtaatttgcatataccattattaaagtgtggcagtcttttgtaattattgtcttaatctagtgaaaaataatatatctgtatatctggagagaaggctgttctctggatgcagctgagcacttgcatgcactcgatgaacgggaataggactgcatgaggctgacctggatttgacaaccgcaccaggacaaggccgcgtgctgccctgaacagtggcccttgtgctaaatacgaatcctctctctcccacaggcatagcccgtcacctgcgtctggtttttgctcctcattttcttcaattttcactctatttatagttgagaaccttccatttccccctggttgaaatacattagttgctatggaaactgcgatccccccggtgtggatggagctgaatgacacctacaattgcagagcacggttaggtcccttctggagccggcgtcgaccttctttttgcgtcctaacccagctcctccatcccatggtatcgttttctggtctcagttcttctccttcacaggatcttgttacttcataaaaatcaaattggccccacgttaatttatttggccatcagaacatggagacttttgccaacatagctatagaacctctgtttttgtttgattttatgacagggatggggtctcactgtgattacaggtgtgagctgccatgcccaaccaaaatctcttcatagatgcgaagtttgggaagctgtgccaggtcccagattcacctccagtgtgactccggggtcgggagtaggtcccttgagagccccagtcactggacttcacaggcagctaaaatgcaggaagaggttgggaagtcagggccactgatctgcttcagtaaaaaaaaaaaaaaaaatcagaattcttaagcttaccaccactttttgataagcaaaggcagaaaatgttaatgaataattaaaaggaatgcttatcagagatcttcccagcttagaaaatggaaagaattatgcacgtaacaaagctgcatgtattttaacaagggcagtagaaacacaagaacagatgcatgctaagtcggaagaaggacgattctagaattgtgcaagacaggcctgcactgctggggacccagatttgaggagggcggtcccggggaccacacagtctttgcagatgcctggaccgaggtcgactctgcatcttatcttccctaggggggccgcggtgccagtccttaatttgctcattgataaaacattttctaaggttagttcctatattattttaaaaagtgacaggacagggaattgaggctaagacagttgctcctcaatcagcttttctcgacagcacagctgagtgagataaaacacagggtttggacctaagatgaactgggtctaagtcccctgaactatcgctgaggggctatcagctgctcatggagggagtcagtgactccctctcctgggttttgtgtctcacaggtgtctgtgtgtgtgctgggggccgtctcaataatgtctacttcactggcatcgtgtagagattaaacccacttacaaggaagtcctagcagagtcaatcgttgacagtaagtgctcagtaaaccagagctgttttcattatcattctaatttccatagctcaggaacataaaggaataacactgaattctaaggacaaaggtgtggagccagtgtagaaaaatcactgggccaccaaagaagccctaaataatcatttatttccaaggacactggaga

SEQ ID NO: 460752 - DNA, 707 bp, Homo sapiens
ccattctcagcatagcttttatttgaagcctctagttttcacagtggagtggctaaaagaggtaagttctttgagggttgtgcaggaaaggtcacccactccatagtgaatggttatttgctggctgcttctcacactgttgcaattgtgatccttttgcatctttgattgtctttcatcggaaaactatgacatgcttcattttgtttcccagggtggtagccacagtcggcggtcagttggcgagctggctacattcgatggtatgcaaacaactcggtggcagcttaaagggtggggtaggcagtgtggccctcaatgtgcagttcgagtttcccaagttgaaggctcacagagtgattggaaaccaggagaaaaattactgtggtctgagcagggaaggaagaaaggtcctggacactcggcttctagagagatccacgtgcgccatgccgcaactgcattcagtgtcttccagcttccaacttgttgtcagccttcagaaagcacatcatttgtatctatattcaggagccagcccggtctcctggggcatgcggctgatcaactgtggggacctcgcttaagaaaagtaaatatttattcagaataaggaaagaaaccaaaataaattacagattttaaaatgctgacaaataccacaaacatcacaaaaatctggaaacatagcatactgtttttattaa

SEQ ID NO: 460753 - DNA, 1451 bp, Homo sapiens
ttatagaattcatggaacctggcacaaaatgaacacaatggcacttgctgataacaacacagaaataacaagggcagactttctgcagtgtctcctgagcaattggttgtcattgtcctaaacagagcagctaggttaaaaagatttatccataatgtaacctcctggccctcagctatgggtggaagcagcactttctggtttgacctcctaataccacaaactccactttgccagaaaagtgacttcttgatgaatagtctgttcagataggccaatttggagtatattcatatttggccacctgctggagcgtcaatgaccaagaggagaccagatgagttttcaaagcagtcctcaaacacccaggacacacctcatcctttacctcgtgctttctgcaatgttgctgttcatgttcatcttcctattaacatttgccataataacccctcattgaccaccatcattcctccatccaccaccaactcagctccttctctaaagtgccctctaatgggcagtggctttggtctctgtttggcaaattatgtccagagggttaacattaatttctctttctcctattcctccctcatgctagattcagtccatcactcagcctcctgtcaggaaaaccatagcaaatcctactttctgctaaaatgaagttacaagacacttttccagagtagtcacactcaatgaagggacccagggtgtatctgagtgtgatgtaattgaaaccacatggaaagactagaaataccttgctcccagtcagatatagtgaaacagcttactcaagactggactaagatttagaatataggggggctagggaggagaaagagaaagatcctcagaagtggattgtccctgaatacaggatgaaatcatctagatttttttctccaattaaatttgcatttcattcaaccacattgcaatggcttcatactgggcattttcatttgagacccaaggcttttcttcatgggtcctgagccacaggttcctggatggtgaggaaaggtttcttggaagactggaccagggagttcctaattcttccctggaccatctcaggggcatcctcggtgccaaaatagttctgctccctgatgaagacacctttaggaaaagaggaatccttttcctagacttcctccctgagggacttcccttggttgatatcatgggagctggactgtttttccttctccaaatccagtacattacctactggcatttttcatgtttctgcggagcttccaagcccctctctgtcttgattactggagcaagacagaaacaaggcagagaggcgccctcttctgggagggaggagcaaagacattgaatccaccaggaagccggcgttacaccagcataattttggctgctgcccttaaagttctgatgtgcatttcttccatttccaacgctac

SEQ ID NO: 460754 - DNA, 1240 bp, Homo sapiens
attgagaagctgctaatggagaaatgctcggagctctcggcagtcacagagaggtgccttcaggttgagaatgagcatgtcctgaagtcaatgaaggcctgcgtgagtgagaccctgagcatgctgggccagcactttggccagctgctggagctggccctgacacgggaggttcaggcactggtgagaaaaattgatgcctcagacaatatctacaccacagagtccaccacagggaacctgttcagcctgacccaggagggggctcccttgtgccgcatcatagccaaggagggtggggtcgtagcactcttcaaggtttgccggcaggacagtttccggtgcttgtacccccaggcgctccgcacgctggcctccatctgctgcgtggaagagggtgtccaccagctggagaaggaattccactcctagattgggatctctgaagaaactggcagatgttcaccagaagacatttagaagaatatttatagcagcactgtccattatagcaaaagctgggaagccactcagacacccatcgacgggagaatgcataaatgaattgaaattgatttatataatgaaataccatacaacagtgaaaataaatggatcatagccacatgcaacaacaagaagaggaaactctcactgaatttgatgcagctggtccacagacctcacttggagaaacagggcctgttggtgtgacaaatgtgacaatgatagcaaaggtggatggcgttctgtgcttggccgacatcctgaccgacaacagccactcagaggccacacgggctgaggctgcggctgtggtggcccaggtcacctccccacacctgcccgtcacccagcacctcagtagcttcctggagagcatggaggagatcgtgacagccctcgtcaaaactgaaagtgcttgtctggataacaatccccagggaattttttgtgacccacctctttcttttaaaagtgctaacggtgatctgtgtttctatttctctggcactctctttgtatctaattgaaatggaatgaaatttaatttcatcagaaaatttaggattagctctcggagtcaccatgccagggctgggaatatctgaaatagcatgaacttaggggcaacacagaacattgggcaaggagtcagaaccctgggtttggactcgggcttttcactcatccattcaagtggttatgtgcagcaagcctgcgccggtactgtgtgaga

SEQ ID NO: 460755 - DNA, 1309 bp, Homo sapiens
gaaccaccccagagccagtagcataaaatcctcatgtataatgttcacagattctgtgggtcagcagttctggagggcacagcaaggtgcttgtctctgacccaacaagagtcggccacctcagccctgcgcctggcctggtggaacatgggtcaccgccccaacctggggcagccgccccatcccaacgcagttgctgccgctctccatgcctccctgtgcccagctaaccgggggacttgtcccctgggaaaacctgggtacccaggctgcctttggtttcagcccctactcctcttcccgggctgcctgtgctccccggacggcccctttccccgggctgtgttcacatcggctgggaagggtcccttgcagacagatcttggacgaggtcgcgtcccccctcgtgaccagcaaactcctaaaagcggcccttgccccagagcccctgtagcctccaaccggcagtcaggaggcagcgccccgcctccggccgcagaaaggcgttccctggacagagaagcgggcgcgcgggggcgggcgcgcggggccttgccggagaacctgactctccgcagcagcagtggaagccggagtgacgcgttgtttcaaagccacttcaactgcactggcccctgtgggtcactgctgcaccgccctgacccatgtgggtccctgaggagcgacctgccggggccacctggctggatgaaaaagacacaccttggacttaagccgtgagaaaaaaaaaacttcatcagtaagaagaatgaataaacagactaggttgaatccatacaatggaatgttagcagacaataaaaagaaaatgaactattgatgccccctactgcacagcagaagctctgaatcgtgttcctgaatgaaagaagtcaggggcctcatagacattcactccacccaacaaccacagaatatacattcttcctatctgtacacagaacatattctcagatcaaccatatgctgagtcataaagcaagtctcaataaattttaaaaaattgaaattataccaaacacactcttggaccacagtgcgataaaaatagaaactaatatcaagaagatctctcaaaactacacaaatacatggatattaaacaactttttcctgattaactcctaggtgaaaatcaaaattaaggcagaaataaaaaaatctttgaaagtaatgaaaatggagatacaacttaacaaagtctctgggatacagccaaagcagtgttaagaggaaagtttataacgttaaatgccttcaccaagaagttaaaacaatctcaaattaa

SEQ ID NO: 460756 - DNA, 798 bp, Homo sapiens
gcttgggtaaactattcacaaaggaacgtagacaaatgccagtacacacatgagaagcgcatacacatccacaaacttcaaacaagcccacctcatgtatttctagtgagtaaggaaaagaacgcaaacacttttgaaaattgtttggttgtttcttgtaaatttaaacaaataccctattatattatccagcgagtccatccttaggtttttatccaaggataaagaggtgaaaactcatatctaacaaatagacttctgaaaagatgaaaatagaagctttattcataaaagacaaaaactggaaataacccaaatattcattcacaggagaatgaataaacagactaggttgaatccatacaatggaatgttagcagacaataaaaagaaaatgaactattgatgccccctactgcacagcagaagctctgaatcgtgttcctgaatgaaagaagtcaggtatgaaagaataaacattgtatgattccatttatatgaaaatgaatctgtgatttaaaaatcagactagtattaggttggtgcgacagtaattgcgttttttgccttttttttttttaatagttgctttggggtttatggatggagtggcatggtagaggttagctgaagggggcatgaaataactttttgggggtgctagagtgttgtaaatcttacagtgggggagggacaggagtgcaggcatttgacaaaacacattgaattgtgaaatttaagatttttgaatttctttgtatgtaaattacctgccaataaaaacatgacgaatagagc

SEQ ID NO: 460757 - DNA, 1066 bp, Homo sapiens
actcaggaatggccaactgcaaagtccatgtgcttgaacagtatggcatactgatacatgcacctgccatgaccagaacacaatacagtgatctggcagcacttcgtggctcaccatctctgctatactgataacaacttgagggctggacctacttatcttattcaacaaggaccctctcagaggttagggttgcccagtgcaaagatagcaagtcatgtgacacatgggccacctcacccctcctgcagccattgataactttcttctttgaacatggcattctttcgctctaagcccagttaagaattcagaatccttctaggcccagtttttaaagcagcgaccaccaatctattggtgctgacatgaattcaaaagatactttctatcccttatctaaatagttcataagatgatgaggctgaactatggaacaaatgtagtccatcagagatttctagaaaaaaaaaacaactctcaatagtcctagaagtttggaaatgagtattaatcccaggataatccacacacatcttgtcttatggcctgatgccaagtgatgtggcccttatctaatagcacatttgcattttaaatgagtaaagctggttaaacctctttttctaatttcagctattattttatctacaggggcctcatagacattcactccacccaacaaccacagaatatacattcttcctatctgtacacagaacatattctcagatcaaccatatgctgagtcataaagcaagtctcaataaattttaaaaaattgaaattataccaaacacactcttggaccacagtgcgataaaaatagaaactaatatcaagaagatctctcaaaactacacaaatacatggatattaaacaactttttcctgattaactcctaggtgaaaatcaaaattaaggcagaaataaaaaaatctttgaaagtaatgaaaatggagatacaacttaacaaagtctctgggatacagccaaagcagtgttaagaggaaagtttataacgttaaatgccttcaccaagaagttaaaacaatctcaaattaa

SEQ ID NO: 460758 - DNA, 702 bp, Homo sapiens
gcttgggtaaactattcacaaaggaacgtagacaaatgccagtacacacatgagaagcgcatacacatccacaaacttcaaacaagcccacctcatgtatttctagtgagtaaggaaaagaacgcaaacacttttgaaaattgtttggttgtttcttgtaaatttaaacaaataccctattatattatccagcgagtccatccttaggtttttatccaaggataaagaggtgaaaactcatatctaacaaatagacttctgaaaagatgaaaatagaagctttattcataaaagacaaaaactggaaataacccaaatattcattcacaggagaatgaataaacagactaggttgaatccatacaatggaatgttagcagacaataaaaagaaaatgaactattgatgccccctactgcacagcagaagctctgaatcgtgttcctgaatgaaagaagtcagagatgaaaagatgggccaggagtccagtttctggaaggccaagaatcgaagtagcaagctgcagccgttttccagacaagcaggatgtggggatgcagaagaattcaggactggaggggcaaactccgtaagcaggggctgtcacgattcccatctccctctataaacctctctcttttcatgtcatactgttccatgttatatgtaactgttttaaagctacatactggacaaaaagtg

SEQ ID NO: 460759 - DNA, 1467 bp, Homo sapiens
gaaccaccccagagccagtagcataaaatcctcatgtataatgttcacagattctgtgggtcagcagttctggagggcacagcaaggtgcttgtctctgacccaacaagagtcggccacctcagccctgcgcctggcctggtggaacatgggtcaccgccccaacctggggcagccgccccatcccaacgcagttgctgccgctctccatgcctccctgtgcccagctaaccgggggacttgtcccctgggaaaacctgggtacccaggctgcctttggtttcagcccctactcctcttcccgggctgcctgtgctccccggacggcccctttccccgggctgtgttcacatcggctgggaagggtcccttgcagacagatcttggacgaggtcgcgtcccccctcgtgaccagcaaactcctaaaagcggcccttgccccagagcccctgtagcctccaaccggcagtcaggaggcagcgccccgcctccggccgcagaaaggcgttccctggacagagaagcgggcgcgcgggggcgggcgcgcggggccttgccggagaacctgactctccgcagcagcagtggaagccggagtgacgcgttgtgttgaacaccagttttctggagcgctgtgtgttcttaacagctgagcagtctgtttctccaatcaggtttcaaagccacttcaactgcactggcccctgtgggtcactgctgcaccgccctgacccatgtgggtccctgaggagcgacctgccggggccacctggctggatgaaaaagacacaccttggacttaagccgtgagaaaaaaaaaacttcatcagtaagaagaatgaataaacagactaggttgaatccatacaatggaatgttagcagacaataaaaagaaaatgaactattgatgccccctactgcacagcagaagctctgaatcgtgttcctgaatgaaagaagtcagagatgaaaagatgggccaggagtccagtttctggaaggccaagaatcgaagtagcaagctgcagccgttttccagacaagcaggatgtggggatgcagaagaattcaggactggaggggcaaactccgatgtgactgaggccccactgccaaatagcagcatgctcagatagcacccaggaatttggggaaaaaaactggtgctcacagctgcccagttaaggcacaactctcccgcctgctgcagggcttgtgaggtgtatcagaaccttgaagagatactctgggaagaaaggccttcccagactgcctctccgcagcgctgtaagaatcagatttcttctatgggggacttccaggtctcttcagcattttctcagtcatcactgtatccctgccactcagtgaaccacagcaacaactcccagcttccagccgagaagcttgaccctgaagctggcctcgattctctacagaagtgaggccacagagcacaggtgaag

SEQ ID NO: 460760 - DNA, 954 bp, Homo sapiens
acaaccctgagccttcgcgggagggccttccggggggtccggatgctctgcctgcccctcagtgccggattgtgctggagggtagcttggcccagccccattgcggtggccctcagggtggtgggctttgggggcctggggagagggtgctccttcttgtccttgtccctggctcccagcggctccgtggaggatggcactgcctcaggcccagctccacctcctccctgcaccctcccagcagttgctgcagatgagagcggcgatgggaccagggtccagagcaatggaggctccgtgcctgggagcgggttctgccggctgcggaaggataggggtggcacagtcagccgccttggggacacaggacataggggacccaccaccgccactgccgctcccgcagcagctcgtgccgccaccacccacgcctccttgctgcagccagcgtgacgacagcggctgctccggaccacccgcaagcggccatcacggcaagggactaaccgtcgtgtaactactgtctgccacaaaaatctctattattatctttaaagggaaacttcttcttaaactaaaaatgcttttgttcctaatatattgggacatcgggacatttcctgggtctgttgtttcctgggtctgtttggtaaaccttgttaacctgttcccttcactataaacatcctgtgacttagaatgcctagcctcttgggaaggcatcccagcagcttcctcattttacccagcccctgttcaagagggagtctctctggttccaacacctctgacagttttgaagagaaaaaaataatcctcttgaatgaatcttctgataattctcacctaatgtgattggaatctactgggcctactagatggagcttgttgaaagagaggggagctctatgagctcccaaaatacgtcaaaaaataaaaattagagaacaaaaa

SEQ ID NO: 460761 - DNA, 1011 bp, Homo sapiens
tgggcgttagatgaagacaaaagagcattccatcgtagaagacaatgtagcatgtgacggttttggtgaagatgtgtgttttcacaagtttatcaaatatggagttcttagcactagtattctgattgaagatctccccaattggaataacttacacattactggaggactccaaaaactggtgaaaattacagcaatgaatgagaatgtcactctcacagatcagccctcgatagaattctggagtgctgtgaccactgttttcctcatgctccctgaaagcttttctgaaggaaacctctctacagagattgccggactgtcctatttagattaccaaacggcatatggcaatagatttgatgcaaaagcagacacgaatatctcgttatctttgattaagctagacattaagtaaagacattggaaaacactaaacattaaaaacaacgccacacttcttaacgtattttttctgggaagtattgttataaaatgttatttatgttaacatgtagggttttaaaaattatttttatgtaaagatttcccaagaccaaaaagcttaggagcactgccccattccactgttctgctgctggttttgctttgactctcccagaggaaaaccggggttgtcactggaagttcctgaagtaatctccttttttagcaaacttttcattattacactatttgggtcatggtacaactttgctgaattgccttgaactgaagtattggatttttactttaatttatcctgtgattatgctgattttgcttcactgatattctgtcatgtccttagatttctaatgaaactgctcagaaatcaaccaggtaaaattttatgggaaagttaggtggggaactagcacttggttatgtttgtataaaaagaaacccacaaaattttttctcaaaacagtgtttctggttgtcaaatgaaataggggagcaattagacttctgtctggtgagtagattaaaatatttctgctgactgct

SEQ ID NO: 460762 - DNA, 955 bp, Homo sapiens
ccgccagttcccaggccccgtgggatgagccgtgtcctcacggcaagcctgccctgcctgacctctgggaaatccctgtgtgggctgcaagattcaagatgcattggggatttctccctcaaaaatatcttctccatggatgccccagggagctctcatggaagctatcagagtggtctttgtccaggagatgcagtcatcctcatggaagctatcagagtggtctttggccaagagatgcagtcatcctcatcgaagctatcagagttgtctttggccaggagatgcagtcatcctcatggaagctatctgagtggtcttttggctgggagatgcagtcatccacagatctcttcttgttttagccacctctctctcctccatgggctctctaaggaaaatacatgcataggctaaactggcaaaggaaagcaaagtaacgctttattattaattgggactttggttccaagcctccaaacagaattccattaaactatgttggactcaataggagctgttagaaatgtagaacctcagagcctacattgaagatattgaatcggagtctgcacatcgcttctgagaagccatgagctaagctgatgccattcagctgggtagcatcgcagtcactgtgcaacttttaaacatacagctgcccaggcccactgcagacctgctaaattcaagctccttgtagtggggccagggccctgggacttcatacaaaactctgcaagtcatcactgatgagaaaaccaagactcgatgagagtctcctgagctcagaggaagaagctgcataaccagcacacttccagagaggaccgaggaagagagcgttgcttcagccagggtctgattagtcatgcctggcaggctctgctgagctgggtgctcatgggttttgcttgctgagctgaattaatatattagtggatttcatgtttga

SEQ ID NO: 460763 - DNA, 1808 bp, Homo sapiens
ttggaggccatgtcacctgagagtcaatgggcaacgatcaaatttcaccttgagcagattcttttgtttgctttttagtcacaaatagcttggccctaagtggtggctcccattcttgtaagatgcgtttattcatcgtgtaatcaccagttccctgtagtgggggcgtggatggagtgtcagaggctcctgctggtctttagggtgtctggcctccaggaatcctagaggtagtatttggagagatttttaaaagctttgtttctgtgaccagcaaaacctggatttgacactgaggtcagcccgtttcagccagtgacgtaacctgtctttttgccccagtaaattgggaactacagcactcgatgttagagttgtcgtgaagattaaagaaggtgacgactggacaactcccagcccaatacctgaaactgtaccagcacccagtgagcactgctattcctgtgactgctgcacatttgccttatctcagcagtatgcctgtgtcacttttttggcactcttttctcatgggtacattcagagaagaggaatgtttgttcactggtgaagagaacatcccgtgtactatcgtgtagaagttgtagtagacgctgtggtctttccaacaacaaacaaaggctgagagctccaaggagctgtgaatcacacctccgactccccccagggtacaggaacggggttcagaatgctcttcccaaagctgctgggacaggacccaggaggttccggaggatcaggaggtccacctgggagaagagctgatcggctagtaggagagctggaaaagcaacagacacctacttagtcccttccctggggcccggctccagtctgagctgtcacgccacagcaaaggcatcacttcaggacagcaaagcccctgtctccctcccttccagctcctcagacttcaccctggtaacacgtttgtttaaaaaacatatttttcccccttgtaaagaatctaggatacaaggggtcagcccagcagtttaggtatcaagaagaaactgctctcggagctaaagtaagaaacagtgcctgtctatagcgcaaataaagagttggaacaagataaaaggcagtgatccttcaccagccaatctccaggtggatctcaggaatcctgtgtgatgtgtgacatcatctgggaaagccccgcagttgccatggagacgcacctcccaggcctcgggaagctgccccacctctctgccaccttcttccagactggtcatggcaggctggctctgatctgggtcccagacagaggggaattgaaaccagagggagaggaaatcaagagccagggcggggtgaatttcaaacagcccagggctggagccggaacgggaaccccagctccacctcatcagggccaaataaccagctgctatgagggggcaacatgctatcgggataaagcatatgaaaccatagaaccttcaacaatagggcgtgaagaaaaaaacagaaaaataaggccacacgggcccagaaggaatgcattgctcagtggccccaacagagaaagtggaaccacgagcctgcagagaaaaaggcaagcagctgggaaagaactggatgcaggggcttggtggggacaatgtcccccttctactcacagcggagtgggtcgggaggagagccctgtggaaatacctaaaacactcagacttagccttcaagggagcatcacctaggaaaggttttctcccctctcctgactgtggcacaaaacgaagaatctccaatgtgcacggggacactttaatgagatttcc

SEQ ID NO: 460764 - DNA, 1251 bp, Homo sapiens
tcttgatgtttacactgcactatggaccaaggacatcagaatccctggggtgggactgaggctggcattggtcttttgttaccgctccccaggggacggggaattccagtattcatcaaggttgaggataactgcattggaggaaagaagcagctaactacctggatccttaattcctatctcttcttttcccaggagccaacaggaaaaaatgcaccaggagggaaagacaggaaaggagggacaagagaggaaggggggctccacacatctgcagcaggaaaggctcggattgcaccacccacccctgcctgctgcacacgaggctgggagctaccttggactttgtggtcgtggtcatcctgcaggattgagagcagcatcatggctggcggtgagatcttccacctggaggagagtcgcagttactggttagacagagagctgcttggagaacagaagtggaattccgtgagtggaaaaggagagctggactttggtggtgatgtggcagccctcggaatcacggggaggtcactgccacaacctggctctttgtaggggggtccaactccaggcaggggatcactgcctgaggtacctctttagagtcctgagtgtggctcctggaccatccccttcccactgcttgtccacgcgcttgcaccgctatgagcgatgacggcaaaggaaaagaaaagcgtcctccctacgaggtggtctgtttcccagtggcagggggagctacggtacacaagcacaggttcacatttatgaagcagccaataagaattcccagcctgagaggaccttggaaccagaaggaattggaggagatttaaacaagctgacccaaggaaagcacaagatctttctatgcattgaagatcaccaaatcaaagataaaagtgctcgaccattatggcctatggcaaactcgggctggctgaagcatccttctcttccatttagaaccctggtgaggccccttagaccaccactgggctgtcctcctccctcctcagagacagagttctgggctgggccatggaggtgtctgtcaacacggcagtagtcctcgttctatggaaaaccagctgttccctgtgacacgactccattcccgcagctgcctgctattcagctgggctgacggacagcagagcacagggttggaagaccaccctctcagacaggtttaccaagaagctcactgagaggcgacacaaacggccaagaacatgaaaagac

SEQ ID NO: 460765 - DNA, 1343 bp, Homo sapiens
cccttctttttatgcttctgatggtggctgagatcttcctctcaaagaactacattacacagtactgcttgctcctaccagtacctgacacgggtgtcaggcccaaccacgtgctcggtgtattcatagaccttagtcacggaagcacagtcttgtccggatgcacagcatgtgagcacttgctctccaaacttaccatcttccagctccggttaatacagcagaccattcatgcgtctaggaaccaaagaattaccctagggccctgctattatttgggcaagagactcataatgaccttacttgactggctgcataaaaagtcccaaatcttcctgccattcctttctcgtcttggcctctgggccgggagcacaaagcctaggaaaggacccagggacagaaaaaggaaatatcgagatgactcatctgaagcctgaagacactaagcagatggcccgagccacagaggatttcacagaagggcccggatgagaagaggacagatgcagggtactgatcactgcactagaatatgtgcaaccttccacgctgccttggggattctattcctgcctattgtccttggcttcttccccttgtccacttctgaacccataagcacgaatttcctctcctctccccattcctaattatccccatctcacgtgggtggcagaaagtcttcacattttccaggcttcatggcttagaactccttagggaatggtaccagtctctatatccaggataagtaggtatgcagttattttgtaagaccaggacatttgtggaagagagaaaccacgtgagcaaaggcaggcaggtgtggagtatgcacaccagtgaatctaagactgtgcaaactgtatgaataacaaatgaaaggaaacagagcaggcctaagtttcaagtgtgagaatggcaaacaacctgttacctatatcaacagttcattcttttctcttgctgagtaatattccattgtatgcatgcactacggtttatctataaacctgttgaagaatatgtgggtagtttccaaggtttgcctattacaaataaaattactataaatatttgtgtactggatttgtgtacacattttaatttttctaggagggtttttattttctcattcatttcaagagtgtccatgattgctgtcaaagcaattttgtaaaagctgctctaaagtctttgtcagataatgccaacatctgtgttctcagcatctcagcattgacatctgttgtcttttccttgtgcattgagattttcctggttcttcacacagcaggtacttttaaattatatcctcgacattttggatattatgttat

SEQ ID NO: 460766 - DNA, 2569 bp, Homo sapiens
  misc_feature (20)..(20): n is a, c, g, or t
  misc_feature (23)..(23): n is a, c, g, or t
  misc_feature (26)..(26): n is a, c, g, or t
  misc_feature (39)..(39): n is a, c, g, or t
  misc_feature (47)..(47): n is a, c, g, or t
  misc_feature (51)..(52): n is a, c, g, or t
  misc_feature (54)..(54): n is a, c, g, or t
  misc_feature (57)..(57): n is a, c, g, or t
  misc_feature (60)..(61): n is a, c, g, or t
  misc_feature (63)..(63): n is a, c, g, or t
  misc_feature (67)..(69): n is a, c, g, or t
  misc_feature (71)..(71): n is a, c, g, or t
  misc_feature (75)..(76): n is a, c, g, or t
  misc_feature (79)..(80): n is a, c, g, or t
  misc_feature (97)..(97): n is a, c, g, or t
  misc_feature (185)..(185): n is a, c, g, or t
  misc_feature (191)..(191): n is a, c, g, or t
aatcgcgtaatatggggtanacntantagaaaccaccgntggggttnttannanacngtnnangcannngnatgnngcnngcggggcggatctccgngcggcgagtcatctcctgggaaatggggcggacagtgtttccttgactgactattgtgagcgccctctctctccggcggagcggagancatggnccccactcagggcccccgggccccgctggaattcggagggcccctgggcgccgcggctctgctactgctgctgcccgccaccatgttccacctgctcctggcggcccgttcgggccccgcgcgcctgctgggtccacccgcgtcctgcccgggctggaggtgctgtggagcccacgggcgctgctgctgtggctcgcctggctcggcctgcaggcggcgctctacctactgccggcgcgcaaggtggccgaggggcaggaattgaaggacaagagtcgcctgcgctatcctattaacggtgcctaggggacgggccctcgcgctggagcttccaggccctggtgctgacagccctgttggtggggctggggatgtcagcggggctgcctctgggggcgctcccggaaatgctcctgcccttggcgtttgtcgccaccctcaccgctttcatcttcagcctctttctctacatgaaggcgcaggtagccccagtttcggccctggcacctggggggaactcaggcaatccgatttacgacttttttctgggacgagagctcaaccctcgtatctgtttcttcgacttcaaatatttctgtgaactgcgacccggcctcatcggctgggtcctcatcaacctggccctgttgatgaaggaggcagagcttcgaggcagtccctcactggccatgtggctggtcaatggcttccagttgctctacgtgggtgatgccctctggcacgaggaggccgtcctcaccaccatggatatcacacatgacgggtttggcttcatgctggcgtttggggacatggcctgggtgcccttcacctacagcctgcaggcccagttcctgctgcaccacccgcagcccctggggttgcccatggcctctgtcatctgcctcatcaatgctactggttactacatcttccgtggggcgaattcccagaaaaacactttccgaaagaatccttctgaccccagagtggctgggcttgagaccatctctacagccacagggcggaaactgctggtgtctgggtggtggggtatggtccgccatcccaactatcttggagacctcatcatggctctggcttggtccttgccctgcggggtgtcacacctgctgccctacttctacctcctctacttcaccgcgctgctggtgcaccgtgaggcccgggatgagcggcagtgcctgcagaagtacggcctggcctggcaggagtactgccggcgccaggaggaactggcactttttccgggcccggtaaagatgatctcgctcttctctagccacggcctgtttccgggcacggcccagggtctgtgccaggtcccccagtgctgccagcgtgtagcctttctggttggtcgggccctcgcccagcaggatgcgggcgacctcgtgcatagcccctcgtgtgcccaggggccccggcgggtgctcgcctgcttccagcacgtgggctgccgcctgcagggcttcttccgcagaggcgaagacttgctgggcacccagggctccggaaacgccgagcagtgtggcacagaagtcagagagcagcgcgtcgtcaccgccgtgatacagggcgagagtatgcgcgtaggcgaacagcacattgggcagctggaagcgcacgagcggcgagactgggccgcggctcaggctgactatcgcggggatgcgggtgggtacgacgggcgtgcaggcccccgggacatctccaagaacccgctcggcggccgcgggctccgcggcggaggcatctttcacagaatccggcggggtcctcgcaggggcgagctccagctccgcggcgtcactacccggggcattatccagctcctccagaagctgcggtccggctccgcggttccaccaccacggccgccatggaggcagcagccgcccggcctcaccgcggctcagcagccgctcgaaggcagctttttcgcccggcgccagccgctcccagagtgccatgcgtccggtagcagcgcagcgagcagtagggcgcattacagcgagggcaggtgtaacgcgctggctggacctcccccgccgggcagaagccacagggcccggccggctccatggcaactggcaccgcgatctacctgcgaacgcacgccggtggtagttcgaaacttccggggcttcttcgattacttccggttcgcagcgcggccgacggcgcgctgtggcgagagcaggcccagaagccgggcgtcaggtacgagccccgccctatgcgatgacgcaaggagcgaaaaaatgggtctggcgagcgcttcgccggtgccacgtctccccctagtggtcacaccaaaacgtggcccgatcatctaaagagaaaaccctcttttt

SEQ ID NO: 460767 - DNA, 2462 bp, Homo sapiens
  misc_feature (20)..(20): n is a, c, g, or t
  misc_feature (23)..(23): n is a, c, g, or t
  misc_feature (26)..(26): n is a, c, g, or t
  misc_feature (39)..(39): n is a, c, g, or t
  misc_feature (47)..(47): n is a, c, g, or t
  misc_feature (51)..(52): n is a, c, g, or t
  misc_feature (54)..(54): n is a, c, g, or t
  misc_feature (57)..(57): n is a, c, g, or t
  misc_feature (60)..(61): n is a, c, g, or t
  misc_feature (63)..(63): n is a, c, g, or t
  misc_feature (67)..(69): n is a, c, g, or t
  misc_feature (71)..(71): n is a, c, g, or t
  misc_feature (75)..(76): n is a, c, g, or t
  misc_feature (79)..(80): n is a, c, g, or t
  misc_feature (97)..(97): n is a, c, g, or t
  misc_feature (185)..(185): n is a, c, g, or t
  misc_feature (191)..(191): n is a, c, g, or t
aatcgcgtaatatggggtanacntantagaaaccaccgntggggttnttannanacngtnnangcannngnatgnngcnngcggggcggatctccgngcggcgagtcatctcctgggaaatggggcggacagtgtttccttgactgactattgtgagcgccctctctctccggcggagcggagancatggnccccactcagggcccccgggccccgctggaattcggagggcccctgggcgccgcggctctgctactgctgctgcccgccaccatgttccacctgctcctggcggcccgttcgggccccgcgcgcctgctgggtccacccgcgtcctgcccgggctggaggtgctgtggagcccacgggcgctgctgctgtggctcgcctggctcggcctgcaggcggcgctctacctactgccggcgcgcaaggtggccgaggggcaggaattgaaggacaagagtcgcctgcgctatccgctcccggaaatgctcctgcccttggcgtttgtcgccaccctcaccgctttcatcttcagcctctttctctacatgaaggcgcaggtagccccagtttcggccctggcacctggggggaactcaggcaatccgatttacgacttttttctgggacgagagctcaaccctcgtatctgtttcttcgacttcaaatatttctgtgaactgcgacccggcctcatcggctgggtcctcatcaacctggccctgttgatgaaggaggcagagcttcgaggcagtccctcactggccatgtggctggtcaatggcttccagttgctctacgtgggtgatgccctctggcacgaggaggccgtcctcaccaccatggatatcacacatgacgggtttggcttcatgctggcgtttggggacatggcctgggtgcccttcacctacagcctgcaggcccagttcctgctgcaccacccgcagcccctggggttgcccatggcctctgtcatctgcctcatcaatgctactggttactacatcttccgtggggcgaattcccagaaaaacactttccgaaagaatccttctgaccccagagtggctgggcttgagaccatctctacagccacagggcggaaactgctggtgtctgggtggtggggtatggtccgccatcccaactatcttggagacctcatcatggctctggcttggtccttgccctgcggggtgtcacacctgctgccctacttctacctcctctacttcaccgcgctgctggtgcaccgtgaggcccgggatgagcggcagtgcctgcagaagtacggcctggcctggcaggagtactgccggcgccaggaggaactggcactttttccgggcccggtaaagatgatctcgctcttctctagccacggcctgtttccgggcacggcccagggtctgtgccaggtcccccagtgctgccagcgtgtagcctttctggttggtcgggccctcgcccagcaggatgcgggcgacctcgtgcatagcccctcgtgtgcccaggggccccggcgggtgctcgcctgcttccagcacgtgggctgccgcctgcagggcttcttccgcagaggcgaagacttgctgggcacccagggctccggaaacgccgagcagtgtggcacagaagtcagagagcagcgcgtcgtcaccgccgtgatacagggcgagagtatgcgcgtaggcgaacagcacattgggcagctggaagcgcacgagcggcgagactgggccgcggctcaggctgactatcgcggggatgcgggtgggtacgacgggcgtgcaggcccccgggacatctccaagaacccgctcggcggccgcgggctccgcggcggaggcatctttcacagaatccggcggggtcctcgcaggggcgagctccagctccgcggcgtcactacccggggcattatccagctcctccagaagctgcggtccggctccgcggttccaccaccacggccgccatggaggcagcagccgcccggcctcaccgcggctcagcagccgctcgaaggcagctttttcgcccggcgccagccgctcccagagtgccatgcgtccggtagcagcgcagcgagcagtagggcgcattacagcgagggcaggtgtaacgcgctggctggacctcccccgccgggcagaagccacagggcccggccggctccatggcaactggcaccgcgatctacctgcgaacgcacgccggtggtagttcgaaacttccggggcttcttcgattacttccggttcgcagcgcggccgacggcgcgctgtggcgagagcaggcccagaagccgggcgtcaggtacgagccccgccctatgcgatgacgcaaggagcgaaaaaatgggtctggcgagcgcttcgccggtgccacgtctccccctagtggtcacaccaaaacgtggcccgatcatctaaagagaaaaccctcttttt

SEQ ID NO: 460768 - DNA, 2532 bp, Homo sapiens
  misc_feature (20)..(20): n is a, c, g, or t
  misc_feature (23)..(23): n is a, c, g, or t
  misc_feature (26)..(26): n is a, c, g, or t
  misc_feature (39)..(39): n is a, c, g, or t
  misc_feature (47)..(47): n is a, c, g, or t
  misc_feature (51)..(52): n is a, c, g, or t
  misc_feature (54)..(54): n is a, c, g, or t
  misc_feature (57)..(57): n is a, c, g, or t
  misc_feature (60)..(61): n is a, c, g, or t
  misc_feature (63)..(63): n is a, c, g, or t
  misc_feature (67)..(69): n is a, c, g, or t
  misc_feature (71)..(71): n is a, c, g, or t
  misc_feature (75)..(76): n is a, c, g, or t
  misc_feature (79)..(80): n is a, c, g, or t
  misc_feature (97)..(97): n is a, c, g, or t
  misc_feature (185)..(185): n is a, c, g, or t
  misc_feature (191)..(191): n is a, c, g, or t
aatcgcgtaatatggggtanacntantagaaaccaccgntggggttnttannanacngtnnangcannngnatgnngcnngcggggcggatctccgngcggcgagtcatctcctgggaaatggggcggacagtgtttccttgactgactattgtgagcgccctctctctccggcggagcggagancatggnccccactcagggcccccgggccccgctggaattcggagggcccctgggcgccgcggctctgctactgctgctgcccgccaccatgttccacctgctcctggcggcccgttcgggccccgcgcgcctgctgggtccacccgcgtcctgcccgggctggaggtgctgtggagcccacgggcgctgctgctgtggctcgcctggctcggcctgcaggcggcgctctacctactgccggcgcgcaaggtggccgaggggcaggaattgaaggacaagagtcgcctgcgctatccgcttccaggccctggtgctgacagccctgttggtggggctggggatgtcagcggggctgcctctgggggcgctcccggaaatgctcctgcccttggcgtttgtcgccaccctcaccgctttcatcttcagcctctttctctacatgaaggcgcaggtagccccagtttcggccctggcacctggggggaactcaggcaatccgatttacgacttttttctgggacgagagctcaaccctcgtatctgtttcttcgacttcaaatatttctgtgaactgcgacccggcctcatcggctgggtcctcatcaacctggccctgttgatgaaggaggcagagcttcgaggcagtccctcactggccatgtggctggtcaatggcttccagttgctctacgtgggtgatgccctctggcacgaggaggccgtcctcaccaccatggatatcacacatgacgggtttggcttcatgctggcgtttggggacatggcctgggtgcccttcacctacagcctgcaggcccagttcctgctgcaccacccgcagcccctggggttgcccatggcctctgtcatctgcctcatcaatgctactggttactacatcttccgtggggcgaattcccagaaaaacactttccgaaagaatccttctgaccccagagtggctgggcttgagaccatctctacagccacagggcggaaactgctggtgtctgggtggtggggtatggtccgccatcccaactatcttggagacctcatcatggctctggcttggtccttgccctgcggggtgtcacacctgctgccctacttctacctcctctacttcaccgcgctgctggtgcaccgtgaggcccgggatgagcggcagtgcctgcagaagtacggcctggcctggcaggagtactgccggcgccaggaggaactggcactttttccgggcccggtaaagatgatctcgctcttctctagccacggcctgtttccgggcacggcccagggtctgtgccaggtcccccagtgctgccagcgtgtagcctttctggttggtcgggccctcgcccagcaggatgcgggcgacctcgtgcatagcccctcgtgtgcccaggggccccggcgggtgctcgcctgcttccagcacgtgggctgccgcctgcagggcttcttccgcagaggcgaagacttgctgggcacccagggctccggaaacgccgagcagtgtggcacagaagtcagagagcagcgcgtcgtcaccgccgtgatacagggcgagagtatgcgcgtaggcgaacagcacattgggcagctggaagcgcacgagcggcgagactgggccgcggctcaggctgactatcgcggggatgcgggtgggtacgacgggcgtgcaggcccccgggacatctccaagaacccgctcggcggccgcgggctccgcggcggaggcatctttcacagaatccggcggggtcctcgcaggggcgagctccagctccgcggcgtcactacccggggcattatccagctcctccagaagctgcggtccggctccgcggttccaccaccacggccgccatggaggcagcagccgcccggcctcaccgcggctcagcagccgctcgaaggcagctttttcgcccggcgccagccgctcccagagtgccatgcgtccggtagcagcgcagcgagcagtagggcgcattacagcgagggcaggtgtaacgcgctggctggacctcccccgccgggcagaagccacagggcccggccggctccatggcaactggcaccgcgatctacctgcgaacgcacgccggtggtagttcgaaacttccggggcttcttcgattacttccggttcgcagcgcggccgacggcgcgctgtggcgagagcaggcccagaagccgggcgtcaggtacgagccccgccctatgcgatgacgcaaggagcgaaaaaatgggtctggcgagcgcttcgccggtgccacgtctccccctagtggtcacaccaaaacgtggcccgatcatctaaagagaaaaccctcttttt

SEQ ID NO: 460769 - DNA, 2266 bp, Homo sapiens
gagaggcagcaggtacagcagaagtcagtgcgtgggcatccgcatccaatgggtactgcacctttgatggtatctactgagcgtttcagtcaacaatacagctcgtgttcgacaatattccttgatgacagcacagccatccagcattatcttacaatgacaataatatccaccagccaggaggaccctcagttcagtgttcctcccactgccaacacacccacccccgtttgcaagctgtccatgcgctggtccaacctgtttacatctgagaaagggagtgacccagacaaagagaggaaagccccggagaatcatgctgacaccatcgggagcggcagagccatccccattaaacagggcatgctcttaaagcgaagtggaaaatggctgaagacatggaaaaagaaatacgtcaccctgtgttccaatggcgtgctcacctattattcaagcttaggtgattatatgaagaatattcataaaaaagagattgaccttcggacatctaccatcaaagtcccaggaaagtggccatccctagccacatcagcctgtgcacccatctccagctctaaaagcaatggcctatccaaggacatggacaccgggctgggtgactccatatgcttcagccccggtatctccagcaccaccagccccaagctcaacccgcccccctctcctcatgccaataaaaagaaacacctaaagaagaaaagcaccaacaactttatgattgtgtctgccactggccaaacgtggcactttgaagccacgacgtatgaggagcgggatgcctgggtccaagccatccagagccagatcctggccagcctgcagtcatgcaagagcagtaaaagcaagtcccagctgaccagccagagtgaggccatggccctgcagtcgatccaaaacatgcgtgggaacgcccactgtgtggactgtgagacccagaatcctaagtgggccagtttgaacttgggagtcctcatgtgtattgaatgctcaggtatccaccgcagttttggcacccgcctttcccgtgtgcgatctctggagctggatgactggccagttgagctcaggaaggttatgtcatctattggcaatgagctagccaacagcatctgggaagggagcagccaggggcagacaaaaccctcaataaagtccacgagggaagagaaggaatggtggatccgttccaaatatgaggagaagctctttctggccccactaccctgcactgagctgtccctgggccagcagctgctgcgggccaccactgatgaggacctgcagacagccatcctgctgctggcacatggctcccgtgaggaggtgaacgagacctgggaatgtggtcctggagcagctcctgacggggtggacgtcatggcccgagatgcccacgggaacacagcgctgacctacgcccggcaggcctccagccaggagtgcatcaacgtgcttctgcagccccgacacatccaggagagcagctccaggagcctgcattggggagagagcctcagacccctgccacaggcctgcaccccagaattcgccactgtctgctgccacacgatgctgggaggcctggggaagctggctgccgagggcctggcccaccgcaccgagaaggccaccgagggagccagtgaggacccagggctcctttctacctgggctggggggatctggggcagactggttcatgccgtggaggaagtggtgaaggaggtggtgggacatgccaaggagactggagagaaagccattgctgaagccataaagaaagcccaggagtcaggggacaaaaagatgaaggaaatcaccgagacagtgaccaacacagtcacaaatgccatcacccatgcagcagaaagtctggacaaacttggacagtgagtgcacctgctaccacggcccttccccagtctcaataaaaagccatgacatgtgtacattgagcgctggatttattcccatttggatggaaacactaggcaaagtattttcttgttgacataacatattttacatatttatggtgtacacttaagtatttattacatgcacagaatagtgatcaatcagggtgtttggggtgtctatcaccttgaatatttgctacagctgaaccttatatcctggtttggttcctgatgactttcaaattctcctgacccaaacgcaagctcagaagcacaagcacattgttggtggcagtacagactgaaacaccctctttggatggcag

SEQ ID NO: 460770 - DNA, 785 bp, Homo sapiens
tgctaaggggatgggatggggaatgaaagaagccttattgaacacaccagatggtgcatggaccaccttgcagatatttgtccacctttgtacttccatctcctggacactcaaaagagctgtctccctcaacagagggagccaacaggctgacaagaacagcaattcccagatcaaggtcaaaatgacaccatcgctgtgggcagaagggcaggatttacagtggaaactgggatatgttcttggggctgcattcaaacaggagaaagctcgctggaaattgccctggccaggggacagattcacagaggagatgaggttgggacagatttctagctgtcattctgccttattcctgctgacaacaactccaggaagatgtatctatcttcgatttctagtgtcttccaaacgctcaagaagctcttccttagcataaatccgagtttatcctattgtcatgttacctcaccctgtgtttatttcctctggactataacatttcttggcacaaaaaagttggtgtaagatagtgtagtaagcatgctgccgctggaatcagacaaacttgaacttcaatctcagattctccacttgttagccatgtgacttcgccaactttacctggccaccctgcacttcagtttctcagtaagtaaaatgggcataacaataacgcatacctcttagagttgttgtgagaattaaatgagataatatatgtaatgctccacaatttagaggctagtaaatatcagttataaataaaatgtttttgagaaata

SEQ ID NO: 460771 - DNA, 822 bp, Homo sapiens
tgctaaggggatgggatggggaatgaaagaagccttattgaacacaccagatggtgcatggaccaccttgcagatatttgtccacctttgtacttccatctcctggacactcaaaagagctgtctccctcaacagagggagccaacaggctgacaagaacagcaattcccagatcaaggtcaaaatgacaccatcgctgtgggcagaagggcaggatttacagtggaaactgggatatgttcttggggctgcattcaaacaggagaaagctcgctggaaattgccctggccaggggacagattcacagaggagatgaggttgggacagatttctagctgtcattctgccttattcctgctgacaacaactccaggaagatgtatctatcttcgatttctagtgtcttccaaacgctcaagaagctcttccttagcataaatccgagtttatcctattgtcatgttacctcaccctgtgtttatttcctctggactataacatttcttggcacaaaaaagttggtgtaagatagtgtagtaagcatgctgccgctggaatcagacaaacttgaacttcaatctcagattctccacttgttagccatgtgacttcgccaactttacctggccaccctgcacttcagtttctcaagaactgccaaacatccaataactttcaatccagtccagcaaaacatacgtgagttcagtaaggaattgctgacttactgacctggatgtgaacctgaaatttctccctctgttttgttccttggaatgctataatgtatcagtgttgcttttattgatttaaaaaaaaaa

SEQ ID NO: 460772 - DNA, 1607 bp, Homo sapiens
  misc_feature (1587)..(1587): n is a, c, g, or t
  misc_feature (1589)..(1589): n is a, c, g, or t
  misc_feature (1592)..(1592): n is a, c, g, or t
  misc_feature (1594)..(1595): n is a, c, g, or t
  misc_feature (1598)..(1599): n is a, c, g, or t
  misc_feature (1601)..(1601): n is a, c, g, or t
  misc_feature (1603)..(1603): n is a, c, g, or t
  misc_feature (1606)..(1606): n is a, c, g, or t
gtgtttggcgtggggcgcactgttcagttgctctcctggatggctttatgtctccgcggtgtttcctagagtctcggcgtttctacctcttcgcaccctttcctgccaccctttgtcccctggaagcccggagacatcagcggctgcaattttgctactcgctgctcggcgtggaactgtcaggacaaaaaataatatccaaagatattttggcactaacggcgctatctgtagcaagaaagttgagcagtgtgaactgttgagacttccaaggagacttcagacaaccaagacagtgtaaaggaaaacagagaaaaagacttgttagacattattaagggcacgaaagttgaattgagcacagtaaatgtacaaacaacaaagccacccaacagaagttcacttaaaagctacaactggcgggcctcaaagagctttaggacatgctccaaagaagagaaatgagcccctgagtcctgagttggtggcagctgcatctgctgctctgttttgacaagcaaacaagccagaactgctcaggcagctccgtagcatgaggaagagtcaggggcacagagagatggagagagacctagttagtttcaataacaaaatatcagatatgaaaattgccagatgtgctacagctagaattaatataaggccagagcatcagattcagtttgaccaaggctatgacaattatcctggcctggagaagactgctgatcttagaaacaggttaaagtctctcttcaccctgccgtcatgtctaagtcagagtctcctaaagagcccgaacagctgaggaagctcttcattggagggttgagctttgaaacaactgatgagagcctgaggagccattttgagcaatggggaacgctcacggactgtgtggtaatgagagatccaaacaccaagcgctccaggggctttgggtttgtcacatatgccactgtggaggaggtggatgcagctatgaatgcaaggccacacaaggtggatggaagagttgtggaaccaaagagagctgtctccagagaagattctcaaagaccaggtgcccacttaactgtgaaaaagatatttgttggtggcattaaagaagacactgaagaacatcacctaagagattattttgaacagtatggaaaaattgaagtgattgaaatcatgactgaccgaggcagtggcaagaaaaggggctttgcctttgtaacctttgacgaccatgactccgtggataagattgtcattcagaaataccatactgtgaatggccacaactgtgaagttagaaaagccctgtcaaagcaagagatggctagtgcttcatccagccaaagaggtcgaagtggttctggaaactttggtggtggtcgtggaggtggtttccggtgggaatgacaactttcggtcgtggaggaaacttcagtggtcgtggtggctttggtggcagccgtggtggtggtggatatggtggcagtggggatggctataatggatttgccacatctaatatgagcactgggaagaagactctttctaaggctgctcagctttagagtacatttcttgatggtntnagntnngtnncntntcnc

SEQ ID NO: 460773 - DNA, 1173 bp, Homo sapiens
gtgtttggcgtggggcgcactgttcagttgctctcctggatggctttatgtctccgcggtgtttcctagagtctcggcgtttctacctcttcgcaccctttcctgccaccctttgtcccctggaagcccggagacatcagcggctgcaattttgctactcgctgctcggcgtggaactgtcaggacaaaaaataatatccaaagatattttggcactaacggcgctatctgtagcaagaaagttgagcagtgtgaactgttgagacttccaaggagacttcagacaaccaagacagtgtaaaggaaaacagagaaaaagacttgttagacattattaagggcacgaaagttgaattgagcacagtaaatgtacaaacaacaaagccacccaacagaagttcacttaaaagctacaactggcgggcctcaaagagctttaggacatgctccaaagaagagaaatgagcccctgagtcctgagttggtggcagctgcatctgctgctctgttttgacaagcaaacaagccagaactgctcaggcagctccgtagcatgaggaagagtcaggggcacagagagatggagagagacctagttagagaaatgacccaccgtgcccaacctcacttgcttcttatccttacactcccccagccccagagaaactgccacatacaccacaaaaaccaaacatcccccaatgaccttagccccattgctccattcactcccaggtgagaattcaggcaaacgtccacaaaggtcacaggcagcgtacatacggttctgttataccccatatattaccccttcatgtcctaaagaagacattttctcttagagattttcattttagtgtatctttaaaaaaaaatcttgtgctaacttgcctccatctttttcttgggtgaggacacccaggaatgacccttttgtgtctatgatgttgctgttcacagcttttcttgataggcctagtacaatcttgggaacagggttactgtatactgaaggtctgacagtagctcttagactcgcctatcttaggtagtcatgctgtgcattttttttttcattggtgtactgtgtttgatttgtctcatatatttggagtttttctgaaaaatggagcagtaatgcagcatcaacctattaaaatacattttaagccc

SEQ ID NO: 460774 - DNA, 1372 bp, Homo sapiens
gtgtttggcgtggggcgcactgttcagttgctctcctggatggctttatgtctccgcggtgtttcctagagtctcggcgtttctacctcttcgcaccctttcctgccaccctttgtcccctggaagcccggagacatcagcggctgcaattttgctactcgctgctcggcgtggaactgtcaggacaaaaaataatatccaaagatattttggcactaacggcgctatctgtagcaagaaagttgagcagtgtgaactgttgagacttccaaggagacttcagacaaccaagacagtgtaaaggaaaacagagaaaaagacttgttagacattattaagggcacgaaagttgaattgagcacagtaaatgtacaaacaacaaagccacccaacagaagttcacttaaaagctacaactggcgggcctcaaagagctttaggacatgctccaaagaagagaaatgagcccctgagtcctgagttggtggcagctgcatctgctgctctgttttgacaagcaaacaagccagaactgctcaggcagctccgtagcatgaggaagagtcaggggcacagagagatggagagagacctagttagtttcaataacaaaatatcagatatgaaaattgccagatgtgctacagctagaattaatataaggccagagcatcagattcagtttgaccaaggctatgacaattatcctggcctggagaagactgctgatcttagaaacagttcagtgctttaccaaggcatttcctctctgccgtgacttgctttaatccaccatcctgttcaccggacgttcggttgagaaagaagaatgcaaggcactgaggaaagttctggagcagaaaagcctttgtttacaaataacttgggaacctgctagaggaaaacttgtatgacttgaaatcacattacttaatgttcatatgatattttcattttttccggttctatttagtagagaaaagtagtttagtccataaaaaaagaatttagaattatttttaaaattagccctccagtttataaactggattttaatctgccagtaagtttattcaagtaaatatgtaaattgatgcataaaacagttgattatcaagtttgcaagaaaatgttacctgttaactctgatattaatttcaatggttaaaaagtcatgtaaagaaagttaattattttacagaatgattgctttatgaaagggaatgttgtgatttacctatataatcttttgtaattataatttgtaattaaacattgcagtgtttcctgcccttaaaaacaagtgttgactctttttaacagcttcttttaattataatttgtaattaaacattgcagtgtttcctgccct

SEQ ID NO: 460775 - DNA, 1004 bp, Homo sapiens
aagccagctcggcaaggggaataaggggaagcaatggtgagatgccaagttgttcaccctgatatgacttgggcaggtctggggtatcaaccccagacaacccaggcctggacttattgcttctgttggaaattgacagttcacactggcctttctcagaatgttggcactgccactgactaattctgtgaccggggcaccttttatagcctccatcagcctgtttccccagctgtaaaatgctgaaagtgaaacctagcttaaatggctttcttgaggaatagaaaagaaaccacgtataaactctctggtacatagtaggtgctcagcaaatgtccattccctttctctgttgtgcattcctcttttgaagttcagtgctttaccaaggcatttcctctctgccgtgacttgctttaatccaccatcctgttcaccggacgttcggttgagaaagaagaatgcaaggcactgaggaaagttctggagcagaaaagcctttgtttacaaataacttgggaacctgctagaggaaaacttgtatgacttgaaatcacattacttaatgttcatatgatattttcattttttccggttctatttagtagagaaaagtagtttagtccataaaaaaagaatttagaattatttttaaaattagccctccagtttataaactggattttaatctgccagtaagtttattcaagtaaatatgtaaattgatgcataaaacagttgattatcaagtttgcaagaaaatgttacctgttaactctgatattaatttcaatggttaaaaagtcatgtaaagaaagttaattattttacagaatgattgctttatgaaagggaatgttgtgatttacctatataatcttttgtaattataatttgtaattaaacattgcagtgtttcctgcccttaaaaacaagtgttgactctttttaacagcttcttttaattataatttgtaattaaacattgcagtgtttcctgccct

SEQ ID NO: 460776 - DNA, 644 bp, Homo sapiens
gtgtttggcgtggggcgcactgttcagttgctctcctggatggctttatgtctccgcggtgtttcctagagtctcggcgtttctacctcttcgcaccctttcctgccaccctttgtcccctggaagcccggagacatcagcggctgcaattttgctactcgctgctcggcgtggaactgtcaggacaaaaaataatatccaaagatattttggcactaacggcgctatctgtagcaagaaagttgagcagtgtgaactgttgagacttccaaggagacttcagacaaccaagacagtgtaaaggaaaacagagaaaaagacttgttagacattattaagggcacgaaagttgaattgagcacagtaaatgtacaaacaacaaagccacccaacagaagttcacttaaaagctacaactggcgggcctcaaagagctttaggacatgctccaaagaagagaaatgagcccctgagtcctgagttggtggcagctgcatctgctgctctgttttgacaagcaaacaagccagaactgctcaggcagctccgtagcatgaggaagagtcaggggcacagagagatggagagagacctagttagagaaatgacccaccatcaacgaaaagaaagaaaggcgtaggctg

SEQ ID NO: 460777 - DNA, 640 bp, Homo sapiens
gctgttcaccggatggtggattaaagcaaggtcacggcagagaggaattgctttaatccaccatcctgttcaccggacgttcggttgagaaagaagaatgcaaggcactgaggaaagttctggagcagaaaagcctttgtttacaaataacttgggaacctgctagaggaaaacttgtatgacttgaaatcacattacttaatgttcatatgatattttcattttttccggttctatttagtagagaaaagtagtttagtccataaaaaaagaatttagaattatttttaaaattagccctccagtttataaactggattttaatctgccagtaagtttattcaagtaaatatgtaaattgatgcataaaacagttgattatcaagtttgcaagaaaatgttacctgttaactctgatattaatttcaatggttaaaaagtcatgtaaagaaagttaattattttacagaatgattgctttatgaaagggaatgttgtgatttacctatataatcttttgtaattataatttgtaattaaacattgcagtgtttcctgcccttaaaaacaagtgttgactctttttaacagcttcttttaattataatttgtaattaaacattgcagtgtttcctgccct

SEQ ID NO: 460778 - DNA, 2570 bp, Homo sapiens
gtgtttggcgtggggcgcactgttcagttgctctcctggatggctttatgtctccgcggtgtttcctagagtctcggcgtttctacctcttcgcaccctttcctgccaccctttgtcccctggaagcccggagacatcagcggctgcaattttgctactcgctgctcggcgtggaactgtcaggacaaaaaataatatccaaagatattttggcactaacggcgctatctgtagcaagaaagttgagcagtgtgaactgttgagacttccaaggagacttcagacaaccaagacagtgtaaaggaaaacagagaaaaagacttgttagacattattaagggcacgaaagttgaattgagcacagtaaatgtacaaacaacaaagccacccaacagaagttcacttaaaagctacaactggcgggcctcaaagagctttaggacatgctccaaagaagagaaatgagcccctgagtcctgagttggtggcagctgcatctgctgctctgttttgacaagcaaacaagccagaactgctcaggcagctccgtagcatgaggaagagtcaggggcacagagagatggagagagacctagttaggaaaaatatattcagggggaagagatgtaatagatttcacattatggcagttactaaagaagcacgtgaacagacacatcaccttcactttgggatatggaatttgataagcagttagccacagaatatgaacaaccccttgagaatgagattgaagaactgatccaggggaccaaaagaggggaaactgagagttcccaattaataatgaagcagcttcatatctaagatctctggtggactttttctgcccgtggacgccgctgaagaagcatcgttaaagtctctcttcaccctgccgtcatgtctaagtcagagtctcctaaagagcccgaacagctgaggaagctcttcattggagggttgagctttgaaacaactgatgagagcctgaggagccattttgagcaatggggaacgctcacggactgtgtggtaatgagagatccaaacaccaagcgctccaggggctttgggtttgtcacatatgccactgtggaggaggtggatgcagctatgaatgcaaggccacacaaggtggatggaagagttgtggaaccaaagagagctgtctccagagaagattctcaaagaccaggtgcccacttaactgtgaaaaagatatttgttggtggcattaaagaagacactgaagaacatcacctaagagattattttgaacagtatggaaaaattgaagtgattgaaatcatgactgaccgaggcagtggcaagaaaaggggctttgcctttgtaacctttgacgaccatgactccgtggataagattgtcattcagaaataccatactgtgaatggccacaactgtgaagttagaaaagccctgtcaaagcaagagatggctagtgcttcatccagccaaagaggtcgaagtggttctggaaactttggtggtggtcgtggaggtggtttccggtgggaatgacaactttcggtcgtggaggaaacttcagtggtcgtggtggctttggtggcagccgtggtggtggtggatatggtggcagtggggatggctataatggatttggtaatgatggaagcaattttgaaggtggtggaagctacaatgatttgggcaattacaccaatcagtcttcaaattttggacccatgaagggaggaaattttggaggcagaagctctggcccctatggcggtggaggccaatactttgcaaaacacaaaacccaaggtggctatggcggttccagcagcagcagtagctatggcagtggcagaagattttaattaggaaacaaagcttagcaggagaggagagccagagaagtgacagggaagctacaggttacaacagatttgtgaactcagccaagcacagtggtggcagggcctagctgctacaaagaagacatgttttagacaaatactcatgtgtatgggcaaaaaactcgaggactgtatttgtgactaattgtataacaggttattttagtttctgttctgtggaaagtgtaaagcattccaacaaagggttttaatgtagatttttttttttgcaccccatgctgttgattgctaaatgtaacagtctgatcgtgacgctgaataaatgtcttttttttaatgtgctgtgtaaagttagtctactcttaagccatcttggtaaatttccccaacagtgtgaagttagaattccttcagggtgatgccaggttctatttggaatttatatacaacctgcttgggtggagaagccattgtcttcggaaaccttggtgtagttgaactgatagttactgttgtgacctgaagttcaccattaaaagggattacccaagcaaaatcatggaatggttataaaagtgattgttggcacatcctatgcaatatatctaaattgaataatggtaccagataaaattatagatgggaatgaagcttgtgtatccattatcatgtgtaatcaataaacgatttaattctcttgaa

SEQ ID NO: 460779 - DNA, 1745 bp, Homo sapiens
caaacacaaacccacatacggctaggacgaggctggtttgaatcggaagaggttaaagtctctcttcaccctgccgtcatgtctaagtcagagtctcctaaagagcccgaacagctgaggaagctcttcattggagggttgagctttgaaacaactgatgagagcctgaggagccattttgagcaatggggaacgctcacggactgtgtggtaatgagagatccaaacaccaagcgctccaggggctttgggtttgtcacatatgccactgtggaggaggtggatgcagctatgaatgcaaggccacacaaggtggatggaagagttgtggaaccaaagagagctgtctccagagaagattctcaaagaccaggtgcccacttaactgtgaaaaagatatttgttggtggcattaaagaagacactgaagaacatcacctaagagattattttgaacagtatggaaaaattgaagtgattgaaatcatgactgaccgaggcagtggcaagaaaaggggctttgcctttgtaacctttgacgaccatgactccgtggataagattgtcattcagaaataccatactgtgaatggccacaactgtgaagttagaaaagccctgtcaaagcaagagatggctagtgcttcatccagccaaagaggtcgaagtggttctggaaactttggtggtggtcgtggaggtggtttccggtgggaatgacaactttcggtcgtggaggaaacttcagtggtcgtggtggctttggtggcagccgtggtggtggtggatatggtggcagtggggatggctataatggatttggtaatgatggaagcaattttgaaggtggtggaagctacaatgatttgggcaattacaccaatcagtcttcaaattttggacccatgaagggaggaaattttggaggcagaagctctggcccctatggcggtggaggccaatactttgcaaaacacaaaacccaaggtggctatggcggttccagcagcagcagtagctatggcagtggcagaagattttaattaggaaacaaagcttagcaggagaggagagccagagaagtgacagggaagctacaggttacaacagatttgtgaactcagccaagcacagtggtggcagggcctagctgctacaaagaagacatgttttagacaaatactcatgtgtatgggcaaaaaactcgaggactgtatttgtgactaattgtataacaggttattttagtttctgttctgtggaaagtgtaaagcattccaacaaagggttttaatgtagatttttttttttgcaccccatgctgttgattgctaaatgtaacagtctgatcgtgacgctgaataaatgtcttttttttaatgtgctgtgtaaagttagtctactcttaagccatcttggtaaatttccccaacagtgtgaagttagaattccttcagggtgatgccaggttctatttggaatttatatacaacctgcttgggtggagaagccattgtcttcggaaaccttggtgtagttgaactgatagttactgttgtgacctgaagttcaccattaaaagggattacccaagcaaaatcatggaatggttataaaagtgattgttggcacatcctatgcaatatatctaaattgaataatggtaccagataaaattatagatgggaatgaagcttgtgtatccattatcatgtgtaatcaataaacgatttaattctcttgaa

SEQ ID NO: 460780 - DNA, 499 bp, Homo sapiens
gaatttttacatagaatatttcacttaaatttttttctcataattttgttgacagtttatattcattaaaatgttcttttttttaggaaaaatatattcagggggaagagatgtaatagatttcacattatggcagttactaaagaagcacgtgaacaggtttgttaagaataactatttctcaggtggaaaaatattccatcttttcaagatgtccttagtgttctgatggtgtaatagttggatattttaatattccctcctgtcattggcctggattcgaatcatgaatgtggcggttgttagaaggaaaacttgggactgtaaattgggaaggcattgagagaccaaagaataatttgggcaagaccagcttgatgaatagatgagtttactaggacttacctactggacatttctgggcagctctagagtcaccctgcctcttatctctaaactgcttttaagcttatatgctggctgtttgcctacatgtgtg

SEQ ID NO: 460781 - DNA, 2497 bp, Homo sapiens
gtgtttggcgtggggcgcactgttcagttgctctcctggatggctttatgtctccgcggtgtttcctagagtctcggcgtttctacctcttcgcaccctttcctgccaccctttgtcccctggaagcccggagacatcagcggctgcaattttgctactcgctgctcggcgtggaactgtcaggacaaaaaataatatccaaagatattttggcactaacggcgctatctgtagcaagaaagttgagcagtgtgaactgttgagacttccaaggagacttcagacaaccaagacagtgtaaaggaaaacagagaaaaagacttgttagacattattaagggcacgaaagttgaattgagcacagtaaatgtacaaacaacaaagccacccaacagaagttcacttaaaagctacaactggcgggcctcaaagagctttaggacatgctccaaagaagagaaatgagcccctgagtcctgagttggtggcagctgcatctgctgctctgttttgacaagcaaacaagccagaactgctcaggcagctccgtagcatgaggaagagtcaggggcacagagagatggagagagacctagttagacacatcaccttcactttgggatatggaatttgataagcagttagccacagaatatgaacaaccccttgagaatgagattgaagaactgatccaggggaccaaaagaggggaaactgagagttcccaattaataatgaagcagcttcatatctaagatctctggtggactttttctgcccgtggacgccgctgaagaagcatcgttaaagtctctcttcaccctgccgtcatgtctaagtcagagtctcctaaagagcccgaacagctgaggaagctcttcattggagggttgagctttgaaacaactgatgagagcctgaggagccattttgagcaatggggaacgctcacggactgtgtggtaatgagagatccaaacaccaagcgctccaggggctttgggtttgtcacatatgccactgtggaggaggtggatgcagctatgaatgcaaggccacacaaggtggatggaagagttgtggaaccaaagagagctgtctccagagaagattctcaaagaccaggtgcccacttaactgtgaaaaagatatttgttggtggcattaaagaagacactgaagaacatcacctaagagattattttgaacagtatggaaaaattgaagtgattgaaatcatgactgaccgaggcagtggcaagaaaaggggctttgcctttgtaacctttgacgaccatgactccgtggataagattgtcattcagaaataccatactgtgaatggccacaactgtgaagttagaaaagccctgtcaaagcaagagatggctagtgcttcatccagccaaagaggtcgaagtggttctggaaactttggtggtggtcgtggaggtggtttccggtgggaatgacaactttcggtcgtggaggaaacttcagtggtcgtggtggctttggtggcagccgtggtggtggtggatatggtggcagtggggatggctataatggatttggtaatgatggaagcaattttgaaggtggtggaagctacaatgatttgggcaattacaccaatcagtcttcaaattttggacccatgaagggaggaaattttggaggcagaagctctggcccctatggcggtggaggccaatactttgcaaaacacaaaacccaaggtggctatggcggttccagcagcagcagtagctatggcagtggcagaagattttaattaggaaacaaagcttagcaggagaggagagccagagaagtgacagggaagctacaggttacaacagatttgtgaactcagccaagcacagtggtggcagggcctagctgctacaaagaagacatgttttagacaaatactcatgtgtatgggcaaaaaactcgaggactgtatttgtgactaattgtataacaggttattttagtttctgttctgtggaaagtgtaaagcattccaacaaagggttttaatgtagatttttttttttgcaccccatgctgttgattgctaaatgtaacagtctgatcgtgacgctgaataaatgtcttttttttaatgtgctgtgtaaagttagtctactcttaagccatcttggtaaatttccccaacagtgtgaagttagaattccttcagggtgatgccaggttctatttggaatttatatacaacctgcttgggtggagaagccattgtcttcggaaaccttggtgtagttgaactgatagttactgttgtgacctgaagttcaccattaaaagggattacccaagcaaaatcatggaatggttataaaagtgattgttggcacatcctatgcaatatatctaaattgaataatggtaccagataaaattatagatgggaatgaagcttgtgtatccattatcatgtgtaatcaataaacgatttaattctcttgaa

SEQ ID NO: 460782 - DNA, 1497 bp, Homo sapiens
cccagggcggaggcctcgcgcaaaacccaggcgccgcggctccgcgctccggctgagggtccgcgccgccgcccgcccgctccttcccgctcggccgcggcctcagggacggatactccagcgcgcggttccaaccgaggcccgtggtgggtttagccccacgaagatgaactgggcacccgcaacgtgctgggctctgctactggcggccgccttcctctgcgacagcggcgcagccaagggcggccgcggaggtgcgcggggcagtgcccggggaggggtccgcgggggtgcgcgcggggcctcgagggtgcgcgtgaggccggcgcagcgctacggtgccccgggctcctccctgcgcgtggctgccgccggggcggcagccggggcggcggcgggagcggccgcgggcctggcggcgggctcgggctggagaagggccgcgggacccggggaacgcggcctggaggacgaggaggacggggtgcccggaggcaacgggacaggccccggcatctacagctaccgggcgtggacttcgggcgctggacccacgcgcggcccgcgtctctgtctcgtgctgggcggcgccctcggagccctggggctgctgcggccctaggcctggctgggctcggggaccacatctggcccccggcccgcgccatcccccaggatcctccggcctgggctcccccttcctcccttgcccacggtcttggagccccactgggtgcaggagctgctggctgtccctgtggacccgccatccaccgtcctgcccacgccgcctcagcctgccacctcccacctagaggagaccatgggccctgccccacccactccaggatgttagggtcccctcagccaaaaaggcagctgcctgtggctcctggcacagcaactgccaatcccgctgaagaggcctccctgggcacagcacaggctgcacggtgcacgcatttccctgaaggcagccccttcttcggaagcagctgttccaggcctcggaacagggcctgggctgatgagtgtgtggggtatggggcagcagaggcagccagccagcaaagaggggccactgagcaccagggccctggtggaggctgctgtgggacggtcaggccaccaccgcaaagaggcagccggagcttctgcacaggatgtccctggccccaggtcctgcagcaccttagaagctccgggagaaccaagcatgcggagctgctcagggacgtccactgggaagcctggtgtccactcccacctgcttgggccctgcaactggggtccctggagctggccaggctgtggggcgccagagagcacagcaccctagtgaccagcatggagcttctggaccggccggggggtggccccgcaggacgtcgaggtccagcatcacggaacccagcagcccacggcggaaagtctgcaggaagtcacgggctgccgcaggatagttaggctgaataatgttcacgttacctgggggac

SEQ ID NO: 460783 - DNA, 7996 bp, Homo sapiens
cctccctccaccttcgttccttctgagcagtctgtgcttgtcctctcctgcagaccaagtccggaacagctactacatcggggccgatggctccttgcggctgctgctggccaacggcatggaggtggcgctgcagactgagccccacttgctggctggcaccgtcaaccccaccgtgggcaagaggaatgtcacgctgcccatcgacaacggcctcaacctggtggagtggcgccagcgcaaagagcaggctcggggccaggtcactgtctttgggcgccggctgcgggttcacaaccgaaatctcctatctctggactttgatcgcgtaacacgcacagagaagatctatgatgaccaccgcaagttcacccttcggattctgtacgaccaggcggggcggcccagcctctggtcacccagcagcaggctgaatggtgtcaacgtgacatactcccctgggggttacattgctggcatccagaggggcatcatgtctgaaagaatggaatacgaccaggcgggccgcatcacatccaggatcttcgctgatgggaagacatggagctacacatacttagagaaggcaggtgtctgtctccctgcatcactggccttgccatacagaaggccaatcattcacggccaagcccagcctggtggcctcagtgggctgtatctgacccatgtcaccaaaaggaaatgttcaggaaagtctgccacagagggcatggggtcccaagaggcatcaggatggatcagggagatagcatggcaggtggtgtccatggtgctgctactacacagccagaggcagtatatctttgagttcgacaagaatgaccgcctctcttctgtgacgatgcccaacgtggcgcggcagacactagagaccatccgctcagtgggctactacagaaacatctatcagccccctgagggcaatgcctcagtcatacaggacttcactgaggatgggcacctccttcacaccttctacctgggcactggccgcagggtgatatacaagtatggcaaactgtcaaagctggcagagacgctctatgacaccaccaaggtcagtttcacctatgacgagacggcaggcatgctgaagaccatcaacctacagaatgagggcttcacctgcaccatccgctaccgtcagattgggcccctgattgaccgacagatcttccgcttcactgaggaaggcatggtcaacgcccgttttgactacaactatgacaacagcttccgggtgaccagcatgcaggctgtgatcaacgagaccccactgcccattgatctctatcgctatgatgatgtgtcaggcaagacagagcagtttgggaagtttggtgtcatttactatgacattaaccagatcatcaccacagctgtcatgacccacaccaagcattttgatgcatatggcaggatgaaggaagtgcagtatgagatcttccgctcgctcatgtactggatgaccgtccagtatgataacatggggcgagtagtgaagaaggagctgaaggtaggaccctacgccaataccactcgctactcctatgagtatgatgctgacggccagctgcagacagtctccatcaatgacaagccactctggcgctacagctacgacctcaatgggaacctgcacttactgagccctgggaacagtgcacggctcacaccactacggtatgacatccgcgaccgcatcactcggctgggtgacgtgcaatacaagatggatgaggatggcttcctgaggcagcggggcggtgatatctttgagtacaactcagctggcctgctcatcaaggcctacaaccgggctggcagctggagtgtcaggtaccgctacgatggcctggggcggcgcgtgtccagcaagagcagccacagccaccacctgcagttcttctatgcagacctgaccaaccccaccaaggtcacccacctgtacaaccactccagctctgagatcacctccctctactacgacttgcaaggacacctctttgccatggagctgagcagtggtgatgagttttacatagcttgtgacaacatcgggacccctcttgctgtctttagtggaacaggtttgatgatcaagcaaatcctgtacacagcctatggggagatctacatggataccaaccccaactttcagatcatcataggctaccatggtggcctctatgatccactcaccaagcttgtccacatgggccggcgagattatgatgtgctggccggacgctggactagcccagaccacgagctgtggaagcaccttagtagcagcaacgtcatgccttttaatctctatatgttcaaaaacaacaaccccatcagcaactcccaggacatcaagtgcttcatgacagatgttaacagctggctgctcacctttggattccagctacacaacgtgatccctggttatcccaaaccagacatggatgccatggaaccctcctacgagctcatccacacacagatgaaaacgcaggagtgggacaacagcaagtctatcctcggggtacagtgtgaagtacagaagcagctcaaggcctttgtcaccttagaacggtttgaccagctctatggctccacaatcaccagctgccagcaggctccaaagaccaagaagtttgcatccagcggctcagtctttggcaagggggtcaagtttgccttgaaggatggccgagtgaccacagacatcatcagtgtggccaatgaggatgggcgaagggttgctgccatcttgaaccatgcccactacctagagaacctgcacttcaccattgatggggtggatacccattactttgtgaaaccaggaccttcagaaggtgacctggccatcctgggcctcagtggggggcggcgaaccctggagaatggggtcaacgtcactgtgtcccagatcaacacagtacttaatggcaggactagacgctacacagacatccagctccagtacggggcactgtgcttgaacacacgctacgggacaacgttggatgaggagaaggcacgggtcctggagctggcccggcagagagccgtgcgccaagcgtgggcccgcgagcagcagagactgcgggaaggggaggaaggcctgcgggcctggacagagggggagaagcagcaggtgctgagcacagggcgggtgcaaggctacgacggctttttcgtgatctctgtcgagcagtacccagaactgtcagacagcgccaacaacatccacttcatgagacagagcgagatgggccggaggtgacagagaggaccaaggacttcttgccaaagacagctactcttttgtggccgcatacctgactgtgttgtacttttaaaaaaatgattttttaacaagtgcagaaacaaaaagatactggttgcattgtaactcatgcaacatccttttttttagaaaagaaaaacacagatttggccttcgcacattttttgcaaagaacagaaggtatttttttctgtagtgtgatcacaatgaaaactttattgtcttttgttccctttttccttgaggatttttcccttgtcgtttggggtatgtatctcctctctgagatgcatctcctggggtgtgtcctcgtctgtccctaggtacccagtgtgatgtgggacatgaatgtctgtgctaacttgtctcatgtgcaaccctttcttcttcgactggggtcgggcaggagtaaagggagtgatgggccagtacaacaccccttccaagggggcctgggaggagggtctgtaggacctgaggctccttggcagggctcctgcagaagagtggtggatttcttctcaccttgttctctgcctccagaggatcatagatggcttcatcttgctccagggaatttcatggtgttgttcagcaccttttttaagctgccccaaactcctgttcaagctttctattttgatgctgaatgaaaccccctaccacttttgcaaatcctgtgtagttgtcggtgccacccccatgctgggatagagaaagtgtctcccaggtcctttcccccagaccagtgacataacatcctgggctcagagtcccatcctcccgggagggaaagcacccaggatgcctgtgattggttggtcctccatgatgttcctgttcatctcctcctttctcccaaagccagatgtgagaacgagcactgcacagcaagccttcaatgtgggcaccatgtccacagaacagaaggccacccatggcaaaggcatggcagtggtggcgagggcaccagcctgccttccgaggcaaagccctctctctatgactttgagtatcttccctccaccactcagccgccaccactgagacgtaggaatgtggagggaggtgcttggtggcctttgattctggaaaaatgcttaacaaaaaaagccagccaaagagaggaaggcataagctaagcatccttctaaccagttcccaaagtcccatctgcctccatgtaccagctgatcgcagagctggactggggcaggctgggcttccaggaaattcctgaagttctgaaacagcttcccctctagagaagcccacccaatgtgttttttagtgacaggaagaaaggagggaagagctgatgtggtgtggcctgcccatatcatacaaccccaccaggagcagggcagttcccaaggtgggtgcccgtagatctgggaggccaggctggcatgattcctgtgaagaactgtgcctgtgtcgtcagggagaggcctgagccctctcagaagcagggacagcccacacctgaagagcacgcccaagctgaggcagcagccagcaggctgggggagcagtgagggcagggggagtcacagccagagctgggagccccttgttcaaggattccattcctggttcatccgcctaattaccattgtcattaccactcacaggaggctctgggagatgggaggggaagccaaatgcttccttttaagctgggcttcttagaaaatggaacttttatgggttacatttacattaagtgtggaaaatgaattctgagtctgagctattccccgtggaaaccttgttggactgataagctcatggcacctctatagccttactcacatagtcttcagaatattacacaagttaatgaaactgagaaggtctgactgcatgaggatcggagcagcatgtagtctgggttctgcctggcagagggaggcaaccaaaacttcttggggagaggagatttcgccttaacgtcatcccactgggattagaggatgtgtttcgctaagtgctcttcctgtttccaaaaaaaaagccaccctgctgcagcagtgcgctttggcctgcttgtccactggttgcccattgcccctggatccagagctctactgagtcagatacagtgctctgcaggcctgctgtgggaggcatgagctggagatgggggctcccatctggcaggatcattcttggatgagatggaaaacagtttggcctgaagaacacaagttttgtcctccagaagggacttacgcctctcaaaatgtactcttcataccaagggcccttgggcaaagtgctcctgcccagttgatcagtcccatcctggctgcctgacatcagtgaagacctgctggggatgtctgctcagaggtcaggaacggcatgcggtccacaggaaccagctccctacgcttcccccacgccctgtccctcctccacagccccctccccaaaggaatagggtggacttttagggatcaaaaacagaattattgggtgtttcatttctttttttctttctttcttttttttttcatagagatggggtctcactatgttgcccaggctgttctcaaactcctggcctcaggcgatccaccttggcctcctgaagtgctggggttacaggtgtgagccactgcgcctggactgagtgtttgtttctttaaaggatcttatatttttcctgtgctacataccaccacagcagcccagcttctgtggggagagaagttgaaggatcccgaagctttagaaaaaggatctcagctgtggcacaggcagtgttatgcgcctcactgccacattggtgctgttgtattgaaggtggtgcttctggccttggcccttttgagttggtttccatttgggctgcaggtgactcagtgactccctcctcaagctgtcctcctgctaagaccagcagtcacaaacccatggcaagggtgagtgtgaaggcctaaccctgtgcctatgtaataggctccaagcatcgactcccatcctgagaggaccggcccttttgacactcaccaaccaaatctgttcattcgatagagtgaccaggcctccctcacctgcccaggtgtatgatcctacagttcctgccttctctcctaccccgcacagctgccaactggtcctacatcctcagcccctctgccaccaccttaaataggactttactgattccccaactttgtttttttgtaggatgagatttcctttttatcccacccccccacaccccaaacagacattgctggagggcagactggaggaaggggaaggcatgcaggtaaattactgccttgtcagcctctgaccctcatctctcagaattgttggctgagaattaacccaaggaccacaccagtgcctgatttctacttagggagagaggattggaaacgatccctaagaaactgactgagggtgagaatggccaggaggtgtgtgtccaaataaccaggagggggcacagaagatgatggcaaggcagactgggcagtgttttgtagacacagaacaaagaatcagaatttgaaaaaagaagaaaaacaaatcttcgcagctgcaactttaaagtatcacctttatagatggcagggatttccattatgcaaatggaatctaagatttcaatgtgaaatcttagaatgcagttttaccacttgcagtcttgtatttgtggtggccatgtggtgagggcggtgatgctgagctttctgcccaggaggaatgagctttcaagctctcagcagggtgtcaggcttggggatttgagcatccactgctcaaagtccaggctattctccagtcctcacggcagccactaagcccaggagccagacctggcccggggacacatctcctgagggatcccagaaagaacccagtctttcctttcccttggggtccttgttagaatgaaaacctctctatttaaggcacatcattcccagctaggtttatacacttgtctatattttactggaggaaagggaattaaaaaagaactctgcagttcaaggccctttcatttaaccttccaaaaacagcaaactcattttaaagactcattgctgaggtgatagagagaaaccttatcctctccaacctttacattcacaaaaaccatccttgtgtacttgactgccctagacagtggtgactcttaggtttcattacgaatgtggaatatcagagtgtgggaaggcccaggcgagggccaatgttgtgtttcttaccccctctggaatgccaaaggcaaggtactaggtgacctcctggtccccaagaaaatgtgatttattctgagggcgaacagccaagggaggactagtctggagcacgctcggccgtcctggcaggagctgagcctcaggtgtctggcggtgccccagcagccctggattcacccaacaccagaatcccacttttctaaatccacctgttgttctgagcacctctgaacccgcagcttcggcaaaaggagtctgtaccaagctgcttctggatgaccaacactggagactctggccttaccatgtggaaatcattttcctgaagtctggaactaattttgagaagtttttttctcaacacttttgtgtttctaacactgtatcttgactgtgtaaataccaacaaggctgtaaataaatgcagatgtagataccttct

SEQ ID NO: 460784 - DNA, 1733 bp, Homo sapiens
  misc_feature (20)..(20): n is a, c, g, or t
cggcacgagggttaccattntgatgttggagcggcctccctcacctgcccaggtgtatgatcctacagttcctgccttctctcctaccccgcacagctgccaactggtcctacatcctcagcccctctgccaccaccttaaataggactttactgattccccaactttgtttttttgtaggatgagatttcctttttatcccacccccccacaccccaaacagacattgctggagggcagactggaggaaggggaaggcatgcaggtaaattactgccttgtcagcctctgaccctcatctctcagaattgttggctgagaattaacccaaggaccacaccagtgcctgatttctacttagggagagaggattggaaacgatccctaagaaactgactgagggtgagaatggccaggaggtgtgtgtccaaataaccaggagggggcacagaagatgatggcaaggcagactgggcagtgttttgtagacacagaacaaagaatcagaatttgaaaaaagaagaaaaacaaatcttcgcagctgcaactttaaagtatcacctttatagatggcagggatttccattatgcaaatggaatctaagatttcaatgtgaaatcttagaatgcagttttaccacttgcagtcttgtatttgtggtggccatgtggtgagggcggtgatgctgagctttctgcccaggaggaatgagctttcaagctctcagcagggtgtcaggcttggggatttgagcatccactgctcaaagtccaggctattctccagtcctcacggcagccactaagcccaggagccagacctggcccggggacacatctcctgagggatcccagaaagaacccagtctttcctttcccttggggtccttgttagaatgaaaacctctctatttaaggcacatcattcccagctaggtttatacacttgtctatattttactggaggaaagggaattaaaaaagaactctgcagttcaaggccctttcatttaaccttccaaaaacagcaaactcattttaaagactcattgctgaggtgatagagagaaaccttatcctctccaacctttacattcacaaaaaccatccttgtgtacttgactgccctagacagtggtgactcttaggtttcattacgaatgtggaatatcagagtgtgggaaggcccaggcgagggccaatgttgtgtttcttaccccctctggaatgccaaaggcaaggtactaggtgacctcctggtccccaagaaaatgtgatttattctgagggcgaacagccaagggaggactagtctggagcacgctcggccgtcctggcaggagctgagcctcaggtgtctggcggtgccccagcagccctggattcacccaacaccagaatcccacttttctaaatccacctgttgttctgagcacctctgaacccgcagcttcggcaaaaggagtctgtaccaagctgcttctggatgaccaacactggagactctggccttaccatgtggaaatcattttcctgaagtctggaactaattttgagaagtttttttctcaacacttttgtgtttctaacactgtatcttgactgtgtaaataccaacaaggctgtaaataaatgcagatgtagataccttctagaaaaaaaaaagcataaaaacaaaaccagaagtgatcccgtgtagccttcgttgacaaataaagactattttgtgttta

SEQ ID NO: 460785 - DNA, 8076 bp, Homo sapiens
cctccctccaccttcgttccttctgagcagtctgtgcttgtcctctcctgcagaccaagtccggaacagctactacatcggggccgatggctccttgcggctgctgctggccaacggcatggaggtggcgctgcagactgagccccacttgctggctggcaccgtcaaccccaccgtgggcaagaggaatgtcacgctgcccatcgacaacggcctcaacctggtggagtggcgccagcgcaaagagcaggctcggggccaggtcactgtctttgggcgccggctgcgggttcacaaccgaaatctcctatctctggactttgatcgcgtaacacgcacagagaagatctatgatgaccaccgcaagttcacccttcggattctgtacgaccaggcggggcggcccagcctctggtcacccagcagcaggctgaatggtgtcaacgtgacatactcccctgggggttacattgctggcatccagaggggcatcatgtctgaaagaatggaatacgaccaggcgggccgcatcacatccaggatcttcgctgatgggaagacatggagctacacatacttagagaaggcaggtgtctgtctccctgcatcactggccttgccatacagaaggccaatcattcacggccaagcccagcctggtggcctcagtgggctgtatctgacccatgtcaccaaaaggaaatgttcaggaaagtctgccacagagggcatggggtcccaagaggcatcaggatggatcagggagatagcatggcaggtggtgtccatggtgctgctactacacagccagaggcagtatatctttgagttcgacaagaatgaccgcctctcttctgtgacgatgcccaacgtggcgcggcagacactagagaccatccgctcagtgggctactacagaaacatctatcagccccctgagggcaatgcctcagtcatacaggacttcactgaggatgggcacctccttcacaccttctacctgggcactggccgcagggtgatatacaagtatggcaaactgtcaaagctggcagagacgctctatgacaccaccaaggtcagtttcacctatgacgagacggcaggcatgctgaagaccatcaacctacagaatgagggcttcacctgcaccatccgctaccgtcagattgggcccctgattgaccgacagatcttccgcttcactgaggaaggcatggtcaacgcccgttttgactacaactatgacaacagcttccgggtgaccagcatgcaggctgtgatcaacgagaccccactgcccattgatctctatcgctatgatgatgtgtcaggcaagacagagcagtttgggaagtttggtgtcatttactatgacattaaccagatcatcaccacagctgtcatgacccacaccaagcattttgatgcatatggcaggatgaaggaagtgcagtatgagatcttccgctcgctcatgtactggatgaccgtccagtatgataacatggggcgagtagtgaagaaggagctgaaggtaggaccctacgccaataccactcgctactcctatgagtatgatgctgacggccagctgcagacagtctccatcaatgacaagccactctggcgctacagctacgacctcaatgggaacctgcacttactgagccctgggaacagtgcacggctcacaccactacggtatgacatccgcgaccgcatcactcggctgggtgacgtgcaatacaagatggatgaggatggcttcctgaggcagcggggcggtgatatctttgagtacaactcagctggcctgctcatcaaggcctacaaccgggctggcagctggagtgtcaggtaccgctacgatggcctggggcggcgcgtgtccagcaagagcagccacagccaccacctgcagttcttctatgcagacctgaccaaccccaccaaggtcacccacctgtacaaccactccagctctgagatcacctccctctactacgacttgcaaggacacctctttgccatggagctgagcagtggtgatgagttttacatagcttgtgacaacatcgggacccctcttgctgtctttagtggaacaggtttgatgatcaagcaaatcctgtacacagcctatggggagatctacatggataccaaccccaactttcagatcatcataggctaccatggtggcctctatgatccactcaccaagcttgtccacatgggccggcgagattatgatgtgctggccggacgctggactagcccagaccacgagctgtggaagcaccttagtagcagcaacgtcatgccttttaatctctatatgttcaaaaacaacaaccccatcagcaactcccaggacatcaagtgcttcatgacagatgttaacagctggctgctcacctttggattccagctacacaacgtgatccctggttatcccaaaccagacatggatgccatggaaccctcctacgagctcatccacacacagatgaaaacgcaggagtgggacaacagcaagtctatcctcggggtacagtgtgaagtacagaagcagctcaaggcctttgtcaccttagaacggtttgaccagctctatggctccacaatcaccagctgccagcaggctccaaagaccaagaagtttgcatccagcggctcagtctttggcaagggggtcaagtttgccttgaaggatggccgagtgaccacagacatcatcagtgtggccaatgaggatgggcgaagggttgctgccatcttgaaccatgcccactacctagagaacctgcacttcaccattgatggggtggatacccattactttgtgaaaccaggaccttcagaaggtgacctggccatcctgggcctcagtggggggcggcgaaccctggagaatggggtcaacgtcactgtgtcccagatcaacacagtacttaatggcaggactagacgctacacagacatccagctccagtacggggcactgtgcttgaacacacgctacgggacaacgttggatgaggagaaggcacgggtcctggagctggcccggcagagagccgtgcgccaagcgtgggcccgcgagcagcagagactgcgggaaggggaggaaggcctgcgggcctggacagagggggagaagcagcaggtgctgagcacagggcgggtgcaaggctacgacggctttttcgtgatctctgtcgagcagtacccagaactgtcagacagcgccaacaacatccacttcatgagacagagcgagatgggccggaggtgacagagaggaccaaggacttcttgccaaagacagctactcttttgtggccgcatacctgactgtgttgtacttttaaaaaaatgattttttaacaagtgcagaaacaaaaagatactggttgcattgtaactcatgcaacatccttttttttagaaaagaaaaacacagatttggccttcgcacattttttgcaaagaacagaaggtatttttttctgtagtgtgatcacaatgaaaactttattgtcttttgttccctttttccttgaggatttttcccttgtcgtttggggtatgtatctcctctctgagatgcatctcctggggtgtgtcctcgtctgtccctaggtacccagtgtgatgtgggacatgaatgtctgtgctaacttgtctcatgtgcaaccctttcttcttcgactggggtcgggcaggagtaaagggagtgatgggccagtacaacaccccttccaagggggcctgggaggagggtctgtaggacctgaggctccttggcagggctcctgcagaagagtggtggatttcttctcaccttgttctctgcctccagaggatcatagatggcttcatcttgctccagggaatttcatggtgttgttcagcaccttttttaagctgccccaaactcctgttcaagctttctattttgatgctgaatgaaaccccctaccacttttgcaaatcctgtgtagttgtcggtgccacccccatgctgggatagagaaagtgtctcccaggtcctttcccccagaccagtgacataacatcctgggctcagagtcccatcctcccgggagggaaagcacccaggatgcctgtgattggttggtcctccatgatgttcctgttcatctcctcctttctcccaaagccagatgtgagaacgagcactgcacagcaagccttcaatgtgggcaccatgtccacagaacagaaggccacccatggcaaaggcatggcagtggtggcgagggcaccagcctgccttccgaggcaaagccctctctctatgactttgagtatcttccctccaccactcagccgccaccactgagacgtaggaatgtggagggaggtgcttggtggcctttgattctggaaaaatgcttaacaaaaaaagccagccaaagagaggaaggcataagctaagcatccttctaaccagttcccaaagtcccatctgcctccatgtaccagctgatcgcagagctggactggggcaggctgggcttccaggaaattcctgaagttctgaaacagcttcccctctagagaagcccacccaatgtgttttttagtgacaggaagaaaggagggaagagctgatgtggtgtggcctgcccatatcatacaaccccaccaggagcagggcagttcccaaggtgggtgcccgtagatctgggaggccaggctggcatgattcctgtgaagaactgtgcctgtgtcgtcagggagaggcctgagccctctcagaagcagggacagcccacacctgaagagcacgcccaagctgaggcagcagccagcaggctgggggagcagtgagggcagggggagtcacagccagagctgggagccccttgttcaaggattccattcctggttcatccgcctaattaccattgtcattaccactcacaggaggctctgggagatgggaggggaagccaaatgcttccttttaagctgggcttcttagaaaatggaacttttatgggttacatttacattaagtgtggaaaatgaattctgagtctgagctattccccgtggaaaccttgttggactgataagctcatggcacctctatagccttactcacatagtcttcagaatattacacaagttaatgaaactgagaaggtctgactgcatgaggatcggagcagcatgtagtctgggttctgcctggcagagggaggcaaccaaaacttcttggggagaggagatttcgccttaacgtcatcccactgggattagaggatgtgtttcgctaagtgctcttcctgtttccaaaaaaaaagccaccctgctgcagcagtgcgctttggcctgcttgtccactggttgcccattgcccctggatccagagctctactgagtcagatacagtgctctgcaggcctgctgtgggaggcatgagctggagatgggggctcccatctggcaggatcattcttggatgagatggaaaacagtttggcctgaagaacacaagttttgtcctccagaagggacttacgcctctcaaaatgtactcttcataccaagggcccttgggcaaagtgctcctgcccagttgatcagtcccatcctggctgcctgacatcagtgaagacctgctggggatgtctgctcagaggtcaggaacggcatgcggtccacaggaaccagctccctacgcttcccccacgccctgtccctcctccacagccccctccccaaaggaatagggtggacttttagggatcaaaaacagaattattgggtgtttcatttctttttttctttctttcttttttttttcatagagatggggtctcactatgttgcccaggctgttctcaaactcctggcctcaggcgatccaccttggcctcctgaagtgctggggttacaggtgtgagccactgcgcctggactgagtgtttgtttctttaaaggatcttatatttttcctgtgctacataccaccacagcagcccagcttctgtggggagagaagttgaaggatcccgaagctttagaaaaaggatctcagctgtggcacaggcagtgttatgcgcctcactgccacattggtgctgttgtattgaaggtggtgcttctggccttggcccttttgagttggtttccatttgggctgcaggtgactcagtgactccctcctcaagctgtcctcctgctaagaccagcagtcacaaacccatggcaagggtgagtgtgaaggcctaaccctgtgcctatgtaataggctccaagcatcgactcccatcctgagaggaccggcccttttgacactcaccaaccaaatctgttcattcgatagagtgaccaggcctccctcacctgcccaggtgtatgatcctacagttcctgccttctctcctaccccgcacagctgccaactggtcctacatcctcagcccctctgccaccaccttaaataggactttactgattccccaactttgtttttttgtaggatgagatttcctttttatcccacccccccacaccccaaacagacattgctggagggcagactggaggaaggggaaggcatgcaggtaaattactgccttgtcagcctctgaccctcatctctcagaattgttggctgagaattaacccaaggaccacaccagtgcctgatttctacttagggagagaggattggaaacgatccctaagaaactgactgagggtgagaatggccaggaggtgtgtgtccaaataaccaggagggggcacagaagatgatggcaaggcagactgggcagtgttttgtagacacagaacaaagaatcagaatttgaaaaaagaagaaaaacaaatcttcgcagctgcaactttaaagtatcacctttatagatggcagggatttccattatgcaaatggaatctaagatttcaatgtgaaatcttagaatgcagttttaccacttgcagtcttgtatttgtggtggccatgtggtgagggcggtgatgctgagctttctgcccaggaggaatgagctttcaagctctcagcagggtgtcaggcttggggatttgagcatccactgctcaaagtccaggctattctccagtcctcacggcagccactaagcccaggagccagacctggcccggggacacatctcctgagggatcccagaaagaacccagtctttcctttcccttggggtccttgttagaatgaaaacctctctatttaaggcacatcattcccagctaggtttatacacttgtctatattttactggaggaaagggaattaaaaaagaactctgcagttcaaggccctttcatttaaccttccaaaaacagcaaactcattttaaagactcattgctgaggtgatagagagaaaccttatcctctccaacctttacattcacaaaaaccatccttgtgtacttgactgccctagacagtggtgactcttaggtttcattacgaatgtggaatatcagagtgtgggaaggcccaggcgagggccaatgttgtgtttcttaccccctctggaatgccaaaggcaaggtactaggtgacctcctggtccccaagaaaatgtgatttattctgagggcgaacagccaagggaggactagtctggagcacgctcggccgtcctggcaggagctgagcctcaggtgtctggcggtgccccagcagccctggattcacccaacaccagaatcccacttttctaaatccacctgttgttctgagcacctctgaacccgcagcttcggcaaaaggagtctgtaccaagctgcttctggatgaccaacactggagactctggccttaccatgtggaaatcattttcctgaagtctggaactaattttgagaagtttttttctcaacacttttgtgtttctaacactgtatcttgactgtgtaaataccaacaaggctgtaaataaatgcagatgtagataccttctagaaaaaaaaaagcataaaaacaaaaccagaagtgatcccgtgtagccttcgttgacaaataaagactattttgtgttta

SEQ ID NO: 460786 - DNA, 8230 bp, Homo sapiens
  misc_feature (8093)..(8093): n is a, c, g, or t
cctccctccaccttcgttccttctgagcagtctgtgcttgtcctctcctgcagaccaagtccggaacagctactacatcggggccgatggctccttgcggctgctgctggccaacggcatggaggtggcgctgcagactgagccccacttgctggctggcaccgtcaaccccaccgtgggcaagaggaatgtcacgctgcccatcgacaacggcctcaacctggtggagtggcgccagcgcaaagagcaggctcggggccaggtcactgtctttgggcgccggctgcgggttcacaaccgaaatctcctatctctggactttgatcgcgtaacacgcacagagaagatctatgatgaccaccgcaagttcacccttcggattctgtacgaccaggcggggcggcccagcctctggtcacccagcagcaggctgaatggtgtcaacgtgacatactcccctgggggttacattgctggcatccagaggggcatcatgtctgaaagaatggaatacgaccaggcgggccgcatcacatccaggatcttcgctgatgggaagacatggagctacacatacttagagaaggcaggtgtctgtctccctgcatcactggccttgccatacagaaggccaatcattcacggccaagcccagcctggtggcctcagtgggctgtatctgacccatgtcaccaaaaggaaatgttcaggaaagtctgccacagagggcatggggtcccaagaggcatcaggatggatcagggagatagcatggcaggtggtgtccatggtgctgctactacacagccagaggcagtatatctttgagttcgacaagaatgaccgcctctcttctgtgacgatgcccaacgtggcgcggcagacactagagaccatccgctcagtgggctactacagaaacatctatcagccccctgagggcaatgcctcagtcatacaggacttcactgaggatgggcacctccttcacaccttctacctgggcactggccgcagggtgatatacaagtatggcaaactgtcaaagctggcagagacgctctatgacaccaccaaggtcagtttcacctatgacgagacggcaggcatgctgaagaccatcaacctacagaatgagggcttcacctgcaccatccgctaccgtcagattgggcccctgattgaccgacagatcttccgcttcactgaggaaggcatggtcaacgcccgttttgactacaactatgacaacagcttccgggtgaccagcatgcaggctgtgatcaacgagaccccactgcccattgatctctatcgctatgatgatgtgtcaggcaagacagagcagtttgggaagtttggtgtcatttactatgacattaaccagatcatcaccacagctgtcatgacccacaccaagcattttgatgcatatggcaggatgaaggaagtgcagtatgagatcttccgctcgctcatgtactggatgaccgtccagtatgataacatggggcgagtagtgaagaaggagctgaaggtaggaccctacgccaataccactcgctactcctatgagtatgatgctgacggccagctgcagacagtctccatcaatgacaagccactctggcgctacagctacgacctcaatgggaacctgcacttactgagccctgggaacagtgcacggctcacaccactacggtatgacatccgcgaccgcatcactcggctgggtgacgtgcaatacaagatggatgaggatggcttcctgaggcagcggggcggtgatatctttgagtacaactcagctggcctgctcatcaaggcctacaaccgggctggcagctggagtgtcaggtaccgctacgatggcctggggcggcgcgtgtccagcaagagcagccacagccaccacctgcagttcttctatgcagacctgaccaaccccaccaaggtcacccacctgtacaaccactccagctctgagatcacctccctctactacgacttgcaaggacacctctttgccatggagctgagcagtggtgatgagttttacatagcttgtgacaacatcgggacccctcttgctgtctttagtggaacaggtttgatgatcaagcaaatcctgtacacagcctatggggagatctacatggataccaaccccaactttcagatcatcataggctaccatggtggcctctatgatccactcaccaagcttgtccacatgggccggcgagattatgatgtgctggccggacgctggactagcccagaccacgagctgtggaagcaccttagtagcagcaacgtcatgccttttaatctctatatgttcaaaaacaacaaccccatcagcaactcccaggacatcaagtgcttcatgacagatgttaacagctggctgctcacctttggattccagctacacaacgtgatccctggttatcccaaaccagacatggatgccatggaaccctcctacgagctcatccacacacagatgaaaacgcaggagtgggacaacagcaagtctatcctcggggtacagtgtgaagtacagaagcagctcaaggcctttgtcaccttagaacggtttgaccagctctatggctccacaatcaccagctgccagcaggctccaaagaccaagaagtttgcatccagcggctcagtctttggcaagggggtcaagtttgccttgaaggatggccgagtgaccacagacatcatcagtgtggccaatgaggatgggcgaagggttgctgccatcttgaaccatgcccactacctagagaacctgcacttcaccattgatggggtggatacccattactttgtgaaaccaggaccttcagaaggtgacctggccatcctgggcctcagtggggggcggcgaaccctggagaatggggtcaacgtcactgtgtcccagatcaacacagtacttaatggcaggactagacgctacacagacatccagctccagtacggggcactgtgcttgaacacacgctacgggacaacgttggatgaggagaaggcacgggtcctggagctggcccggcagagagccgtgcgccaagcgtgggcccgcgagcagcagagactgcgggaaggggaggaaggcctgcgggcctggacagagggggagaagcagcaggtgctgagcacagggcgggtgcaaggctacgacggctttttcgtgatctctgtcgagcagtacccagaactgtcagacagcgccaacaacatccacttcatgagacagagcgagatgggccggaggtgacagagaggaccaaggacttcttgccaaagacagctactcttttgtggccgcatacctgactgtgttgtacttttaaaaaaatgattttttaacaagtgcagaaacaaaaagatactggttgcattgtaactcatgcaacatccttttttttagaaaagaaaaacacagatttggccttcgcacattttttgcaaagaacagaaggtatttttttctgtagtgtgatcacaatgaaaactttattgtcttttgttccctttttccttgaggatttttcccttgtcgtttggggtatgtatctcctctctgagatgcatctcctggggtgtgtcctcgtctgtccctaggtacccagtgtgatgtgggacatgaatgtctgtgctaacttgtctcatgtgcaaccctttcttcttcgactggggtcgggcaggagtaaagggagtgatgggccagtacaacaccccttccaagggggcctgggaggagggtctgtaggacctgaggctccttggcagggctcctgcagaagagtggtggatttcttctcaccttgttctctgcctccagaggatcatagatggcttcatcttgctccagggaatttcatggtgttgttcagcaccttttttaagctgccccaaactcctgttcaagctttctattttgatgctgaatgaaaccccctaccacttttgcaaatcctgtgtagttgtcggtgccacccccatgctgggatagagaaagtgtctcccaggtcctttcccccagaccagtgacataacatcctgggctcagagtcccatcctcccgggagggaaagcacccaggatgcctgtgattggttggtcctccatgatgttcctgttcatctcctcctttctcccaaagccagatgtgagaacgagcactgcacagcaagccttcaatgtgggcaccatgtccacagaacagaaggccacccatggcaaaggcatggcagtggtggcgagggcaccagcctgccttccgaggcaaagccctctctctatgactttgagtatcttccctccaccactcagccgccaccactgagacgtaggaatgtggagggaggtgcttggtggcctttgattctggaaaaatgcttaacaaaaaaagccagccaaagagaggaaggcataagctaagcatccttctaaccagttcccaaagtcccatctgcctccatgtaccagctgatcgcagagctggactggggcaggctgggcttccaggaaattcctgaagttctgaaacagcttcccctctagagaagcccacccaatgtgttttttagtgacaggaagaaaggagggaagagctgatgtggtgtggcctgcccatatcatacaaccccaccaggagcagggcagttcccaaggtgggtgcccgtagatctgggaggccaggctggcatgattcctgtgaagaactgtgcctgtgtcgtcagggagaggcctgagccctctcagaagcagggacagcccacacctgaagagcacgcccaagctgaggcagcagccagcaggctgggggagcagtgagggcagggggagtcacagccagagctgggagccccttgttcaaggattccattcctggttcatccgcctaattaccattgtcattaccactcacaggaggctctgggagatgggaggggaagccaaatgcttccttttaagctgggcttcttagaaaatggaacttttatgggttacatttacattaagtgtggaaaatgaattctgagtctgagctattccccgtggaaaccttgttggactgataagctcatggcacctctatagccttactcacatagtcttcagaatattacacaagttaatgaaactgagaaggtctgactgcatgaggatcggagcagcatgtagtctgggttctgcctggcagagggaggcaaccaaaacttcttggggagaggagatttcgccttaacgtcatcccactgggattagaggatgtgtttcgctaagtgctcttcctgtttccaaaaaaaaagccaccctgctgcagcagtgcgctttggcctgcttgtccactggttgcccattgcccctggatccagagctctactgagtcagatacagtgctctgcaggcctgctgtgggaggcatgagctggagatgggggctcccatctggcaggatcattcttggatgagatggaaaacagtttggcctgaagaacacaagttttgtcctccagaagggacttacgcctctcaaaatgtactcttcataccaagggcccttgggcaaagtgctcctgcccagttgatcagtcccatcctggctgcctgacatcagtgaagacctgctggggatgtctgctcagaggtcaggaacggcatgcggtccacaggaaccagctccctacgcttcccccacgccctgtccctcctccacagccccctccccaaaggaatagggtggacttttagggatcaaaaacagaattattgggtgtttcatttctttttttctttctttcttttttttttcatagagatggggtctcactatgttgcccaggctgttctcaaactcctggcctcaggcgatccaccttggcctcctgaagtgctggggttacaggtgtgagccactgcgcctggactgagtgtttgtttctttaaaggatcttatatttttcctgtgctacataccaccacagcagcccagcttctgtggggagagaagttgaaggatcccgaagctttagaaaaaggatctcagctgtggcacaggcagtgttatgcgcctcactgccacattggtgctgttgtattgaaggtggtgcttctggccttggcccttttgagttggtttccatttgggctgcaggtgactcagtgactccctcctcaagctgtcctcctgctaagaccagcagtcacaaacccatggcaagggtgagtgtgaaggcctaaccctgtgcctatgtaataggctccaagcatcgactcccatcctgagaggaccggcccttttgacactcaccaaccaaatctgttcattcgatagagtgaccaggcctccctcacctgcccaggtgtatgatcctacagttcctgccttctctcctaccccgcacagctgccaactggtcctacatcctcagcccctctgccaccaccttaaataggactttactgattccccaactttgtttttttgtaggatgagatttcctttttatcccacccccccacaccccaaacagacattgctggagggcagactggaggaaggggaaggcatgcaggtaaattactgccttgtcagcctctgaccctcatctctcagaattgttggctgagaattaacccaaggaccacaccagtgcctgatttctacttagggagagaggattggaaacgatccctaagaaactgactgagggtgagaatggccaggaggtgtgtgtccaaataaccaggagggggcacagaagatgatggcaaggcagactgggcagtgttttgtagacacagaacaaagaatcagaatttgaaaaaagaagaaaaacaaatcttcgcagctgcaactttaaagtatcacctttatagatggcagggatttccattatgcaaatggaatctaagatttcaatgtgaaatcttagaatgcagttttaccacttgcagtcttgtatttgtggtggccatgtggtgagggcggtgatgctgagctttctgcccaggaggaatgagctttcaagctctcagcagggtgtcaggcttggggatttgagcatccactgctcaaagtccaggctattctccagtcctcacggcagccactaagcccaggagccagacctggcccggggacacatctcctgagggatcccagaaagaacccagtctttcctttcccttggggtccttgttagaatgaaaacctctctatttaaggcacatcattcccagctaggtttatacacttgtctatattttactggaggaaagggaattaaaaaagaactctgcagttcaaggccctttcatttaaccttccaaaaacagcaaactcattttaaagactcattgctgaggtgatagagagaaaccttatcctctccaacctttacattcacaaaaaccatccttgtgtacttgactgccctagacagtggtgactcttaggtttcattacgaatgtggaatatcagagtgtgggaaggcccaggcgagggccaatgttgtgtttcttaccccctctggaatgccaaaggcaaggtactaggtgacctcctggtccccaagaaaatgtgatttattctgagggcgaacagccaagggaggactagtctggagcacgctcggccgtcctggcaggagctgagcctcaggtgtctggcggtgccccagcagccctggattcacccaacaccagaatcccacttttctaaatccacctgttgttctgagcacctctgaacccgcagcttcggcaaaaggagtctgtaccaagctgcttctggatgaccaacactggagactctggccttaccatgtggaaatcattttcctgaagtctggaactaattttgagaagtttttttctcaacacttttgtgtttctaacactgtatcttgactgtgtaaataccaacaaggctgtaaataaatgcagatgtagataccttctagaaaaaaaaaagcataaaaacaaaaccagaagtgatcccgtgtagccttcgttgacaaataaagactattttgtgtttaaaaaaaataaaataatnttaattattatttaattttatattttttttattttaaaaaaataaaccggcccaagggggggcccgttcccatttgccccttttgggagttgttttacccgccctaattggccgtgtttttaaaacttttgtaatgg

SEQ ID NO: 460787 - DNA, 997 bp, Homo sapiens
tgacacatgcctacaccttgggaaggtatgctgatgaagaaaagaatagggaatccaagtgccatgaaaaactatctgagcccaacaagtggaagagaaacttcccactcttatatatgttcccccaggtttcgcactgtcccctttgtgtctttcccttcagaaggatgtcaggaacagctgtttcagctacgcaaagcaggagatagtactgccttggaaacacgtttcttggccatgaatcagactaccaaggcctcatataagtactggctactggagaaacaagaggaagttgcttgtaaagttcaaaggaccaaagttccaagaaggtgctttactagagaaaaggccccagggtcaagggtcaaaccaatagatgattccatggcagttggcagtcctgacagcaggctggccctgatagataacggaagtgaggaagggtgagagttatctatcttctctgttttatagactacttcagcttctgctgttaccaatgcctcagcaaccactgaaagttcagatatcacccttcttgtaactaatcaaatcaaggaagagatctacaaaatagtggtggtggttccagctagaaattttcactcacaatggtgcatgtttcaaatagaagtatccagggtatgaacatacttttctcctcctgggccgtagtcttaatggtgatgggaatcaccttagataaatgggttgaattgatttcagaagatgaaagagccaagatgaaccacagtccttggatgatgtgttgccctgctctttggccagaagatgacctgaaagtggtcaggattatgatgacgtcgagccttggcctttccttcctccttaacttaatcctgggtatgaaattcacctatctgattcctcaaaataaatatatacaactcttcactaccatcctcagtttcttctcaggtaacttcctggctcccctaacacaagcttgtaggtgtactttgatgggtgggtt

SEQ ID NO: 460788 - DNA, 2518 bp, Homo sapiens
gagtttgacccagcagcaggggtcggtgtgtccctttgaatctgagatctatgaggcaggagctgaggacaggatggcaggagcgcccatggctgctgctgtacagcctgctgaggtgactgttgaagttggtgaggacctccacatgcaccaggttcgtgaccgggagatgcctgaagctttggagtttaacctttctgccaatccagaggcaagcacaatattccagaggaactctcaaacagatgctttggagtttaacccttctgccaatccagaggcaagcacaatattccagaggaactctcaaacagatgttgtagaaataagaagaagcaactgtacaaaccgtgtatctactgagcgtttcagtcaacaatacagctcgtgttcgacaatattccttgatgacagcacagccatccagcattatcttacaatgacaataatatcagatgcagatagatctttgagcatacctgatgaacagttacactcatttgcggtttccaccgtgcacattatgaagaaaagaaatggaggtgggagtttaaataactattcctcctccattccaccgactcccagcaccagccaggaggaccctcagttcagtgttcctcccactgccaacacacccacccccatttgcaagcggtccatgcgctggtccaacctgtttacatctgagaaagggagtgacccagacaaagagaggaaagccccggagaatcatgctgacaccatcgggagcggcagagccatccccattaaacagggcatgctcttaaagcgaagtgggaaatggctgaagacatggaaaaagaaatacgtcaccctgtgttccaatggcgtgctcacctattattcaagcttaggtgattatatgaagaatattcataaaaaagagattgaccttcggacatctaccatcaaagtcccaggaaagtggccatccctagccacatcagcctgtgcacccatctccagctctaaaagcaatggcctatccaaggacatggacaccgggctgggtgactccatatgcttcagccccagtatctccagcaccaccagccccaagctcaacccacccccctctcctcatgccaataaaaagaaacacctaaagaagaaaagcaccaacaactttatgattgtgtctgccactggccaaacgtggcactttgaagccacgacgtatgaggagcgggatgcctgggtccaagccatccagagccagatcctggccagcctgcagtcatgcgagagcagtaaaagcaagtcccagctgaccagccagagtgaggccatggccctgcagtcgatccaaaacatgcgtgggaacgcccactgtgtggactgtgagacccagaatcctaagtgggccagtttgaacttgggagtcctcatgtgtattgaatgctcaggtatccaccgcagtcttggcacccgcctttcccgtgtgcgatctctggagctggatgactggccagttgagctcaggaaggttatgtcatctattggcaatgagctagccaacagcatctgggaagggagcagccaggggcagacaaaaccctcaataaagtccacgagggaagagaaggaacgctggatccattccaaatatgaggagaagctctttctggccccactaccctgcactgagctgtctctgggccagcagctgctgcgggccaccgctgatgaggacctgcagacagccatcctgctgctggcacatggctcccgtgaggaggtgaacgagacctgtggggagggagacggctgcacggcactccatctggcctgccgcaaggggaatgtggtcctggagcagctcctgatctggtacggggtggacgtcatggcccgagatgcccacgggaacacagcgctgacctacgcccggcaggcctccagccaggagtgcatcaacgtgcttctgcagtacggctgccccgacgagtgccttttgctacccaagaccaagaggctctggcaagacggtggttttccgaatgccagactgaggtgccttatgaaggcagctgccgatggttccagatgtagagagataggtgatgcaggagggaaagctggattggaaaagggagaggacaagcccccagaagagtggctactagagtgggaggaggaaaagcagaaggagaaagagttgaagataggcgaggctgtggtcccagtgctgaattctgccaagcaccttaaaaaggaaggaaattctaacacatgctacaacatggatgaacatcgaggacattacgctaagtgaaataagccagttagaaaaagacaaatacggtgttccttcacttatgtgaagcgtccagactgagtaagcaaactaatagaaacagaaggtagaacgggggttgccagggacatggggaagggagaaaatgggaagttgcttagtggatatagagttttggttttgtcagatgaaaaagttccggagattggttgcatggcaatgtgaatataccctaca

SEQ ID NO: 460789 - DNA, 2453 bp, Homo sapiens
gagtttgacccagcagcaggggtcggtgtgtccctttgaatctgagatctatgaggcaggagctgaggacaggatggcaggagcgcccatggctgctgctgtacagcctgctgaggtgactgttgaagttggtgaggacctccacatgcaccaggttcgtgaccgggagatgcctgaagctttggagtttaacctttctgccaatccagaggcaagcacaatattccagaggaactctcaaacagatgctttggagtttaacccttctgccaatccagaggcaagcacaatattccagaggaactctcaaacagatgttgtagaaataagaagaagcaactgtacaaaccgttgtgaccttggagatacctcatcatatcacacaaagagatgcagatagatctttgagcatacctgatgaacagttacactcatttgcggtttccaccgtgcacattatgaagaaaagaaatggaggtgggagtttaaataactattcctcctccattccaccgactcccagcaccagccaggaggaccctcagttcagtgttcctcccactgccaacacacccacccccatttgcaagcggtccatgcgctggtccaacctgtttacatctgagaaagggagtgacccagacaaagagaggaaagccccggagaatcatgctgacaccatcgggagcggcagagccatccccattaaacagggcatgctcttaaagcgaagtgggaaatggctgaagacatggaaaaagaaatacgtcaccctgtgttccaatggcgtgctcacctattattcaagcttaggtgattatatgaagaatattcataaaaaagagattgaccttcggacatctaccatcaaagtcccaggaaagtggccatccctagccacatcagcctgtgcacccatctccagctctaaaagcaatggcctatccaaggacatggacaccgggctgggtgactccatatgcttcagccccagtatctccagcaccaccagccccaagctcaacccacccccctctcctcatgccaataaaaagaaacacctaaagaagaaaagcaccaacaactttatgattgtgtctgccactggccaaacgtggcactttgaagccacgacgtatgaggagcgggatgcctgggtccaagccatccagagccagatcctggccagcctgcagtcatgcgagagcagtaaaagcaagtcccagctgaccagccagagtgaggccatggccctgcagtcgatccaaaacatgcgtgggaacgcccactgtgtggactgtgagacccagaatcctaagtgggccagtttgaacttgggagtcctcatgtgtattgaatgctcaggtatccaccgcagtcttggcacccgcctttcccgtgtgcgatctctggagctggatgactggccagttgagctcaggaaggttatgtcatctattggcaatgagctagccaacagcatctgggaagggagcagccaggggcagacaaaaccctcaataaagtccacgagggaagagaaggaacgctggatccattccaaatatgaggagaagctctttctggccccactaccctgcactgagctgtctctgggccagcagctgctgcgggccaccgctgatgaggacctgcagacagccatcctgctgctggcacatggctcccgtgaggaggtgaacgagacctgtggggagggagacggctgcacggcactccatctggcctgccgcaaggggaatgtggtcctggagcagctcctgatctggtacggggtggacgtcatggcccgagatgcccacgggaacacagcgctgacctacgcccggcaggcctccagccaggagtgcatcaacgtgcttctgcagtacggctgccccgacgagtgccttttgctacccaagaccaagaggctctggcaagacggtggttttccgaatgccagactgaggtgccttatgaaggcagctgccgatggttccagatgtagagagataggtgatgcaggagggaaagctggattggaaaagggagaggacaagcccccagaagagtggctactagagtgggaggaggaaaagcagaaggagaaagagttgaagataggcgaggctgtggtcccagtgctgaattctgccaagcaccttaaaaaggaaggaaattctaacacatgctacaacatggatgaacatcgaggacattacgctaagtgaaataagccagttagaaaaagacaaatacggtgttccttcacttatgtgaagcgtccagactgagtaagcaaactaatagaaacagaaggtagaacgggggttgccagggacatggggaagggagaaaatgggaagttgcttagtggatatagagttttggttttgtcagatgaaaaagttccggagattggttgcatggcaatgtgaatataccctaca

SEQ ID NO: 460790 - DNA, 2312 bp, Homo sapiens
ggtgttgccttctgtgcacgggattcctggggatggaaggctgagagagaaaacccacctgcaggtgaacatggaatatggatgcagacatttattcagccaaatatgctatgtcattgctcagaggctgatggtcttcaaggccatagagcttcttaatggcaaagctgagattccagaccagccccattcaacatggtgctacgatgacgtctcccttcctctctgttttgggaacgcattcatggaggggttactggaagtcaaaaggttcactgtcctgggtctccatcattcagtagataagccagaagtcccacagagctggaagtccccagataggcactactgcataaagtacagagcccaggactcagacacatgctcagtgaccctagttagtgctggctcatcagccactcaggtccatgcatcagggacaccaaatatctaaaatctcaggccacagctgcccaaagtgtgttggtgggagaggacaaactaaatccctgttttcatttcttcccccaaatggagctcacgtaaagcctttaaaccattggcttttatctgtttttagtgtccaatttagggctttgcaggggctccctccagggctttctcaatggatttatatcacagccagatagcatcttcgaaagctcatctgagctggaaaatagagaaacatccttctctattgtcaagtgacaagtgatggcacccaggcaactggcttgagtgcacagggaacccactctggatgccatggctggggtggtccctgtcttgagagggggctagccagagaggggaagaagggagaggccacagcagggttctgaattgtcttcctacttctgagagcagagactccgactctgaaagcttttcaacaaagcactaactgtcctctcggcccgtcacctgtgggcatgaagatgtcatctccctggccaaccaccaggtgccatttgcagacacagatcgaggtcctaatgagtattcataggatttccaggacattcctagtttatacttgttgtcctggcaacattttcattctaaaaatgtcacagtttggatgtcaaataggcatagatcagaactgtttctgaaaacctatgaatactatattcatagggcacgtgtcacccagggctggaattctgttttgtgatgcagagtcagcatgcctggtgcatctttgcgagtatacatggtgaagaagtgttgtgcagagtgtgcgtgttgctccatcgtgtcactagacatattgaaagtgacttggtgattggacatagtggtcatagacacaatagagagcatttctggactgaagtccagaaagggaaaggagaggagtaaagaggaaaagagaacagtggtgggtgcctataaagagccacacaccttgctgcatgctctatatgtgggctattgtttgttctcacaatgaatctgagtagtagatatagcatgcccattttccaggtaattgctgaaggatttttgcttcaaacaggctcttgtttgcatcaagtgtggggtgcagcaaagtggactcgggactggccgatgtctggccagaaatgccaggcaagggaaacagtgactctagtggggtcaggagaggggcatctgctggcccaggagcgcaaggcagagggacttcattgtcccccttataggtgaggcgactctgaggcaggaggtccaagtttgctggacaatggcagaaacagaattcaaacacctgtcttctaggagaagttctggtctctcctcggtgctgcggctgccccgggaagagtttccaggagctgacaagcattcagatgagtaaagatgggatcggattgagaaaaggagaagggagagcatattcgttctctttccacctccctcccacagcctttcatgctgatctcatctgacgaagctgcctcctcctccctggactctacaagcccctgtcatgatgtttctcagatcctgaattccagcgaaacagatgatactaacaagtttgaagacccccacagaggaatggaatcagtatgagaacacagtttcttcatctccctgtcccagaacttcaccctggactcctcgaccaatcaacaatctccacacttcggcccactccaaaactcctaaaatcccaagctccaaactcctctgggagatggatttgaggcttcctcccgtttccttgtgtggaagccctgtcattaaacctctttctctgctgcaacctgatgtacttggtgtattgacttgccatgcacattgggcaagggatctattac

SEQ ID NO: 460791 - DNA, 890 bp, Homo sapiens
agtcaaaggtgctatgagaaggaaggcactccccaatctagaaatagcacacatactttgcctcaggctctgctttctagggaagtcaggctaaggcagatctagggatccctggttactcctgaattactcccatcatccaaagctgctctcttctgcttatatataatttgagggaagcacaattctaagaagttacgaaccacccctaagttatgacttttctaaacattccaagtattatgatgactttcagactggagatttgtgctatctgcccagtcaaagtcagccagccatgggaagaaaatcatctcttctctcttcctccttcggctcctgttggccggtgccttcctgaacctgaagaatatctttgctctttccaactcccacattcaaaacagagtcttacaactcagccacattttctgctgagccagccagtgggaacaaacaccaagagacctggagccacagaaacactcatacatgagccaagaagaaaaaaattgtgtggcagctgcccagctctgctctgcaaccatgcgcttcctgtttactgactaagacctgatgaacctgtatctactactgcccagggcacattaaagtcaccacaacccctgctagatgactattttgatatggaggggaaagaattgctcccctcagcccatggggataaatttaggaccatcactggccagccttatgtccttgcctgaggagttggaactgggaaccaaaagggaaagttcacctgacttggaaacgtgcacacaagcagtctctcaacactgtgacgtttatagtgaaggaagcatcaccgaagagagttgcgtttcattcggatggcctggccataataaactgtcctgaatggaaca

SEQ ID NO: 460792 - DNA, 485 bp, Homo sapiens
tctgctgttaatggaaaccaaataagcatctgctatctctggagggtcttgaagaaagaagaaattctgtattatccaaacagatggttatgaggatctactttcaaccttccacgttatgtgctgtgaatcaagtcttcaccctaccatttatccattgtctccaagagcttttgatatatcaggaaatagggaagccctacatatggaaaagtgtaaggattgtagtggtgagatgtgtgttccagactctctggattcaaatcccagctctgctactcataacagtacatgctgcccatgcataaacaatcaaagttaaaccgagaaaagatggatacacatggagctgctaccgattgggaaaggatttggttattttattatttcataatgctgagctgtgatggacctgacgacatctgagaaaaaaaaaattgcccaaatgaaaaaataaatagccttagaaaaaatgcataagttgc

SEQ ID NO: 460793 - DNA, 1176 bp, Homo sapiens
tctgctgttaatggaaaccaaataagcatctgctatctctggagggtcttgaagaaagaagaaattctgtattatccaaacagatggttatgaggatctactttcaaccttccacgttatgtgctgtgaatcaagtcttcaccctaccatttatccattgtctccaagagcttttgatatatcaggaaatagggaagccctacatatggaaaagtgtaaggattgtagtggtgagatgtgtgttccagactctctggattcaaatcccagctctgctactcataacagatataggaaatattaatatttataccacccatgggacactggggtatggctgcttctagcaggaggtcatcagccagcctcccaggaggttcagctcccaggctccgtccagctgcccagtggctgaggctcagcatctccactgcctgtaacctactcacggcacactgcacccacggcacacagcacccgggcaccgctcacggcacagagcacctgggcacggtggctgggaggctctgacctctgcagcagacacagagctccacttcttattctctgttaattgatgctgccctgtttcattttaagcattccaaggagcccgtgctcagaacgggcaagtgccatttctgtcttgttgatattagagaaatgggtggtgggtgaacaatgggtcacaatacccataaagaagaatccatgggagctgctgcgactctgcggtcctcctgtcttgagcatgaaacgaccattgatggcccttccctgccaccagcccatggcaggcactgaccacagtgctgggagaacttctctctcttgccgaaatgtgggtgatgagtcagttgaggaagctcagctgggcagcccatccccttcgcacacagtggcagctatgccagccacagagccctggggaggacggcgaacgattactgtgcatgacctgaaagggatcagagaccagtacatgctgcccatgcataaacaatcaaagttaaaccgagaaaagatggatacacatggagctgctaccgattgggaaaggatttggttattttattatttcataatgctgagctgtgatggacctgacgacatctgagaaaaaaaaaattgcccaaatgaaaaaataaatagccttagaaaaaatgcataagttgc

SEQ ID NO: 460794 - DNA, 1978 bp, Homo sapiens
tggcagcagtgggctgttcagagtggccgctgccatcacaccagctgcagtaaggaagcgtgagctgtggcagcaggagtggctgcaggagcagcagtggcggcagtaggtcccctgtgccctgcgtccctgagggagccaaaaaccccaccctcacacggcctggtaggatccgctcccagacctgaagcctctgccacagtcttaacctcgctctccgctgtatcccaggggcctgcgagcacccagctgatggcacagctgggacttatgggactggccctggaagcgtcaggttcatttgtgtggggttgactggggctgccgtaccacctgcaccttgcccgccaccctgggagccactgtgacagggccaagctgaatcgtccgctggtagggaagcagtgtggtcggtcatggagaggcaggcagagaggggcactgaggcagagctgggcccagggcagtgccacactctacagtgtcagcagaagcatggagcaggcaggagtcccacccttctgggcatggctgcagccacccaaattgcagctgcagatgcagacatctctgcactccctgggccccccttactcccacaggctcagaggtgtctgctccagctccctggcctctccctgctgtcagcacccactcagatcatggagcaaagttgaggatgagcctgggaactattgcaacccagccggatgtgtgcacgctcagggcagcactgacacacaagtcccctgccacttcagccgcctccggactttgggtgaagacaaacatgggagggagaccaagggggtgctgaagacagcttggcactgccctgcaggtgcccgttggtacaaacctgggcaccatgaaaggcagcaggaggcagacatgctcctaggcagaaggggtaggtcccaggtgaagcccaatcttcaagccagggaaggcctgaggcctgagggccaggctgtgggtcccgcagactggagtgggaacttttccaggcctgcccatggattaatcagcatgcacttcctcccctctgaggctcataaaaactccggactcagccagacttgaggagacaacaggacaagctgcagagaggagctaccctctctgctgagagctgaacactcatcaagataccctggctacggagaggagctgcccactgtgagtctcctctgagctgttctattactcaataaagttcccctttgtcttgctcaccctccacttgtctgcgtacctcattcttcccggatgcaggacaagaactagggactcactgaatggcaaggctaaaagagctataacacaaacagggctgaaacatgctgtttgcccaccatgtcgcagcagacaagaggagagaagaaggaagagaagagctgtggccctttggggagcccagacctaggagcaaccccaagccagacactttctgcccagcagtggatgcttaattaatacgtggggaatggccagaatgcaaaaggaactcagaaagagtgggacccactcagcctggggaagccaaggagtacttcataaacctgtgctattttagttgggtatgaaagattattaggagtgtgttagtgaaaaaaaagagggaaggacactccagacaagaggaatggcatgaactgaagctcagagttgaaacaggttatggcttgtacagaaatctgggagaagttaggacacctgggacatgggctatgcggcaggagatgcgtctgggagcgaggcagacaggagtctggaattatcctggaagccaacagacatctttctaaaggaaagtgatgagtcagatttgttttttctgaagaaactttttatatgaactcacaaagatatcatgaggctattgaaagtcaaggaaatctcctcatccccccaacagccctgagggagcagaagagagacaagcccataatattcttcgtacttttagaaagaaaga

SEQ ID NO: 460795 - DNA, 660 bp, Homo sapiens
gatcctccaacaaagtttgaggagagagaagtcctcgtttcagatgaaggccgacccaatggaccagccccaggtagggctgaggggtagcaccgggctcctccatagcgcgaaggctgctctggcggtcaccacagtaacactggccacaacaaacggtggagaacacgcagccttgggcagcgctggtcccagcccgacccgcttcagttctggcagttttcacatcacatattttgaagcactttttgatgtgttacaacttgtccacataccttcacaaatcagaaaagaactaaataggattatatcaacatttgcactctatgtacctattctgaagaataacacaggaaagagattacttggaagagacaagatctttctatgttgcccagactggtctgaaactcctggactcaaaacatatgaatatccagccctggaagctaaaaacaagctttgtgcccaaaaaaagtttatatttttgatttttctacaactaaatggaacagggtttaactgagaacagttttcaaacacaagtcttagagaagataaggattacaggcgtgagccaccgtgctctgctggacatcatttagcatatatgacaaggtaactgacgaaggacaattcaaccaaaaaatgattaaaagc

SEQ ID NO: 460796 - DNA, 2077 bp, Homo sapiens
ttaagctggtgtaaatcggccgaggttctgagctcgggtcaccctgccccatctccatctcctatgagatgagtgactcccaagaccccaccacttcccctgtagttaccacccaggtagagctggggggctgcagccggcaaggtgggggcaatgggttcctccgttttcgccagcaccaggaggtccaggccttcctcagccttctggaggacagttttgtccaggaattcctctccaaagacccctgcttccagatttcagataagtatctcctggccatggtgctggtctacttccagcgcgcccacctgaagctcagcgagtatacccacagcagcctgttcttggccctgtaccttgcaaacgacatggaggaggacctggagggccccaaatgtgagatttttccatgggccctgggaaaagattggtgtttacgagtggggaaattcctgcaccagagggataagctttgggcacggatgggtttccgggctgttgtgagccgccagtgctgtgaggaggtcatggcaaaggagccattccactgggcttggactcgggaccggcgcccccaccatggtggggttcagagggtctgtccacaggtccctgttcgccttccccggggccctggcctctcgccgccccactgttccccctgtggtttgccccagcactgcagcagccacttgcttaagcctgtgtcatccaagtgcccttctctgacctctgaatgtcatcgccctccctcccaaaattatctctcaagggtcaaaaacgcctggggtggggactttctcatcgtcttgcctccccagatgcaactggaaccaggcacctactccctccgcaacaatgggaataccagtcggcaggttcagctccatgatagcctcttcagagagaccctccagatgcttggcaatgccccggaggctgttgccatgggctgcaatcagtacacgtttcccctccttgatctggggaactatttcttcattccagaaggtcagagctctggcaatagtgtccttcagactctcacaggagggcctcccaaagtgttaggattataggaatgagcgaccacacccagaacatgattttttatatatgtatatggagaaaaatactcctttaagatgttaattgtaaatgttttcttcagtccatcattttgacataactgtatggatttttaatgtagtaaaaaatgcaattttatgacttttgggttttgtgattacaggcatgagccaccgtgcccagccagcttctggctgtattttcgttttcatttttgtacgtttaaatattgaaggttaacatttaatttttatttttatttatttattttttttgagacgttgtctcactctgtcgccgaggctggaagtgcagcggtgctcactgaggccttgaacccctaggctcaagagagcctcccacctcaggctccgaaaatgctgggattacaggtggtgtgagataccacaccagacctagagtttttattttttaatttttaaaaaaatttttatttatttttttgagacggagtctcactcttttgctcaggctggagtgaagtggtgcaatctcggctcactgcaacctccgccccctgggttcaaacaattctcctgcctcagcctcccgagtagctgggattacaaacgcctgccacccaccatgcccagctttttttttttttttttttgtatttttagtagagacgaggtttcaccatattggccgggctggtcgtgaactcctgacctcaggtgatccatctaccttggcctcccaaagtgctaggattacaggtgttagccaccacacccagcctttttaaatgtttttttcattaggaacaacatattccaaacctataaattgagttcatctgtaattttttctaagatacaaattatgaatccaacttactttttttccagattgctcccttttcttcctaatgtcttttattaactcatcttttctcaacagattagaaatggtacttttatcatctactacattcctgcctgtatttgaatctgtttctaaa

SEQ ID NO: 460797 - DNA, 2100 bp, Homo sapiens
gctatataagcgcactcgcggcggcgttggtgttatgctctgggccattcctgagctcgggtcaccctgccccatctccatctcctatgagatgagtgactcccaagaccccaccacttcccctgtagttaccacccaggtagagctggggggctgcagccggcaaggtgggggcaatgggttcctccgttttcgccagcaccaggaggtccaggccttcctcagccttctggaggacagttttgtccaggaattcctctccaaagacccctgcttccagatttcagataagtatctcctggccatggtgctggtctacttccagcgcgcccacctgaagctcagcgagtatacccacagcagcctgttcttggccctgtaccttgcaaacgacatggaggaggacctggagggccccaaatgtgagatttttccatgggccctgggaaaagattggtgtttacgagtggggaaattcctgcaccagagggataagctttgggcacggatgggtttccgggctgttgtgagccgccagtgctgtgaggaggtcatggcaaaggagccattccactgggcttggactcgggaccggcgcccccaccatggtggggttcagagggtctgtccacaggtccctgttcgccttccccggggccctggcctctcgccgccccactgttccccctgtggtttgccccagcactgcagcagccacttgcttaagcctgtgtcatccaagtgcccttctctgacctctgaatgtcatcgccctccctcccaaaattatctctcaagggtcaaaaacgcctggggtggggactttctcatcgtcttgcctccccagatgcaactggaaccaggcacctactccctccgcaacaatgggaataccagtcggcaggttcagctccatgatagcctcttcagagagaccctccagatgcttggcaatgccccggaggctgttgccatgggctgcaatcagtacacgtttcccctccttgatctggggaactatttcttcattccagaaggtcagagctctggcaatagtgtccttcagactctcacaggagggcctcccaaagtgttaggattataggaatgagcgaccacacccagaacatgattttttatatatgtatatggagaaaaatactcctttaagatgttaattgtaaatgttttcttcagtccatcattttgacataactgtatggatttttaatgtagtaaaaaatgcaattttatgacttttgggttttgtgattacaggcatgagccaccgtgcccagccagcttctggctgtattttcgttttcatttttgtacgtttaaatattgaaggttaacatttaatttttatttttatttatttattttttttgagacgttgtctcactctgtcgccgaggctggaagtgcagcggtgctcactgaggccttgaacccctaggctcaagagagcctcccacctcaggctccgaaaatgctgggattacaggtggtgtgagataccacaccagacctagagtttttattttttaatttttaaaaaaatttttatttatttttttgagacggagtctcactcttttgctcaggctggagtgaagtggtgcaatctcggctcactgcaacctccgccccctgggttcaaacaattctcctgcctcagcctcccgagtagctgggattacaaacgcctgccacccaccatgcccagctttttttttttttttttttgtatttttagtagagacgaggtttcaccatattggccgggctggtcgtgaactcctgacctcaggtgatccatctaccttggcctcccaaagtgctaggattacaggtgttagccaccacacccagcctttttaaatgtttttttcattaggaacaacatattccaaacctataaattgagttcatctgtaattttttctaagatacaaattatgaatccaacttactttttttccagattgctcccttttcttcctaatgtcttttattaactcatcttttctcaacagattagaaatggtacttttatcatctactacattcctgcctgtatttgaatctgtttctaaa

SEQ ID NO: 460798 - DNA, 4485 bp, Homo sapiens
aaaagacaaacagtaacaaatgctggccagcaaggcattggctgctctgctcacggctgagaggcagagctgctgattcgctctggaaaggctgtggctgtccccattggaccctggaggtccttggcagctcccacttctgtatatgtgactctgggctgtgacctctgccattgccccagctaagcagcgagagcttgctgaagcccagagggctgtgggaccatgagggcagctctctggaccctgggactcgggccccttcttctgaatctctgggcagtccccattggtggaccaggtgctctgaggctggcgtacagacacagcacgtgcgacggagtggtgttggtccgacaccacggggcatggggatacgtgtgcaaccaggagtggacgctggcagaggcctctgtcgtgtgcaggcagctgggctgcggccctgccgtgggcgcccccaagtatgtcccgctgcctggagagatggcccagccctggcttcacaacgtgtcctgccggggcaacgagtcctccctctgggagtgcagccttggctcatggtgccagagcccgtgcccccacgcatgggtggtggtcgcgctgtgctccaacggcactttccgggagctccggctggtgaagggccgcagtccctgcgcgggactccccgagatcagaaacgtgaatggggtggaccgcctctgtgtcctgcatgtggaggaggccatggtgttctgccgggagctggggtgcggccctgtgctccaggccccccgccgggacgtgggcgtcgtcaggaagtacctggcctgcaggggtaccgagcccaccatccgcagctgcagactggacaacaacttccgcagcggctgcgacctgcggctggacgcagaggtggtctgctcaggacacaccgaggcccgactggtgggcggcgagcacccctgcgccgggcgcctggaggtgacctggggcaccgtctgtgatgcggccctggacctggccacggcccacgtggtgtgccgggagctgcagtgtggggcggtcgtgtccacgcccgagggcgcccgcttcggccggggctcggggccggtgtggacggaggccttccgctgtgcgggcaacgagtcgctgctgttccactgcccacgggggcgtgggagccagtgtgggcatggtcacgacgcggggctcaggtgctcagagttcaggatggtcaacggcagcagcagctgtgagggccgcgtggagttccaggtgcaggggtcctgggcacccctctgtgccacccactgggacatagcagatgccaccgtcctctgccaccagctcaactgtggcaacgcggtggccgcacctggaggaggccattttggggacggggacgctgccatctggcctgatgcctttcactgtgaggggacagagtcctacttgtggaattgcccagtaagcaccctgggggccccggcctgtgccccgggaaacacagcctccgcggtctgctcaggtctggcccacgccctgcgactgagggaaggacagagccgctgtgacggccgcgtggaggtctccctggatggcgtgtggggccgcgtcctggacgatgcctgggacctgcgcggcgcgggcgtggtgtgccggcaactcgggtgcagaggggcccagcaagcctatgacgcacctgcccccagccgcggatccgtccaggtggcgctgagccgcgtgcgctgtctgggcaccgaaacccgcctgactcagtgcaacgtgtccgcgaccctgcaggagcccgcggggacctcgcgggacgccggcgtggtgtgctccggtgaggtcggaaccgcgtcccccatggcccgtcgccacgggatcccgggcgccctgactctgtctctccacagggagcctcagggtgcggctggccgcggggccggggcgctgcacgggggcgcgtggggcaccgtgtgtgacgatgcctgggacctgcgggacgcgcacgtggtctgcaggcagctgggctgtggccgcgccctgagcgccctgggggccgcacacttcggagccggggcagggcgcatctggctggacgagctgggctgccagggccacgagtctgcgctgtggcagtgcccgtcggcgggctgggggcggcacgactggaggcacaaggaggacgccggcgtcttctgctcagagtcggtggctctgaggctgcgaggtgggacctgctgctgtgctgggtggctggacgtgttctacaatgggacctggggcgccatgtgcagcaatgccctgaaggacctctccttgtccatcatctgcaagcagctggggtgtggggtgtggggagtggggctggctggagaacaggcccttcccctctgcgggcaccgggaccgcctgggtggacaacatcgagtgccgcaggctgcccaactccactctgtggcaatgcccttcccacccatggcacccgcactcttgcgaccttcgagagcaggtctggattacctgtgcagagcctgggcctgggggtcactaggatccacagccttccttgtgaagcttctctgggcaccgaagctctcagagctgctgtttaacccgcaggattgtcagaggacaggccacaggctgctggggagcccctcaactgctcctcctggctcggctgcccaggtacccctctgtccttgtcgctgtcctccttcccatcccggtccagcccccgcagtgaccgcagccccttttgcagaggagggcgcactgcgcgtgcgcgggggcgaggaccgctgctccgggcgcgtggagctctggcacgcgggctcctggggcaccgtgtgcgacgatggctgggacctggcggacgcggaggtcgtgtgccgccagctgggctgtggtcgggccgtcgccgccctgggggccgccgcctttggccctggctccgggcccgtgtggctggacgaggtggggtgccggggcagcgaggcgtccctgtggggctgccctgcggagcggtggggacgcggagaccgcgcgcacgaggaggacgcgggcgtgcgctgctgggagcctggcccaggccccccactgcctgcagctcccttccggacattctgggtggtcagtgtcgtcctgggatcccttcttggtcttctccttctgggcctcatggcttttctgattctgcctcgagtcacacaagccatgcagagggccctcaagactgagctcaaccctagaaggttcccccaggcagcacattggggcccactgggaagcatcatgtggtttgctggcaagggacggtggccagggatgggagggcactgggagtctggctatgttgccgtggtccctccatcccagcccacagcatcctgcctctttgctgcctggctggggttcctgcctggagttgctgtcctcccttgcctgtggccacatccacactgagggcctgtgtgtgaccatgctcaccttgcctcaggtctgggaagatccgaggtatctcctggagaagccatctatgatgtcattggggaaatgccgccagcaggactgtacgaggaaatcatggaggccgaggctgtgctccaagatgaggaggacggaagtgtggtgaaggtggacacagaagccgcagtttcaggggaggtgtctaacctcctggagggacagtctatacgtgcggagggaggacacagcagacctgtttctcagggatatgacgaggctgcgtttcctctggaggagatgacgttgtaaagcaacctgaggatgagatacaccagctggctgtcgaaatcacagctcttcattttcttgtacaattgtagtggatttcgtgagaacaccttggatgcctttctcttgcaatgtcctccatgtccatgtaaaatccagtccttccaggccctgcctggctctaaacctcatccccttcgagggccatctgctgtggacagttgtgctgtgtaaccttcagatttcccacacattacagcaaatgcaaatacacatagaaatcagtggttccatttgtggtttagagacacatggtgccatcttcatcttccgctccacagctcgcttctggcacccagcagtgggttgcagagctccccatgccagaaccttcctcttttttcttaaaaactcttcttaattgaatccaaagtatcttttaaatgttctacttgtgtaatcatgtcatctgtgaatattcagatttatcttctccttccaatccgtgtacatttaatctctttttctgtgccttatttcgggggctgggacccttcagtccagtgttgaagagaggcagccagtggaggtcttgtctcattcaaggactcagagcaaatgtgttccacatttaatttcactatgaaatataatatttgatgttcagttttgtagatgctatttatcagatcaaggaaagcccagtctatacctaatttgttaagggttttgcttttt

SEQ ID NO: 460799 - DNA, 1359 bp, Homo sapiens
aggcgttcctgcgcatgcggcagcccaggagccagagcacaactgcgtttcctgtcagcccgacaagggaaacgatgcacgtcagcaccatcagagactcacagagaataagtcacctatcaaaaggtgggggtcctcaaatccagtttgaaatccagttcttgctgactctgaagcctgacctctctctactgccacacaagttctgtgctaacatgggaataacattaggatcaaaacacccccactcatctagccagggctgtggacccgatgattactctatcctgggcctgaaattttctctcagggggaggaattcaggtatgcaaagaggtggttgtgacaccctcatgaccaggactgatcatccatggacaggaaaggagaccatgcattatgaaccagaggaaaatgtgaccttcgctaggataagtgtgaaaatggctgggcctgtggtgaagacttcccttgtgctaaaggtggagggcctttctgggattcagtgacttcagagaacccttctgtgttgcttaattcaggagatgcatacaggagctggagtcaaagctggtgagcgatccaggcttatgaagatgctggacagacttgttatttcctgtatgaggactatggacaaatcagtggccagaggtattggagacacaaaccctacctgagatgattcttggcctctgtcccatatccaatagagataagcctctcccatcacattccatcttgttcaacttgcttgataaaaacagtggcgcagtttgagagaatggactcccattttaaaagaagttctattgtgtataaaatgctatgcaaatagcattgcatgctacattaaaatctttcataaaaggatgagtcagttgatgtggcagacttcactgttgtcttgttttaagatattggcacagcctgtcttaccttcagcagccacttcagcagccatcaatatcaagcaagaccctccagcagcaaaacgtttggcttgataaagtttctgatgatggttaccatttcttagtgaaaaagtatttttttaagtaatgcatgcacattgctttagacataatgccattgagactcaatagagtacagtatagtgtaagcataaattttacatgtacccgggacaccaaaaattcatgtgattcactttattgtaatatttgctttattgcagtagtggaagtggacttctaatatcttcaatgtatgcctattatgataaaggttgtatatcaaagtagtgtgtaaaacaggcacaattgaatgaatgggattgggacaactgagtttctgtgtgaaataagtaaaggtggaaacatactttacatatgattt

SEQ ID NO: 460800 - DNA, 1215 bp, Homo sapiens
cccctggtctccggacttcacttcccaggaggcctcgcgcgcgactggaagtgctccgagcctataagaaggcgaggcggcaacccgtgctctgctctggggcggcattgcagccggctgtaggcattcaggggcagtgtcttctgcatctcctaggaacctcgggagcggcagctccggcgcctggtagcgagaggcgggttccggagatcccggcctcacttcgtcccactgtggttaggggtgagtcctgcaaatgttaagtgatttgctcaaggtgcccatttcgcaggaattggagcccaggccagttctctgagcctatcattagggctaaaggagtgcgtgatcagaatggtgtctggacggttctacttgtcctgcctgctgctggggtccctgggctctatgtgcatcctcttcactatctactggatgcagtactggcgtggtggctttgcctggaatggcagcatctacatgttcaactggcacccagtgcttatggttgctggcatggtggtattctatggaggtggccccctggccctgccccacagcatcatgatggggaaactccccctgggggtcgtctccccttatgtgaagatgagttcggggggctacacggaccccctgaaattctacgccaccagctactgcaccgcctacggtcgggaggatttcaagccccgtgtgggcagtcacgtaggcaccggctacaaatcaattttccagcccgtggtctcatgccaagccagtctggaggccttagacaacccggccaggggggaacaagcccaggaccatttccagtctgtggccagcaagacgtaccgccccctggaggtcgtgacggcaagcatcccctgccctggagatgcgccagaccagctcaggctatgggcgggagaagcccagtgcggtccccccaccaaggagttggtcaaggtggaggtgacagggcatggagcagccaccttgtagggatggggtccactcatctttctcccctttgtcctcatccttgtccccaccatccccaccacctctattccctgccccagccccaccattacctccacctccatttccatccccatccctgtccccattcccatgagcctcacactcccgtccacacctgcaagccccatcactgtccctactaccaccactgtccccccaccatggacatcctcaccccatcttttt

SEQ ID NO: 460801 - DNA, 1027 bp, Homo sapiens
  misc_feature (969)..(969): n is a, c, g, or t
  misc_feature (976)..(976): n is a, c, g, or t
  misc_feature (998)..(998): n is a, c, g, or t
cccctggtctccggacttcacttcccaggaggcctcgcgcgcgactggaagtgctccgagcctataagaaggcgaggcggcaacccgtgctctgctctggggcggcattgcagccggctgtaggcattcaggggcagtgtcttctgcatctcctaggaacctcgggagcggcagctccggcgcctggtagcgagaggcgggttccggagatcccggcctcacttcgtcccactgtggttaggggtgagtcctgcaaatgttaagtgatttgctcaaggtgcccatttcgcaggaattggagcccaggccagttctctgagcctatcattagggctaaaggagtgcgtgatcagaatggtgtctggacggttctacttgtcctgcctgctgctggggtccctgggctctatgtgcatcctcttcactatctactggatgcagtactggcgtggtggctttgcctggaatggcagcatctacatgttcaactggcacccagtgcttatggttgctggcatggtggtattctatggaggtgcgtcactggtgtaccgcctgccccagtcgtgggtggggcccaaactgccctggaaactcctccatgcagcgctgcacctgatggccttcgtcctcactgttgtggggctggttgctgtctttacgtttcacaaccatggaaggactgccaacctctactcccttcacagctggctgggcatcaccactgtcttcctcttcgcctgccagtggttcctgggctttgctgtcttcctcctgccctgggcgtccatgtggctgcgcagcctcctaaaacctatccacgtcttttttggagcccgccatcctctctctgtccatcgcatccgtcatttcgggcattactgagaagcttttcttcagtttgaaaaacaccaccaggcataccacagctgcccagtgaggcggtctttgcaacagcaccggatgctngtggtgnctttgggctgctggtgctctanttccttctggcttcatctggagcgcccga

SEQ ID NO: 460802 - DNA, 1061 bp, Homo sapiens
actagaaaacccctttcgtttatattatagagtaacacattcattcacgtggttcaaaattcaaaaggtacaaaaggatactcagtcattttctgcctaggaagcaaccagtgctaccagtttctggtatatttttcagaaaaattttacacatatctttattaaagagcattgtgcaatgaagacctttctacgtacatcattctccacatatgtgaatatatttgtgccctagccaatggtacggctgggtcctgtctactttgacttatgtgttctccatgccagtattgtatagtggagtcaacaccctgttgactctaaagtaagcatatgagataaatcacatcacctgaatggctgttttttcatacattgccgaactgttccttggggggatattggattatggaccactggattatagcattaccctcctattgtttctgcttcctctcaccgccatgcagcttattctccatctagcaaccagtgtatcagatcaaaacatgaatcagatcatgtcttgtcttttcttcacaaccttcctgtggcttcccatctcattagcgtcaaatctggaagagaggatgatgagctactctgcggtaacagagagaaggtcactgatgagtcagcttgggctgccacagcaaaataccacagactgggcggtgcaagcaacagaaattttctcacagctctggaggctggaagtcctccaggtgctatcaggattgggttttggacatatgaatttgggggaacacaaatattcagtccatgacagcgacaattctggagagtatttgaagataaaatcagcacaagttggtcccaaagctttgaaaacctgaggtataaacaaaacaacatattccaatgagatattgatatctaaactagttttcttaaatctgtcattcaaaggttgagaatttcttcctgaaatttagacaatatattatggaaatgcggtttgtctttttgtaaatttaggatgattctttttaaaaataattataggcattgtttattctgtatattagtgtaatagtcaa

SEQ ID NO: 460803 - DNA, 2813 bp, Homo sapiens
ggtccagcgaaggcagagccccagcttcactccctgaggtctgtcctggggagacactgctgctccggggggctgacctggcggggagtggccgcgcagtctgctccggcgccgctttgtgcgcgcagccgctggcccctctactcccgggtctgccccccgggacacccctctgcctcgcccaagtcatgcagccctacctgcctctccactgtggacctttgggaaccgactcctcacctcgggggctcgggccttgactgtgctgggagccggtaggcgtcctccgcgacccgcccgcgcccctcgcgcccgccggggccccgggctccaaagttgtggggaccggcgcgagttggaaagtttgcccgagggctggtgcaggcttggagctgggggccgtgcgctgccctgggaatgtgacccggccagcgaccaaaaccttgtgtgactgagctgaagagcagtgcatccagattctcctcagaagtgagactttccaaaggaccaatgactctgtttcctgtgccctttcattttttcctactctgtagctatgtctcgatcccgccatgcaaggccttccagattagtcaggaaggaagatgtaaacaaaaaaaagaaaaacagccaactacgaaagacaaccaagggagccaacaaaaatgtggcatcagtcaagactttaagccctggaaaattaaagcaattaattcaagaaagagatgttaagaaaaaaacagaacctaaaccacccgtgccagtcagaagccttctgacaagagctggagcagcacgcatgaatttggataggactgaggttctttttcagaacccagagtccttaacctgcaatgggtttacaatggcgctacgaagcacctctcttagcaggcgactctcccaacccccactggtcgtagccaaatccaaaaaggttccactttctaagggtttagaaaagcaacatgattgtgattataagatactccctgctttgggagtaaagcactcagaaaatgattcggttccaatgcaagacacccaagtccttcctgatatagagactctaattggtgtacaaaatccctctttacttaaaggtaagagccaagagacaactcagttttggtcccaaagagttgaggattccaagatcaatatccctacccacagtggccctgcagctgagatccttcctgggccactggaagggacacgctgtggtgaaggactattctctgaagagacattgaatgataccagtggttccccaaaaatgtttgctcaggacacagtgtgtgctccttttccccaaagagcaacccccaaagttacctctcaaggaaaccccagcattcagttagaagagttgggttcacgagtagaatctcttaagttatctgattcttacctggatcccattaaaagtgaacatgattgctaccccacctccagtcttaataaggttatacctgacttgaaccttagaaactgcttggctcttggtgggtctacgtctcctacctctgtaataaaattcctcttggcaggctcaaaacaagcgacccttggtgctaaaccagatcatcaagaggccttcgaagctactgcaaatcaacaggaagtttctgataccacctctttcctaggacaggcctttggtgctatcccacatcaatgggaacttcctggtgctgacccagttcatggtgaggccctgggtgagaccccagatctaccagagattcctggtgctattccagtccaaggagaggtctttggtactattttagaccaacaagaaactcttggtatgagtgggagtgttgtcccagacttgcctgtcttccttcctgttcctccaaatccaattgctacctttaatgctccttccaaatggcctgagccccaaagcactgtctcatatggacttgcagtccagggtgctatacagattttgcctttgggctcaggacacactcctcaatcatcatcaaactcagagaaaaattcattacctccagtaatggctataagcaatgtagaaaatgagaagcaggttcatataagcttcctgccagctaacactcaggggttcccattagcccctgagagaggactcttccatgcttcactgggtatagcccaactctctcaggctggtcctagcaaatcagacagagggagctcccaggtcagtgtaaccagcacagttcatgttgtcaacaccacagtggtgactatgccagtgccaatggtcagtacctcctcttcttcctataccactttgctaccgactttggaaaagaagaaaagaaagcgatgtggggtctgtgaaccctgccagcagaagaccaactgtggtgaatgcacttactgcaagaacagaaagaacagccatcagatctgtaagaaaagaaaatgtgaggagctgaaaaagaaaccatctgttgttgtgcctctggaggatttgatggaaacatagagaaattgtatgaaatgtgtttttgcagagatttcccctatgcctcttttggctagttgcatgtcttttttggcagtcacagatttaaaaattaagagtggaacaaattcattaactccatagcagcctgaaaaaccagaggaattaaacatctttccttttgaaagaacacagttgcatccctaatcttgaaactttgttttggagacatagcaataatacagcttttgtctcaacttttgtggctttactgttattttttaattcgccattgtcattggacatttattgacagaaatcaaattgctgtgtttctgggcaaagc

SEQ ID NO: 460804 - DNA, 3931 bp, Homo sapiens
catgaggagtcttcaggggattaaatgagtacgctagagcggtcttatttgttgaagatcaatggaaaagtggctgaaagaccacaacatatgttgatgagagtatctgttgggatccacaaagaagacattgatgcagcaattgaaacatataatcttctttctgagaggtggtttactcatgcttcgcccactctcttcaatgctggtaccaaccgcccacaactttctagctgttttcttctgagtatgaaagatgacagcattgaaggcatttatgacactctaaagcaatgtgcattgatttctaagtctgctggaggaattggtgttgctgtgagttgtattcgggctactggcagctacattgctgggactaatggcaattccaatggccttgtaccgatgctgagagtatataacaacacagctcgatatgtggatcaaggtgggaacaagcgtcctggggcatttgctatttacctggagccttggcatttagacatctttgaattccttgatttaaagaagaacacaggaaaggaagagcagcgtgccagagatcttttctttgctctttggattccggatctcttcatgaaacgagtggagactaatcaggactggtctttgatgtgtccaaatgagtgtcctggtctggatgaggtttggggagaggaatttgagaaactatatgcaagttatgagaaacaaggtcgtgtccgcaaagttgtaaaagctcagcagctttggtatgccatcattgagtctcagacggaaacaggcaccccgtatatgctctacaaagattcctgtaatcgaaagagcaaccagcagaacctgggaaccatcaaatgcagcaacctgtgcacagaaatagtggagtacaccagcaaagatgaggttgctgtttgtaatttggcttccctggccctgaatatgtatgtcacatcagaacacacatacgactttaagaagttggctgaagtcactaaagtcgttgtccgaaacttgaataaaattattgatataaactactatcctgtaccagaggtatgaatagatttctctgcttattggtaattattgaaatccaaattgaaaggaatcaatcatgatcttcaagtcatcatttaaatggttatcaataaaatggtttgagaaaaagaggtagtctgtctcatttggtacagaatgttgcttttcctgttcagtaatgttttctccttttctttaaaatctgttgacacaaaggcatgcctatcaaataaacgccatcgccccattggaattggggtacaaggtctggcagatgcttttatcctgatgagatacccttttgagagtgcagaagcccagttactgaataagcagatctttgaaactatttattatggtgctctggaagccagctgtgaccttgccaaggagcagggcccatacgaaacctatgagggctctccagttagcaaaggaacgaagtctctgtcgcccaggctggagtgcagtggtggaatcatggctcactgcaacctctgcctcctaggttcaagcgattctcctgcctcagcctcccaagtagctgggattacaggtgcctgccaccacgcccggctgttttttgtatttttagtagagacagggtttcaccatattggccaggctcctgacctcaggtgatccgcctgccttggcctcccagggtgctaggattacatgcatgagccaccgtgcctggcctcagacatcaataatttttaaagattcttttggtgattccaaagtatatcaaaatttgggggatcatagatagaaagactgaaattaagagagtcaagcttaattaaaaatcatggttgacgactgatagtccaaaagacagagtcacaaatcgtgtaaatatttgcaactaagagtcaagaggcatttatttgcagatagaggtgtctggctaaatgttggtctgcttagcaacacagatgaagagtcctataacagttccatatttaatgacagaaactgtagcattagccagtctgtgtgttttaatgaaagttaaccctaggcctaagaaaacctgattttggattccaaagggagtttgaaatcctagcttatttaaagggttttatctcattgcttcccttggtccctgtgaattacagcccttattttttgtgttttctgcaaaactcaagggtcatttattgctgcttagctctgacttttcctttctttaagtgcctctagaagaatgaatgtttgggtcataaatcaattaaaaaattaaaaaattggtttatgaccaacaaaaaagggatgctgaaattactatcaccagattgatatttggttggttagatgggggttttgttcaactttctaaatagtcttggtaaacttgataaggatcatatcatatgatactgaatggtaaggtcagatctggcaggaagtaaaatgaagatcaaagcttgtgtcactattctattaatcatacactgctttctttaactggagtaaagtaaacattgggttttccttctttagagcataccagaaattcctgatgacctgaagcaactttataaaactgtgtgggaaatctctcagaaaactgttctcaagatggcagctgagagaggtgctttcattgatcaaagccaatctttgaacatccacattgctgagcctaactatggcaaactcactagtatgcacttctacggctggaagcagggtttgaagactgggatgtattatttaaggacaagaccagcggctaatccaatccagttcactctaaataaggagaagctaaaagataaagaaaaggtatcaaaagaggaagaagagaaggagaggaacacagcagccatggtgtgctctttggagaatagagatgaatgtctgatgtgtggatcctgaggaaagacttggaagagaccagcatgtcttcagtagccaaactacttcttgagcatagataggtatagtgggtttgcttgaggtggtaaggctttgctggaccctgttgcaggcaaaaggagtaattgatttaaagtactgttaatgatgataatgattttttttttaaactcatatattgggattttcaccaaaataatgcttttgaaaaaaagaaaaaaaaaacggatatattgagaatcaaagtagaagttttaggaatgcaaaataagtcatcttgcatacagggagtggttaagtaaggtttcatcacccctttagcactgcttttctgaagacttcagttttgttaaggagatttagttttactgctttgactggtgggtctctagaagcaaaactgagtgataactcatgagaagtactgataggacctttatctggatatggtcctataggttattctgaaataaagataaacatttctaagtgattgtatgagattaattttgtcatttactttcatataaaagtcaaatttgaaaaacacattttctgttctttgagaattcagggaggaaattatatgcctttttcttttcttttcctttctgtagtaaaatatacctaatatacaatttaccattttacccatgtttaaacataaaattcagtggcttaagcacattcatagtgttatactaccatcaccactatttgtttccagaacttcatcatcccaaacagaaactctgtatcaataagaacattaactccccctttcccctccaagtccctggtaacctctattctactttctgtctctatgaatatgcctcttctagggacttccatagtgcatctattggttgacttgacggtgttccatagctggttggttggttggttgaaacatggaccaaaatttgccttaagtgaagttgaaatgccagtcctgccttggtatactatagaggaagtagttcaaaggcttagggagatc

SEQ ID NO: 460805 - DNA, 1758 bp, Homo sapiens
gatttggattgttgcgcctctgctctgaagaaagtgctgtctggctccaactccagttctttcccctgagcagcgcctggaacctaacccttcccactctgtcaccttctcgatcccgccggcgctttagagccgcagtccagtcttggatccttcagagcctcagccactagctgcgatgcatgtgatcaagcgagatggccgccaagatcgagtcatgtttgacaaaattacatctcgaatccagaagctttgttatggactcaatatggattttgttgatcctgctcagatcaccatgaaagtaatccaaggcttgtacagtggggtcaccacagtggaactagatactttggctgctgaaacagctgcaaccttgactactaagcaccctgactatgctatcctggcagccaggatcgctgtctctaacttgcacaaagaaacaaagaaagtgttcagtgatgtgatggaagacctctataactacataaatccacataatggcaaacactctcccatggtggccaagtcaacattggatattgttctggccaataaagatcgcctgaattctgctattatctatgaccgagatttctcttacaattacttcggctttaagacgctagagcggtcttatttgttgaagatcaatggaaaagtggctgaaagaccacaacatatgttgatgagagtatctgttgggatccacaaagaagacattgatgcagcaattgaaacatataatcttctttctgagaggtggtttactcatgcttcgcccactctcttcaatgctggtaccaaccgcccacaactttctagctgttttcttctgagtatgaaagatgacagcattgaaggcatttatgacactctaaagcaatgtgcattgatttctaagtctgctggaggaattggtgttgctgtgagttgtattcgggctactggcagctacattgctgggactaatggcaattccaatggccttgtaccgatgctgagagtatataacaacacagctcgatatgtggatcaaggtgggaacaagcgtcctggggcatttgctatttacctggagccttggcatttagacatctttgaattccttgatttaaagaagaacacaggaaaggaagagcagcgtgccagagatcttttctttgctctttggattccggatctcttcatgaaacgagtggagactaatcaggactggtctttgatgtgtccaaatgagtgtcctggtctggatgaggtttggggagaggaatttgagaaactatatgcaagttatgagaaacaaggtcgtgtccgcaaagttgtaaaagctcagcagctttggtatgccatcattgagtctcagacggaaacaggcaccccgtatatgctctacaaagattcctgtaatcgaaagagcaaccagcagaacctgggaaccatcaaatgcagcaacctgtgcacagaaatagtggagtacaccagcaaagatgaggttgctgtttgtaatttggcttccctggccctgaatatgtatgtcacatcagaacacacatacgactttaagaagttggctgaagtcactaaagtcgttgtccgaaacttgaataaaattattgatataaactactatcctgtaccagaggtatgaatagatttctctgcttattggtaattattgaaatccaaattgaaaggaatcaatcatgatcttcaagtcatcatttaaatggttatcaataaaatggtttgaga

SEQ ID NO: 460806 - DNA, 1047 bp, Homo sapiens
cttctccctcgagttgggacccgggaagaaccatgaagtggctgctgctgctgggtctggtggcgctctctgagtgcatcatgtacaaggtccccctcatcagaaagaagtccttgaggcgcaccctgtccgagcgtggcctgctgaaggacttcctgaagaagcacaacctcaacccagccagaaagtacttcccccagtggaaggctcccaccctggtagatgaacagcccctggagaactacctggatatggagtacttcggcactatcggcatcggaactcctgcccaggatttcactgtcctctttgacaccggctcctccaacctgtgggtgccctcagtctactgctccagtcttgcctgcaccaaccacaaccgcttcaaccctgaggattcttccacctaccagtccaccagcgagacagtctccatcacctacggcaccggcagcatgacaggcatcctcggatacgacactgtccaggacagccctggaaagtgcccaatcaacggtcgctctgaggaggcaacagcagatggtcacacaaatggacgaacaaaaaaattcatgtcttctcccctcactttccacagcgatgacaagagtggcagcgtggtgatctttggtggcattgactcttcttactacactggaagtctgaactgggtgcctgttaccgtcgagggttactggcagatcaccgtggacagcatcaccatgaacggagagaccatcgcctgtgctgagggctgccaggccattgttgacaccggcacctctctgctgaccggcccaaccagccccattgccaacatccagagcgacatcggagccagcgagaactcagatggcgacatggtggtcagctgctcagccatcagcagcctgcccgacatcgtcttcaccatcaatggagtccagtaccccgtgccacccagtgcctacatcctgcaggtgaggaggctctggaccatccactagagaggttcacacagaatgtggacacagagtccccttctgcagagggaaagtacacttccac

SEQ ID NO: 460807 - DNA, 1125 bp, Homo sapiens
tcaattgtaagatccttaagatcagagagtgagtctcatccatccatatgctctgccatgctaagcacggtgcccagtacagaaggtttacattgccatggggattttgagaacgtctggtcaatgggaggtttggtgaaaacaatgtgggtcgtggatgaaagaatcccagataaacagccatatccagtgcccctgcaggggagagttttatggggaatatatgattcgccacaaagaatccagacaatatttatcttccttcaactggcaacaactccaaatttcatcaaagggcatggaaagaaagcatgtactgtcaaaagagaaaaaaattcaagatgtcaggtgagtgattattggggtgagatccatctccgatttgtttacatcttctgcttttctgattttggaaggaggcccaggactgtgcacaccacagggctggctgtgctgtacgagagttctcataatcgagatgccctgaaggtcctgctgtcatctactgttaaagctcagcccagccaccctcttgagaaaggggagaatggccatcagcaatgcagagttcattttataagcatctctcttgtatgtgatctctcatttccttttgaagataaaaggcgagtgatgagtgtccccttggtctagttttcctgtcttctttctgttgtctttcacctaaaaacctagctatgaaaaagcaaggactcagctgggcacatggtgcattagaattcacattccatctgaataatattaaatctccctcttggcatcctgtttatgctaatctttttcgggacttaatgatgtttatcaggacttccatttcctcttctttagaaatgtgctcagctaatgaaggaaggttggttttcttgagaaagaaagattcataagaagagtatgcagcagattcttattctgagcattgcaggttcagcctctcactgcggtgacttcatattcatcaggaataggtataatctattctgtgcacagttgatttagggcagaaataaaagctcagacaacaaagcaaggctcctcttacacactactatgtctgaatacaaatggttcataattgaaggctaaacttcctcatctcacccacag

SEQ ID NO: 460808 - DNA, 1516 bp, Homo sapiens
gctggcacagagcggttcttgctacacccttagaagtgagatttttcgaaccatgccttgtacatatcagcacccctttctctggagcctctgccccctgcccccagcatcaccatcattcagagttccacgaagccaggttcctgtgagaagtgacatggcccacggaatctggtttttcatctcctgggtgaaagcgctgccgggagacgccaccgccaccaggagccctgtactaccagccatggtcaaccccaccatgttcttcaacatcgccatcaacagcgaggccttggggcacgtctccttcgaactgtttgcagacaagtttccaaagacagaaaactttcgtgctctgagcactggagagaaaggatttggttataagggttcctgctttcacagaattattctagggcttttgtgtcagggtggtgactttacatgccataatggcactggtggcaagtctgtctacagggagaaatttgatgatgagaacttcattctgaagcatacaggtcctggcatcttgtccatgaagcatacaggtcctggcatcttgtccatggcaaatgctggacccaacacaaacgattcccagattttcatctgcactgccaagaccgagtggttggatggcaagcatgtggtctctggcagggtgaaagaaggcatcaagattgtggaggccatgaagcgctatgggtccaagaatggcaagagcaggaagaagatcaccactgctgactgtggacaactctaataagtttgacttgtgttttatcttaaccaccagaccattccttttgtagctcagaagaacaccctccaccccatttgctcgcagtatcctagaatctttgtgctctcactgcatttccctttgggttccatgttttccttgcccccttccatgcctagctggattgcagagttaagtttatgactatgaaataaaaactaacaaaaaataataataatctacccataaaattgtgaaaaaggaaaaatacctttgtgcataggctatgaagtttaggagtgggtactagccatggttttaggcatctcctgggagacttggaacgccttcttgaggataaggggcacctactgtatactgtttgtattcatctgttgtcatttgaaaggaactgaatgtctttccaggtcaccacacagcctgcacctgagtcaggtcaattggctggccatcccgtcatgtggttctacacagggtaccattatttatttagtcccctattgctggaccctcatggccaaggctgccagtgggccccttcttccacagtgacagtttgttctgggcacctggagggccccactcatccctcctgctggctgggatatgtgtaccagtggtaggaagtcatcccacagcacctgcaccaagccagcatcctgggggcaggggagacaggacagagggagccagccctgctgtcattttagggcacaaattccccactgagggatgcagagaccttttcac

SEQ ID NO: 460809 - DNA, 848 bp, Homo sapiens
ggacgcagatgagggacgggcggatgacttccttccggacgcagatgagcgacgggcggatgacttccttccggacgcagatgaggaagggattccttccggacgcagatgagggacgggcggatgattccttccggacacacctctcaatgtgcacgtgctgctcctgccaggcggatgacatcaggaatgctcatcaacttgagggcgaagaaatgcttggcggtcttctccttcaccgggtgcacccgcccgaacgtcccagtgcccacggtggccagtgtgtcgaagtcctgcaggcgctgattcacaactcaagtagcacagtgaaggtggacaatttggactgcctaagcatcccagcatcgtctgttctacatatcactattccaaatggcatgctgctgtgtttgtgaatccagcctcccacattgggtatgtcaccattggcctataacaactggaatgacacatcttcactagaggcaggccttggccatcctccacagcagactattgagtaacaaaataagcagtactatttatttacttcttactatgctgtttaaaaaaaaagcctctgatgaaatcctggtggcttcttctctgttcttaccaatccaggaagtgtagagagctgttgagccctgtttccaaatccccaggtgaagctgcgctgacatgccttctgtccatacagccctttccaagactcagctatttgtgatcacccccaaatgttaccctgattctattaccaatttgtaataaaactcacttgtatggtggaaaggctgttgccaattaattttattttcgtcacccattttcccttccatgtaatcgtc

SEQ ID NO: 460810 - DNA, 659 bp, Homo sapiens
ggacgcagatgagggacgggcggatgacttccttccggacgcagatgagcgacgggcggatgacttccttccggacgcagatgaggaagggattccttccggacgcagatgagggacgggcggatgattccttccggacacacctctcaatgtgcacgtgctgctcctgccaggcggatgacatcaggaatgctcatcaacttgagggcgaagaaatgcttggcggtcttctccttcaccgggtgcacccgcccgaacgtcccagtgcccacggtggccagtgtgtcgaagtcctgcaggcgctgattcacaactcaagtagcacagtgaaggtggacaatttggactgcctaagcatcccagcatcgtctgttctacatatcactattccaaatggcatgctgctgtgtttgtgaatccagcctcccacattgggaagtgtagagagctgttgagccctgtttccaaatccccaggtgaagctgcgctgacatgccttctgtccatacagccctttccaagactcagctatttgtgatcacccccaaatgttaccctgattctattaccaatttgtaataaaactcacttgtatggtggaaaggctgttgccaattaattttattttcgtcacccattttcccttccatgtaatcgtc

SEQ ID NO: 460811 - DNA, 1896 bp, Homo sapiens
agcgagctggatgtcaggcagtgggcaaagtagtgaactggaggtgagaaaacaatgacacaaactcagggcttctcttcccaagtatttggctgagaagagagatgtagtattaaagggagatatgtggtaaaggaagccttttatttcaagattcaacaaaagcgtgagtatacttctatgttaaagggaaagagccaatagagaaaacacatttttgaggttagaagagaaggaagaactaatgcagaagggccccaaaaggcacaggtgcgtgcaatccggatcagggacagattagctttggattcctacaaaagcaagaagggagaaaggaccatgtgacactagagatatttctggtaaaggaaaggtttaggaaaatatcttttgatgacctttattttaacataatttttttttttttttttttgagatggagtcttgctctgtcacccaggctggagtgcattttagaggaagaggaaaaaataataagaaaattatatgcagttgcaaaatgtgtgactatttacaaactctaacatataactacaaaacggaccagaagaatcattatcataggaagcaaagggtcatttcaaaaatcagaggagggatgattcatatttaatttaattctgtggaaaacatttaagtaacctttgaggacaaaaataggtgatatgttgaaatgcgggaaaccacagtggaaggaaaaagaattcaagaaagctcagtttcagtaaccagtatctagtaaaatcttcaggacctagaggctacaatctgcattaatagtgtctgaagacctagaaatgtcattaaataccattttggataattcttgtagacttgagatgatgtctatttaaagttacaagacagtgcctgtatttctgtattcataacagaaaacaattggatatggaaaagaaactaacatgctatgccacaatctctaaagaaagattagggaagtttcagcttaaagcaagaataatcacaataaagttttacaaccctttgcaagcatatatgaaaaacttacaaaaagtttgtaatgatcttttcttaagctaagagaatggaaaaaatgagaaaaattaaattataaaatgaaactttggtttagaggtaagaaacatttgatgacagtcaagagatcagggttgtacagtgtattatgtgaatgttgcagcgataaagggagtaaaaaaacacagccatggatcgggagactaaggtacctccagaggagtccagtgggtccagaagccctttggatgttggtcagaggctcctcttgggcagagatcacagcagcagccaacagaaacccaacgtgtataacctattttttctatgttcttctaacatttattcaacttctctcatctgatatcttgccaaatcattcaaagagaaaatatatcccattaggcaagagccgaccatattcccatcacctgagaaaatcatatgcacaggatgcacccacctcacctttctctgcctcatcatgtcagaaaaagtacccctccttttgccacaaggcaaatctgagataaaagatttagatggcctgtaattccagcacttggggagaccaatgcaggcagattatttgagtctaagagttcaaaagaagcctaagcaacttagggaaactgcatctcttaaacaaatacaaaccattagcctagcatggtggtgtggtggcacatgcctgtagtcccagctactcagggtggggagcactgaggtgggaggatcacctgagctggaaggttgtggctgcagtgagccgtgatcacgtcactgcactccagccagggtaacagatattttttaaaggatcttctctgttaaaaataatccaataaacaggtggcc

SEQ ID NO: 460812 - DNA, 1571 bp, Homo sapiens
aagtggaagaggaggatggtgacgccagcgaatgaatgaatgaggacacagatgctgcactgggtaacaaaaatactcccatgagccaggaaccaagcaaggactgcacaactaccaaaaaactgaatcagacatgccggctgctgcagcagggcgggcagctgcaggtgctggcacaggcactggctctctgcgaggccggaccaggtgcaccacaagcagctttcacagctggcactggggaacacgtggcgctcagaagcttggagatgccagcaaccacagggctccaaggagggagtcacagccctggctcagggagctcccagcagggagaagccaggcagcaggagcagacacctctgagcctgcgagggctggggcagccttcctgggccccacaagagtacacagatgcctgggtccgcagtcacagtttgggcggccgtaactgcactcggaagagcggagctcctgcttgctccgtggagcaagaggcctagatccacagccatgacttgggcaccgccccaactcggaaggggcagggctcccacttgtccctggctctgactggctctggccacgcctccctgctgcagccagagtgatggcagcggccaatccagatggcccacgatttcatttatatgaaatgactagaatagacaaatcataggacggaaagatgattagtgggtgctaagggctgggagatgacagtatggggagtgactacttatggaagtaactagcattaaaagtttggcacatatttttcaagactattttcagagaatttgcacacttacatctttatgtattaatgtaaataatatacttttatcttcagtttgtacgtaattgagactatctctatatattgccctgtgacttttttttaattaccatcttagagctgtttccagtacatgtagacgttcctcattcttttttaacaatgtccagaatatggataccatattatttatatttttgagattattagagaaaagtttcttgaaagatgtaacacttgagctgggacatgcagattaagatttttatttatttaacggaggaaggtcatttctggctggggtaataatgttgttgacagagttcttttttttgttttttttgagacggagtctcgctctgtcacccagactggtgcgatcttggctcactgcaacctccacctctcaggctgaggcaggagaatggtgtgaacctggcaggcagagcttgcagtaagctgagatcgggccacagcactccagcctgggcgacagagcgaggctctatctcaagaaaaaaaaaaagaaaaaaagaaaacaggaagaaatgttgtcatttatttgtagaatctgaaacatttgaactcatagaagcagaggaatatattgtgttttgagatctattgcatagcatggtagattgctaagagtaaatttcaaatgttctcaacccaaaaaatgttaagcatttgaggtgatggatatgttaactggcttcatttaattattccatattgtatttataagtcacaataggactttgtggcccat

SEQ ID NO: 460813 - DNA, 693 bp, Homo sapiens
tagaggcagggaggaaacaaaatgtctgcagcctcagctcaggctttgattcggctggaatgcgttcattcattcttgaagttggagtttttcaatcaaaatgaaacctactgctctgactctaatggaaaacaaccaaattatacaccgggtaattatagcttccagcctcatgtcaggagtcccctgctcaacagcgtgctcctggtgatactgccacccgtaacgggtactggctttgctaacatcctgacgagacgtcggggagagacgggaagtggcagagatgggatctcactgtgttgcccacgctggtttcaaactcctagcctcaagcaatcctcctgcctcagcctcctgaagccctgggattacaagcataagccaccgcccccggccagatcacatgattctttacatctctgctgacagatttcatcactggtgctgagtgcagggagtcccgcagccacttacacgtgttgcattgccgggcaatacaggcctgtgtgacttgctattctatggctgggcttctgcctgcagatgcctggtttctccactgccaaggctcatggtctgacacatccaggaaattcaacagtgaggatgcaatgacaatgagtcgtgcatgagggttcccgggcctcgctcccctgcccatcagagaaggcttggcatctcagctgactc

SEQ ID NO: 460814 - DNA, 1674 bp, Homo sapiens
gctcggtacccataggttcgcagggcattgtagctcacgcctgtaatcccagaactacttgggagcctgaggcaggaagatcactttagccaggaggctacagtgagccatgattgtgccactacttgggcaacagagtgagacttgtactcttaaaaaaataaataataaacccaggagcctcttaacctagatcttctttttaatttagttaagtaatcaatgcatattttcctttgtgcacattttttgggggattatttattaacaagtaaaaatgcatatattggtctataacatgacattttgatgtaaattgtagaatggcatacagaacttcttgatagtatgattttacctcagttgggtttcattgcgtctatattgatataagtgtttttactcctgtactgagttcaggctgtcttttgattacaatttgttattagaatgcagtagtgacagcttggtctctggagccagatagacagggtttgattctggttctgcctcttactggttggacatccctgcctctcactggttggacatccctgcacctcagcttctgtaccatgggaatgatacctacctcaggagttgttggagttaaaacacatgaagtgcttagcacaggtgcttagaacaatgcttagaactattgaataataaggttcagtaaatgtttgttgttattatttaggaaataaagtgtggttaaaagttatctttttgactaggcatggtggctcacaactgtaatctggcactgtgggaggccaaggttgggtggatcacttgaggccaggagttcgagaccagcctggccaacatgacaaaaccccatctctaccaaaaatataaaaattagccaggtgtggtggcatatacctgtaatcccagctactcaggtggctgaggcatgagaatctcctgaacatgggaggcagaggttgccatgagccaagattgcgccattgcactccaccctaggtgacagaacaagactctgtctcaaaaaaaaaaaaaaaaattttttttcagtaaggtcttctctgaccctaaatataatggcaactcttgttttaattcttcattccttaattaccttgctgtgtttttctacatggcttaccattacttgatattatatatttatgggtttgtcttcccctactggattttaaactctgagggcaagaactttgttttattcatagctgtgttcattctaatgcctaaaacagtatctggttgatagctggtgttcaataaatatttaaagatgaataaatgaaagtatataaataccactaaatgccctttgtttggggagggggtcgtctatttgattattttaacgagttactgccttttgtgagggagcgtattttgttttggcagtgcctcagtattgatcttttgttgccaaaagtacctaaaaccttacccttcttttttgttaagctatatgtgagacagagcctgaacagcctgttcgacattacccattatgggtaaaagtagaaggtgaagtagatccagaaccagtttatatccccacgccttctgtcattgagcctatgaaaccattgttattgcctcagccagaagttttatctcctactgtgaagggcaaactgctcactggaattaaatctccacggtcatata

SEQ ID NO: 460815 - DNA, 5000 bp, Homo sapiens
cccgcccccagcgggatgtgaaggactccgggtgaggccggccacgccccgcacggatgggaaggccattgtgactatgtggtgattacagttgtcttactactgagtttcctactgaaatcatggaggagaaacagcagattatattggctaatcaagatggtggaacagtggcaggagcagcacctaccttctttgtcatcttaaagcagccaggaaatggcaaaactgatcaaggaattttggttactaatcaggatgcctgtgctttggctagtagtgtgtcatcaccagtaaaatctaaagggaagatttgccttccagctgattgtactgtgggtggaatcactgttaccctcgataacaatagtatgtggaatgagttctatcatcgaagcacagagatgattctgaccaagcaaggaagacgcatgtttccttactgtcgttattggataacaggtttagattcaaatttgaagtatattcttgtcatggatatatctcctgtggataaccatcgttataagtggaatggtcgttggtgggaacctagtgggaaggctgaacctcatgttttggggagggttttcattcatccagaatctccttccacaggtcattattggatgcatcaaccagtatctttctataaactcaaacttaccaacaatacactggaccaagaagggcatatcatcttgcactctatgcatcgttacctgccgaggcttcatttggtgcctgcagaaaaggctgtggaggtgatacaattaaatggccctggtgtccacacttttaccttcccacagactgaattctttgcagtaacagcttatcagaacattcagattactcagctgaaaatagattacaatccatttgccaaaggctttcgggatgatgggctgaataataagccccagagagatggaaaacaaaagaacagctctgaccaagaagggaataatatttccagttcttctggtcatcgggtccgtcttacagaaggtcaggggtcagagatacaaccaggtgatttggatcctttgtcaaggggtcatgaaacatcaggcaagggtttggagaagacttcccttaatataaaacgagactttcttggtttcatggatactgattcagcacttagtgaagttcctcaattgaagcaagagatttctgaatgtcttattgccagcagttttgaagatgactcccgtgtagcctcaccgttagaccagaacggaagcttcaatgttgttattaaagaggaacctctagatgattatgactacgaacttggtgagtgcccagaaggggtcactgtgaaacaggaagagacagatgaagagacggatgtatactcaaacagtgatgatgatcctatactagagaaacagctaaagaggcacaataaagttgacaacccagaagctgaccatctatcttctaaatggcttccaagcagcccatcaggtgttgctaaagctaaaatgttcaaattagacactggaaagatgccagtagtctatctggagccctgtgctgtcaccagaagcacagttaagatttctgaactccccgataacatgctttccacatctcgaaaggataaatcttctatgttggcagaattggaatatttgcctacatacattgaaaattccaatgagactgccttctgcttaggcaaggaatcagaaaatggtcttagaaaacattcaccagatctcagagtggtacaaaaatatcccttactgaaagagcctcagtggaaatatcctgatatatctgacagcattagcacagaaagaatactcgacgattcaaaggattcagttggagactcactttcaggaaaagaggacttgggcagaaagagaacaactatgcttaagattgcaacagccgcaaaggtagtgaatgctaatcagaatgcctctccaaatgtccctggaaaaagaggaaggccacgaaaattgaaactctgtaaggcaggacgaccacctaagaacacaggaaagtctttaatttctacaaagaatacacctgtaagccctgggagtacctttccagatgtgaagcctgatctggaagatgtggatggtgttctctttgtttcctttgaatcaaaggaagctctagacattcatgcagttgatgggacaacagaagaatcttctagtctccaggcatcaaccacaaatgactcaggttacagagcaagaatttcccagttggaaaaggaattgatagaagatttgaagactttgcggcacaagcaggtgatacatcctggtcttcaagaaggtggaaattcagaaagttcactgaaaaatcgttctgctttctgtagtgataagctagatgaatacttggaaaatgaaggcaagctgatggaaacaagcatgggtttttcttctaatgctcccacatctcctgtggtgtaccagcttcccactaagagtaccagttatgtacgaacacttgatagtgtactaaagaagcaatctactatttccccttctacctcttattctttgaaacctcattctgtaccccctgtctctcgaaaggcaaagtctcaaaacagacaggcaactttcagtggccgaactaaatcatcttataaatccattttaccataccctgtttcaccaaagcagaaatactctcatgtgattctaggagataaggttaccaagaattcttcaggcatcatctcagaaaatcaggcgaataactttgttgtgccaactttggatgaaaatatatttccaaagcagattagtttgcggcaggcacagcagcagcagcaacagcaacagggaagtcgccctccaggcttgtctaaatctcaggtgaagctaatggacctggaagactgtgcactttgggaaggaaaaccaaggacatacatcacagaagagcgagcagatgtatccttaacaactctacttacagctcaagcatccctcaaaactaaacctatccacacaatcataaggaaacgagcccctccctgcaacaatgacttctgtcgactgggttgtgtatgttccagtctagctttggagaagcgccaacctgctcactgccgccgaccagactgcatgtttggttgtacttgtttgaaaagaaaagttgtacttgttaaaggaggatccaaaactaagcattttcagaggaaggctgctcatcgagatccagtattttatgatactctgggagaggaggcaagggaggaggaagaaggaatcagggaggaggaggaacaattgaaagagaaaaagaagagaaagaagctagaatacagtcttctaagtgtaatgcttttcatttatggtgcaactactatggacactgctaggagtgaggagctacttgggagcctgaggcaggaagatcactttagccaggaggctacagtgagccatgattgtgccactacttgggcaacagagtgagacttgtactcttaaaaaaataaataataaacccaggagcctcttaacctagatcttctttttaatttagttaagtaatcaatgcatattttcctttgtgcacattttttgggggattatttattaacaagtaaaaatgcatatattggtctataacatgacattttgatgtaaattgtagaatggcatacagaacttcttgatagtatgattttacctcagttgggtttcattgcgtctatattgatataagtgtttttactcctgtactgagttcaggctgtcttttgattacaatttgttattagaatgcagtagtgacagcttggtctctggagccagatagacagggtttgattctggttctgcctcttactggttggacatccctgcctctcactggttggacatccctgcacctcagcttctgtaccatgggaatgatacctacctcaggagttgttggagttaaaacacatgaagtgcttagcacaggtgcttagaacaatgcttagaactattgaataataaggttcagtaaatgtttgttgttattatttaggaaataaagtgtggttaaaagttatctttttgactaggcatggtggctcacaactgtaatctggcactgtgggaggccaaggttgggtggatcacttgaggccaggagttcgagaccagcctggccaacatgacaaaaccccatctctaccaaaaatataaaaattagccaggtgtggtggcatatacctgtaatcccagctactcaggtggctgaggcatgagaatctcctgaacatgggaggcagaggttgccatgagccaagattgcgccattgcactccaccctaggtgacagaacaagactctgtctcaaaaaaaaaaaaaaaaattttttttcagtaaggtcttctctgaccctaaatataatggcaactcttgttttaattcttcattccttaattaccttgctgtgtttttctacatggcttaccattacttgatattatatatttatgggtttgtcttcccctactggattttaaactctgagggcaagaactttgttttattcatagctgtgttcattctaatgcctaaaacagtatctggttgatagctggtgttcaataaatatttaaagatgaataaatgaaagtatataaataccactaaatgccctttgtttggggagggggtcgtctatttgattattttaacgagttactgccttttgtgagggagcgtattttgttttggcagtgcctcagtattgatcttttgttgccaaaagtacctaaaaccttacccttcttttttgttaagctatatgtgagacagagcctgaacagcctgttcgacattacccattatgggtaaaagtagaaggtgaagtagatccagaaccagtttatatccccacgccttctgtcattgagcctatgaaaccattgttattgcctcagccagaagttttatctcctactgtgaagggcaaactgctcactggaattaaatctccacggtcatata

SEQ ID NO: 460816 - DNA, 1941 bp, Homo sapiens
agttccacgagaatagtcaggcctttctggaagcccagtgccacagtctgcactgagcttggctcaggaaagaagggaaatccaggcggggcctgttgggcccaggtcttgagctcttttggctccagagttcccaacacagtcatggatcaaaactcagtgcctgaaaaggctcagaatgaggcagacaccaataacgcagataggttctttcgctctcactcatcacccccacaccacaggccaggccacagcagagctctccaccattacgagttgcaccatcacggcgtgccccaccaacgtggtgaatctcaccaccctccggagttccaagacttccacgaccaagccttgtcctcccatgtccaccaatctcaccaccacagcgaggcacggaatcacggcagagcccatggccccacaggctttggtctggctccctctcaaggcgccgtcccctcccaccgttcctacggtgaggactaccatgatgagctccaacgtgatggcaggaggcatcatgatgggtcccaatacagtgggttccatcagcagagtgactcccattaccatagggggtctcaccatggcagaccccaatatctcggtgagaatttatcccactattcctctggcgtgccccaccacggtgaggcttcccaccatggtgggtcctacctcccccatggacccaatccctacagtgagtccttccaccacagcgaggcttcccaccttagcgggctccaacacgatgagtcccagcatcaccaagtcccccaccgtggctggccccaccatcaccaagtccaccaccatggcaggtcccgtcatcatgaagcccaccagcatggaaagtctcctcatcacggagagaccatttcccctcattcctctgtggggtcctaccagcgtgggatatctgactatcacagcgagtaccaccaaggtgatcaccaccccagtgagtaccaccatggcgaccatccccaccacacacagcaccactaccaccagacccaccggcaccgagactaccatcagcaccaagaccaccacggcgcgtatcattccagttacctccatggcgactacgtccagagcacttcccaactctctatcccacacacatcccggagcctgattcacgatgcccccggccctgctgcttctcgtacaggagtcttcccctatcacatagcacacccacggggctcggctcacagcatgactcggtcctccagcacaatccgctcacgtgtcacccagatgtccaaaaaagtccatacccaggatatctccaccaaacattcagaagactggggcaaagaagaagggcaatttcagaaacgcaaaagtgagtctttgctgggccccccatgccaactcctgctgcctggcgcaggatccagacctgatctcggccccgcactgtccttccgcagatcgtaaggcccgaccctcctgcacaggtcccccactggctattcactctcctgactgttcatggtcccatcttttattccttgaattatgtacctctttaggccatgaggtgtttgttcattcagtcactgccttatttattcatatgtctaccagtcaaacattgatactcatccaatgtgggtgtgtggcctgcctgggccatggcagcatggggaaaaattcaacacagtcgctgccctcgaggggcccaaaactaggggtggtcacttagctgaccacagatcatcctgtgctcggggcctgccctcagaacatttaccatggtggatcctatctgtccagatttctcccactcacctgtgagctgcttgagaacagagattaggaactaatgcctgaatgagggccttattggagggcaaggagggaccatggcctttagctcatacgccaccaaactttcttcctagtagttcaataaacatgaca

SEQ ID NO: 460817 - DNA, 199 bp, Homo sapiens
tactactactaaattcgcggccgcgtcgaccagcatgtctcaccatctgcaaccatctttctgtttgtcgtcttgttgatttgctgcctccacactgtcagctccttgggaacagagattggtttgtttactgtgcatccctggtgcccagaacagggcatggcatattgttggtgcataataaatattgtggaaataa

SEQ ID NO: 460818 - DNA, 3543 bp, Homo sapiens
tgctggtactgccccgggattaacgggcagcgcagtgctcttggccgggaggaggctgtgctgcaccagcacctcttgctccacatctccagagagcccagggccctgtggccgagtgtgtccagcccagtgtcatggggagcttccatatctcatggctccttgctgggccaagccctccagaaccccaaacccccaaagactgatgaatgccagagtggccaccttgcttatctgtggccccggccctggtgatcaccatggcagctgggaagggagccccgttgagcccatcggctgaaaacagatggcgacttagcgaacctgagctgggccggggctgcaagccagtgctgctcgagaagacgaaccgcctgggccctgaggctgctgtgggcagggcgggccgggatgtgggcagtgcggagctggcactgttggtagccccaggcaagccccgacctggcaagccgctgcccccgaagacacgtggagagcagaggcagagcgccttcacggagctgccgaggatgaaggaccggcaggtggatgctcaggcccaggagagggagcacgatgaccccacaggccaacctggtgccccacagctgacccagaacatccccagaggcccagctggcagcaaagtcttctctgtgtggcccagcggagcacgaagtgagcaaagaagcgcctttagcaaaccaaccaagcgaccagcagagaggcctgagctaacctcagtcttccctgcaggggaatctgcagatgccctgggggagctgtctggactcctcaacactacagacctcgcttgttggggtcgactttcaactcccaagcttttggttggtgatttgtggaacttgcaagcattgccacagaatgctccactctgtagcacttttctgggtgcccctacactgtggctggagcatacccaggcccaggtgcccccaccctcatcatcctccaccacttcgtgggccctcctgccacccaccctcacctccctgggcttgtccacccagaactggtgtgcaaagtgcaacctgtcctttcgcctaacgtccgacctggtctttcacatgcgatcccaccacaaaaaggagcatgcggggcctgacccacattctcagaagcggagagaagaggcccttgcctgccctgtgtgccaggagcacttccgggagcgccaccacctctcccggcacatgacttctcacagctagcaggtgaccgcagaatgacctgctgggtgcagcagccagcctttggcagaggggggctccctgggcctgcgttgagggggctgtcatggtcctttgcagagctgctgcttttggcattcatagataaacagctcaggcataatttgaaaaagccacacctgcatgatgtgttttgaaggaaatgaagtcctgaaataaagtgatgggctttgcaaatccagggtagaggccctaacaggcacagagagcaggggcaactcctggcacacatcatgggctttggaggcacacaagcctggattcgaatctgggctctttcacatactagctgtgaccctggacaaagagctttaacctgctgagtccccattttctcatctgtgaaatggagatgataacactgtgtcttaggttggcattcaggtcacatgaaaggtgtgtggaaagtggccagcattctgcctgcagaccctgagcactgagtcaacaaggtttgtgatgatgtctgtactagttagctattgttattaacaagatctccatggcagacaagctaaagcatctgcctaagtcgtgagtctgtgggttggctcaggttaagctgagcttggctgggcttggcagcaagtctcagatttgatcaagtcatattcgttttcttcttcggctggtgggctacccagagcgagcacgcttctctcgtggtcatgccaagaacacaggagggtgagtctaacaagcacacctcaagcctctgcttgggtcacattgccaatgtcctctcagcccatacaagtggcaggaccaggcccaatattaaggagtggaaaagtgtaggctgcccttggtgaagctgtgacaagggagtgaccatccatcccctccacaggagggtgaggaattgggacaggtaattccagccaatacctggtccatagttcttcacattgtgagtatatgaatacggggaaatagaaccccctccccaccacctacacacatgctgttttaccttccaagaataggacatgtgcaaaaactaggcttccagatcgtgaggctggggagcattctaggtaccatttattatctactgcgtttcggtcagtagctgttgtaggtacccgcatcagcccttgttcctaaggatgtgtggagcccaggctgtactctttgacattccacaggtcagtctgcgtgaaagccctttgtggggagtttccaagccagtgtcgtttttgcactggtttccacctcactgtcagatattgttcttttgatatgcagtttccagccctccaatgagtccccagcacagatctcaggcttgtggctgggaataagcccagctgagcaggtggggatctcagccagcctcccagactgcacctcttctattgctctcctctgtccaccgttccaggcagcagcactcccacctggctgctctgatgtcctcgctccctccattcctgcctctcaccatgcacgcatccattgtccacacacacacaaccagataatcttctgaaagtgtaactcagatgatgcctccaaccctgtggctgcccttcacacttacaggcctaaccccagcaggacctgccagctgcttcatgaacaagtccctgcctcatgttaattgcaagcactcatttcactctccctgtgtgccaggcaatagcataagcactggaagaatacagatgttatagtgagtcctacaatagccctggaaggcaagagctgtttcctttccatttctacaatgagtcaattgcagatgatgctataacacttccagtgtttctgacacttccctgaagctatacctgctaccttcatgggccgagcttgcccttatgaggcccacaggtggcagtgggcagaggggaccccgctataccacctcgctgctgttccactgtctgctcccgtgttctgaccacagctctggtgccgtttctcaagcctgggcttcattcaacattttctatctagctcttcatggtgctgctcctgctatggttccacagggcttcttctcgcaggtcagctccttagagaggtctcccagattccccgtaaagcagccctgcagcctctgcctctctcagccgcatcaccctgttgcttccttcacagcatgtctcaccatctgcaaccatctttctgtttgtcgtcttgttgatttgctgcctccacactgtcagctccttgggaacagagattggtttgtttactgtgcatccctggtgcccagaacagggcatggcatattgttggtgcataataaatattgtggaaataa

SEQ ID NO: 460819 - DNA, 3437 bp, Homo sapiens
tgctggtactgccccgggattaacgggcagcgcagtgctcttggccgggaggaggctgtgctgcaccagcacctcttgctccacatctccagagagcccagggccctgtggccgagtgtgtccagcccagtgtcatggggagcttccatatctcatggctccttgctgggccaagccctccagaaccccaaacccccaaagactgatgaatgccagagtggccaccttgcttatctgtggccccggccctggtgatcaccatggcagctgggaagggagccccgttgagcccatcggctgaaaacagatggcgacttagcgaacctgagctgggccggggctgcaagccagtgctgctcgagaagacgaaccgcctgggccctgaggctgctgtgggcagagcgccttcacggagctgccgaggatgaaggaccggcaggtggatgctcaggcccaggagagggagcacgatgaccccacaggccaacctggtgccccacagctgacccagaacatccccagaggcccagctggcagcaaagtcttctctgtgtggcccagcggagcacgaagtgagcaaagaagcgcctttagcaaaccaaccaagcgaccagcagagaggcctgagctaacctcagtcttccctgcaggggaatctgcagatgccctgggggagctgtctggactcctcaacactacagacctcgcttgttggggtcgactttcaactcccaagcttttggttggtgatttgtggaacttgcaagcattgccacagaatgctccactctgtagcacttttctgggtgcccctacactgtggctggagcatacccaggcccaggtgcccccaccctcatcatcctccaccacttcgtgggccctcctgccacccaccctcacctccctgggcttgtccacccagaactggtgtgcaaagtgcaacctgtcctttcgcctaacgtccgacctggtctttcacatgcgatcccaccacaaaaaggagcatgcggggcctgacccacattctcagaagcggagagaagaggcccttgcctgccctgtgtgccaggagcacttccgggagcgccaccacctctcccggcacatgacttctcacagctagcaggtgaccgcagaatgacctgctgggtgcagcagccagcctttggcagaggggggctccctgggcctgcgttgagggggctgtcatggtcctttgcagagctgctgcttttggcattcatagataaacagctcaggcataatttgaaaaagccacacctgcatgatgtgttttgaaggaaatgaagtcctgaaataaagtgatgggctttgcaaatccagggtagaggccctaacaggcacagagagcaggggcaactcctggcacacatcatgggctttggaggcacacaagcctggattcgaatctgggctctttcacatactagctgtgaccctggacaaagagctttaacctgctgagtccccattttctcatctgtgaaatggagatgataacactgtgtcttaggttggcattcaggtcacatgaaaggtgtgtggaaagtggccagcattctgcctgcagaccctgagcactgagtcaacaaggtttgtgatgatgtctgtactagttagctattgttattaacaagatctccatggcagacaagctaaagcatctgcctaagtcgtgagtctgtgggttggctcaggttaagctgagcttggctgggcttggcagcaagtctcagatttgatcaagtcatattcgttttcttcttcggctggtgggctacccagagcgagcacgcttctctcgtggtcatgccaagaacacaggagggtgagtctaacaagcacacctcaagcctctgcttgggtcacattgccaatgtcctctcagcccatacaagtggcaggaccaggcccaatattaaggagtggaaaagtgtaggctgcccttggtgaagctgtgacaagggagtgaccatccatcccctccacaggagggtgaggaattgggacaggtaattccagccaatacctggtccatagttcttcacattgtgagtatatgaatacggggaaatagaaccccctccccaccacctacacacatgctgttttaccttccaagaataggacatgtgcaaaaactaggcttccagatcgtgaggctggggagcattctaggtaccatttattatctactgcgtttcggtcagtagctgttgtaggtacccgcatcagcccttgttcctaaggatgtgtggagcccaggctgtactctttgacattccacaggtcagtctgcgtgaaagccctttgtggggagtttccaagccagtgtcgtttttgcactggtttccacctcactgtcagatattgttcttttgatatgcagtttccagccctccaatgagtccccagcacagatctcaggcttgtggctgggaataagcccagctgagcaggtggggatctcagccagcctcccagactgcacctcttctattgctctcctctgtccaccgttccaggcagcagcactcccacctggctgctctgatgtcctcgctccctccattcctgcctctcaccatgcacgcatccattgtccacacacacacaaccagataatcttctgaaagtgtaactcagatgatgcctccaaccctgtggctgcccttcacacttacaggcctaaccccagcaggacctgccagctgcttcatgaacaagtccctgcctcatgttaattgcaagcactcatttcactctccctgtgtgccaggcaatagcataagcactggaagaatacagatgttatagtgagtcctacaatagccctggaaggcaagagctgtttcctttccatttctacaatgagtcaattgcagatgatgctataacacttccagtgtttctgacacttccctgaagctatacctgctaccttcatgggccgagcttgcccttatgaggcccacaggtggcagtgggcagaggggaccccgctataccacctcgctgctgttccactgtctgctcccgtgttctgaccacagctctggtgccgtttctcaagcctgggcttcattcaacattttctatctagctcttcatggtgctgctcctgctatggttccacagggcttcttctcgcaggtcagctccttagagaggtctcccagattccccgtaaagcagccctgcagcctctgcctctctcagccgcatcaccctgttgcttccttcacagcatgtctcaccatctgcaaccatctttctgtttgtcgtcttgttgatttgctgcctccacactgtcagctccttgggaacagagattggtttgtttactgtgcatccctggtgcccagaacagggcatggcatattgttggtgcataataaatattgtggaaataa

SEQ ID NO: 460820 - DNA, 3578 bp, Homo sapiens
tgctggtactgccccgggattaacgggcagcgcagtgctcttggccgggaggaggctgtgctgcaccagcacctcttgctccacatctccagagagcccagggccctgtggccgagtgtgtccagcccagtgtcatggggagcttccatatctcatggctccttgctgggccaagccctccagaaccccaaacccccaaagactgatgaatgccagagtggccaccttgcttatctgtggccccggccctggtgatcaccatggcagctgggaagggagccccgttgagcccatcggctgaaaacagatggcgacttagcgaacctgagctgggccggggctgcaagccagtgctgctcgagaagacgaaccgcctgggccctgaggctgctgtgggcagggcgggccgggatgtgggcagtgcggagctggcactgttggtagccccaggcaagccccgacctggcaagccgctgcccccgaagacacgtggagagcagaggcagagcgccttcacggagctgccgaggatgaaggaccggcaggtggatgctcaggcccaggagagggagcacgatgaccccacaggccaacctggtgccccacagctgacccagaacatccccagaggcccagctggcagcaaagtcttctctgtgtggcccagcggagcacgaagtgagcaaagaagcgcctttagcaaaccaaccaagcgaccagcagagaggcctgagctaacctcagtcttccctgcaggggaatctgcagatgccctgggggagctgtctggactcctcaacactacagacctcgcttgttggggtcgactttcaactcccaagcttttggttggtgatttgtggaacttgcaagcattgccacagaatgctccactctgtagcacttttctgggtgcccctacactgtggctggagcatacccaggcccaggtgcccccaccctcatcatcctccaccacttcgtgggccctcctgccacccaccctcacctccctgggcttgtccacccagaactggtgtgcaaagtgcaacctgtcctttcgcctaacgtccgacctggtctttcacatgcgatcccaccacaaaaaggagcatgcggggcctgacccacattctcagaagcggagagaagaggcccttgcctgccctgtgtgccaggagcacttccgggagcgccaccacctctcccggcacatgacttctcacagctagcaggtgaccgcagaatgacctgctgggtgcagcagccagcctttggcagaggggggctccctgggcctgcgttgagggggctgtcatggtcctttgcagagctgctgcttttggcattcatagataaacagctcaggcataatttgaaaaagccacacctgcatgatgtgttttgaaggaaatgaagtcctgaaataaagtgatgggctttgcaaatccagggtagaggccctaacaggcacagagagcaggggcaactcctggcacacatcatgggctttggaggcacacaagcctggattcgaatctgggctctttcacatactagctgtgaccctggacaaagagctttaacctgctgagtccccattttctcatctgtgaaatggagatgataacactgtgtcttaggttggcattcaggtcacatgaaaggtgtgtggaaagtggccagcattctgcctgcagaccctgagcactgagtcaacaaggtttgtgatgatgtctgtactagttagctattgttattaacaagatctccatggcagacaagctaaagcatctgcctaagtcgtgagtctgtgggttggctcaggttaagctgagcttggctgggcttggcagcaagtctcagatttgatcaagtcatattcgttttcttcttcggctggtgggctacccagagcgagcacgcttctctcgtggtcatgccaagaacacaggagggtgagtctaacaagcacacctcaagcctctgcttgggtcacattgccaatgtcctctcagcccatacaagtggcaggaccaggcccaatattaaggagtggaaaagtgtaggctgcccttggtgaagctgtgacaagggagtgaccatccatcccctccacaggagggtgaggaattgggacaggtaattccagccaatacctggtccatagttcttcacattgtgagtatatgaatacggggaaatagaaccccctccccaccacctacacacatgctgttttaccttccaagaataggacatgtgcaaaaactaggcttccagatcgtgaggctggggagcattctaggtaccatttattatctactgcgtttcggtcagtagctgttgtaggtacccgcatcagcccttgttcctaaggatgtgtggagcccaggctgtactctttgacattccacaggtcagtctgcgtgaaagccctttgtggggagtttccaagccagtgtcgtttttgcactggtttccacctcactgtcagatattgttcttttgatatgcagtttccagccctccaatgagtccccagcacagatctcaggcttgtggctgggaataagcccagctgagcaggtggggatctcagccagcctcccagactgcacctcttctattgctctcctctgtccaccgttccaggcagcagcactcccacctggctgctctgatgtcctcgctccctccattcctgcctctcaccatgcacgcatccattgtccacacacacacaaccagataatcttctgaaagtgtaactcagatgatgcctccaaccctgtggctgcccttcacacttacaggcctaaccccagcaggacctgccagctgcttcatgaacaagtccctgcctcatgttaattgcaagcactcatttcactctccctgtgtgccaggcaatagcataagcactggaagaatacagatgttatagtgagtcctacaatagccctggaaggcaagagctgtttcctttccatttctacaatgagtcaattgcagatgatgctataacacttccagtgtttctgacacttccctgaagctatacctgctaccttcatgggccgagcttgcccttatgaggcccacaggtggcagtgggcagaggggaccccgctataccacctcgctgctgttccactgtctgctcccgtgttctgaccacagctctggtgccgtttctcaagcctgggcttcattcaacattttctatctagctcttcatggtgctgctcctgctatggttccacagggcttcttctcgcaggtcagctccttagagaggtctcccagattccccgtaaagcagccctgcagcctctgcctctctcagccgcatcaccctgttgcttccttcacagcatgtctcaccatctgcaaccatctttctgtttgtcgtcttgttgatttgctgcctccacactgtcagctccttgggaacagagattggtttgtttactgtgcatccctggtgcccagaacagggcatggcatattgttggtgcataataaatattgtggaaataaacaagcacactaggaacagaagccagacaacaaaa

SEQ ID NO: 460821 - DNA, 5176 bp, Homo sapiens
gtgtttgacaccatattaatctcaggtccctcttctgcagttctgctgcagtttgctgtggttcccctccagaccccgtttgcctgggtatcaccagcagaggctgcagaacagcgaagattgctgcctgctccttcctctggaagcttcatcccagaggggcacccgccacatgccagccagagctctccagtatgaggtgtctgtcaacccctgctaggagcccctgactggggctgcagcctttctttcagagatgtcttgcccagagaggaggaatctagagaggcagtctggctaccgtggctttgcggtgctgtgatgggctccacccagtttgagcttcctggaggctttttttactctgtgaggggaaaaccgcctactcaagcctcaataatggtggacaccccttcccacaccaagctcaagtgtcccaggttgacttcagtctgctgtgctggcagcaagaatttcaagccagtggatgttagcctgctgggctccatgggggagacacaatgtaattgtaaacatccatctagacactgggaaaattttccctctgggaaagaacttaaattgtttctctttgtctttgttgcagaacccatcttttacttcggtgatgtggaatactctgtggatgagagtgctggctatgtggaagtgcaggtgtggagaacgggcactgacctgtccaagtcttctagtgtcacagtgaggtctcggaaaacagatcctccctctgcagatgctggaacagactatgtgggcatcagccgtaatttagattttgcacctggagtcaacatgcagcctgttcgtgttgtcattctggatgaccttggacaaccagcgctggagggaattgagaaatttgaactggtgcttcgcatgcctatgaacgcagcccttggcgagcccagcaaagccacagtgtccataaatgactctgtctccgatttgcctaagatgcaattcaaagaacgaatatatactggcagcgaaagtgatgggcagatagttacaatgatccataggactggggatgtccagtacagatcttcagtgagatgctacacccggcaggggtctgcacaggtgatgatggactttgaagaacgcccaaacactgatacctccatcatcacattcctccctggtgagacagaaaagccctgcattcttgagctgatggacgatgtgctctatgaggaggtagaggagctccgcctggtactcggcactccacaaagcaactctccctttggggctgcagttggtgaacaaaatgaaactctcataaggatccgagatgatgctgataagactgttattaaatttggagaaaccaaatttagtgtcactgaacccaaagaacctggagagtcggtggttataagaattccagtgattcgccaaggagacacttcaaaggtttccattgtgagagtccacaccaaggatggctcggccacctctggagaagactaccaccctgtgtcagaagaaattgagtttaaggaaggggaaacccagcacgtggttgaaatcgaagttacctttgacggggtgagagagatgagagaggccttcactgttcacctaaaacctgatgaaaatatgatagcagagatgcagttgacgaaagccattgtgtacatagaagaaatgagcagcatggcagatgtcacttttccttctgtccctcaaattgtatccctgttgatgtatgacgacacttccaaagctaaggagagtgctgaacccatgtctggctatcctgtcatctgtatcacagcttgcaaccccaaatattcagactacgataaaacaggctctatctgtgcaagtgagaacatcaatgacactttgacgcggtaccggtggctgattagtgcacctgcgggccctgacggtgtgaccagccctatgagagaagtggacttcgacaccttttttacgtcatccaagatggtcacactggactccatatactttcagcctggctcccgggtacagtgcgcagctcgtgctgtgaacaccaatggggatgaaggcctggagctcatgagccctattgtaaccatcagcagagaagaaggtctttgtcagccccgtgtacctggggttgttggagcagagccgttctcagctaaattgcgctacacaggccctgaggatgcagactacacaaaccttatcaagctcactgtcacaatgccacacatagatggcatgctccccgtgatctccactagagagctttccaactttgagctcaccctcagccctgatggcacaagagttggaaaccacaagtgctccaacctcctggattatactgaagtgaagactcattatggtttcttgactgatgctaccaaaaatccagaaataattggagagacatatccttaccagtacagcttgtccatcagaggttccactaccttgcgcttctaccggaacctgaacctagaggcctgtttatgggagttcgttagctactatgacatgtcagaactccttgctgactgtggtggcaccattggaacagatggacaggtcctaaacctagtgcagtcctatgtgacccttcgagtccctctgtatgtttcctacgtgttccattcccccgtgggggtaggaggctggcagcattttgacttgaagtcagagcttcgtctaacttttgtgtacgacaccgccatcttgtggaatgatggaattggcagccccccagaggctgaacttcaaggttctctctatccaaccagcatgcgcatcggtgatgaggggcgcttggccgtgcacttcaagacagaggctcagttccatggcttatttgtgctgtcacatcccgcatcctttacaagctcagtgatcatgtcagctgatcatccaggcctgacattttccctccgcctcataaggagtgaaccaacctataaccagccagtacagcagtggagctttgtctctgactttgccgtacgtgactactcagggacctatactgtgaagctggtgccatgcactgccccatcacatcaggaataccgcctgccagtcacctgcaaccccagagaacctgtcacctttgaccttgacatccgattccaacaggtcagtgatccagtggctgctgagtttagcttgaacacccaaatgtacctgctctctaagaagagtctctggttgtctgatggatccatgggattcgggcaagagagtgatgttgcttttgcagaaggtgatataatttatggtcgtgtcatggtggatcctgtccagaatctgggtgactccttttactgcagcattgagaaggtgtttctatgcactggagctgatggctatgttcccaagtatagtccaatgaatgcagaatatggctgcttagccgactctccttcactcttatatagatttaaaattgtggacaaagctcagccagagacacaagcgaccagttttggaaatgtcctatttaatgccaaactagcagtggatgaccctgaagccattctcttagtgaatcagcctggatctgatggatttaaagtcgactcaacaccactctttcagaaaccaagatacaaattcctgactcagggatcaaaggtggagggaaacacaggcagctgccacaacactgagcaaatgccacaaatttcaagaggtgcttacactgcaaatctctgccgaagcaaatcgaaagacaatgccaatcgaggtattggcaaaagaagtgtggagtaccattctctggtgagtcaaggaaagccccaatccaccaccaagagccggaagaagagagagatcaggagcacaccctcactggcatgggagattggtgctgaaaacagtcgaggaacaaacatccagcacattgccctggaccgcaccaagaggcagatcccccatgggagagcacctccagatggcatcctcccctgggagctcaacagccccagctctgcagtcagcctggtcactgtggtgggaggcaccacggtagggttactcaccatctgcctcactgtcattgcagtgctgatgtgcaggggcaaggaaagtttcagggggaaggatgccccgaaaggctccagcagcagtgagcccatggtgcccccacagagccatcacaatgacagctcagaagtttgatgactgcaggtagaattcaaccttttccatgctggctagaatcccctttgacttctagccataagctggccacattggacatcttggtcactgcagaattttaaaaggcaaacttctcagaacagatgtgcacatcttaatttggtgtctggtctagttttatcatacatttactaagttactacatattggtggatattgacgtttattcctgggaatctaattttgcaaacaatttggagccattcagtcataaattcatgtcaacaataagtcttgctgccgcttgtgtttcataactacgcttgctttccttcaaaatataccaagtgtgtaatataaataaagcccatatcaatataaatgttcaaatggccaagttattctggtgcattctgtaacttaattttttatgctaaaatcacagattcccataggctacaatgaatgtcagttattttctttctggttctggagccttaaacttagttctctggactgggacctgtgcttccactgccactcatactgatggtaaaactttgcctctccccagtagaatccacctgcagggtcctggcatctgcccactagttataaagagtgtagccagaggctcatcagaggcaaatgtgtattttaaggaaacaacatatttggactaactaattctttgtcccaggaagcagtgtgactagactttgctatagttaggaactcctgcccagtgcactgatgaggatgaattaactaatctggtctttactgccaatgtagtctggtcacctcagttaatgatcaattgatttgttataaggtcagatttttaacatgaggccaccactgtttaataccaaaaggaaatgcaaagacatcttgtttaagacattgaagaatatcccaagaaaaggacaaaatacaaaaaagaaggtgaagtggaagaaaaataattgctatgtcaaagatcttctagcactttcaagactggggagagaaaaac

SEQ ID NO: 460822 - DNA, 2986 bp, Homo sapiens
aacggggggccgttaacgctcggggatgacaggtgccacaggtagactggcatgctccccgtgatctccactagagagctttccaactttgagctcaccctcagccctgatggcacaagagttggaaaccacaagtgctccaacctcctggattatactgaagtgaagactcattatggtttcttgactgatgctaccaaaaatccagaaataattggagagacatatccttaccagtacagcttgtccatcagaggttccactaccttgcgcttctaccggaacctgaacctagaggcctgtttatgggagttcgttagctactatgacatgtcagaactccttgctgactgtggtggcaccattggaacagatggacaggtcctaaacctagtgcagtcctatgtgacccttcgagtccctctgtatgtttcctacgtgttccattcccccgtgggggtaggaggctggcagcattttgacttgaagtcagagcttcgtctaacttttgtgtacgacaccgccatcttgtggaatgatggaattggcagccccccagaggctgaacttcaaggttctctctatccaaccagcatgcgcatcggtgatgaggggcgcttggccgtgcacttcaagacagaggctcagttccatggcttatttgtgctgtcacatcccgcatcctttacaagctcagtgatcatgtcagctgatcatccaggcctgacattttccctccgcctcataaggagtgaaccaacctataaccagccagtacagcagtggagctttgtctctgactttgccgtacgtgactactcagggacctatactgtgaagctggtgccatgcactgccccatcacatcaggaataccgcctgccagtcacctgcaaccccagagaacctgtcacctttgaccttgacatccgattccaacaggtcagtgatccagtggctgctgagtttagcttgaacacccaaatgtacctgctctctaagaagagtctctggttgtctgatggatccatgggattcgggcaagagagtgatgttgcttttgcagaaggtgatataatttatggtcgtgtcatggtggatcctgtccagaatctgggtgactccttttactgcagcattgagaaggtgtttctatgcactggagctgatggctatgttcccaagtatagtccaatgaatgcagaatatggctgcttagccgactctccttcactcttatatagatttaaaattgtggacaaagctcagccagagacacaagcgaccagttttggaaatgtcctatttaatgccaaactagcagtggatgaccctgaagccattctcttagtgaatcagcctggatctgatggatttaaagtcgactcaacaccactctttcagaaaccaagatacaaattcctgactcagggatcaaaggtggagggaaacacaggcagctgccacaacactgagcaaatgccacaaatttcaagaggtgcttacactgcaaatctctgccgaagcaaatcgaaagacaatgccaatcgaggtattggcaaaagaagtgtggagtaccattctctggtgagtcaaggaaagccccaatccaccaccaagagccggaagaagagagagatcaggagcacaccctcactggcatgggagattggtgctgaaaacagtcgaggaacaaacatccagcacattgccctggaccgcaccaagaggcagatcccccatgggagagcacctccagatggcatcctcccctgggagctcaacagccccagctctgcagtcagcctggtcactgtggtgggaggcaccacggtagggttactcaccatctgcctcactgtcattgcagtgctgatgtgcaggggcaaggaaagtttcagggggaaggatgccccgaaaggctccagcagcagtgagcccatggtgcccccacagagccatcacaatgacagctcagaagtttgatgactgcaggtagaattcaaccttttccatgctggctagaatcccctttgacttctagccataagctggccacattggacatcttggtcactgcagaattttaaaaggcaaacttctcagaacagatgtgcacatcttaatttggtgtctggtctagttttatcatacatttactaagttactacatattggtggatattgacgtttattcctgggaatctaattttgcaaacaatttggagccattcagtcataaattcatgtcaacaataagtcttgctgccgcttgtgtttcataactacgcttgctttccttcaaaatataccaagtgtgtaatataaataaagcccatatcaatataaatgttcaaatggccaagttattctggtgcattctgtaacttaattttttatgctaaaatcacagattcccataggctacaatgaatgtcagttattttctttctggttctggagccttaaacttagttctctggactgggacctgtgcttccactgccactcatactgatggtaaaactttgcctctccccagtagaatccacctgcagggtcctggcatctgcccactagttataaagagtgtagccagaggctcatcagaggcaaatgtgtattttaaggaaacaacatatttggactaactaattctttgtcccaggaagcagtgtgactagactttgctatagttaggaactcctgcccagtgcactgatgaggatgaattaactaatctggtctttactgccaatgtagtctggtcacctcagttaatgatcaattgatttgttataaggtcagatttttaacatgaggccaccactgtttaataccaaaaggaaatgcaaagacatcttgtttaagacattgaagaatatcccaagaaaaggacaaaatacaaaaaagaaggtgaagtggaagaaaaataattgctatgtcaaagatcttctagcactttcaagactggggagagaaaaac

SEQ ID NO: 460823 - DNA, 1881 bp, Homo sapiens
gccggcaaggcagtgattaagtgtgatgacaactaccaatttagtgaagggccatctgctgccaccaagccagggcactgggcctagagagctacatgtgggtcgtaatgagccatctggctgcctggcagaaggcatccatgggcaggtgtctgagacgctactgacattaccactgacctttgccaagaagcaggtttggttttatccagaatggcccagcgtggtgagccacgattcaattcacatagtcatctctagaggcaaagctctggtaaagggcttgatgactggtcactgtcgtcacgaacttgacctttcctgcagcactgcctggtactttcccagtacagtgttctgccctgacacagccaaggccaagggcagtgcaggcacagccaccgtgactctctgctgggaggttaacagctccatcagttcagggactgcctgacccagcctgaccaaattagagcaagtaatgggtgtgacataatttgacatgtacattgttaattgaacccaatgggagatgattttaaatagaggcgaataccacgctgtgaactatttgggttatgaagctcttattctcttatccttgcaggagaaagaattgtgccatgaaaaatggaaaactcctgagaagctgttccagcgtcaggagagcagcagacaagctggactggggaagattcttcctgcaagacctgcagagtgtatgacacataaccagcacccaagaaatgtctaccgaggaattaatgaatgagggtcccatacttcctagccatgctgttggcagggattaacatcattgcaattctctgggtagaccttgggaggtttaaaccaaccagtgacccctatcatcctagctccagagattggcttagggatagtcacccaatgcaggccaatgcaaggtgactttgccaggggcttctgggaaagaagtttcctttctctgaggaaatgtgaatgaggacatccataactcaggttgtgtctggcagccatcttgtgatcatctggcaagacagcccaagaataaagccgtcaccatggagactaagaagagacagaaagacactgggtcttcattgtctcgtccagctgttcatgaggccttatctgaagcccacgtgacctccggactactcacttacatgagagaataaagctcttttttgtttagaccaaataaatacataatacaattacataatcccttgattcctttttatgactgagctcagagactatattttgtcattttaaatcacctttgtcttacagtttatttaactgaaacaaataaacaaaccaaaacacgccagtttttcactcctctgtcaaagcctttccaagatcactaagcttgtgatgtcctgggtgaatgaagaagtaacagtgttttcaacaacatagaagcttatttctctctcatataaaagaaggctggagtctggctggtatgggagatacagcatcatcaaagttttatcttttcgtcctgccatccttagaatatggctttcatcttcaagatcacttcctaagctatgaggatgcaaaggtataagaatgacatagcggactttggggactcggtgtggggagaagttgggaggggtgagggataagagactacatattgggtacagtgtacactgctctaaaatctcagaaatcaccaccaaagaacctatccgtggaatcaaaaaccacctatacccccaaaaccactgaaataaaactaaaaattaattaaaaaaaaaaacaacataacttcatggtccaatgtgacagctagagcgccaatcatcatgttaaacttcctgttccagaaaggcatggaaggaagggagaaggagaaaa

SEQ ID NO: 460824 - DNA, 1463 bp, Homo sapiens
  misc_feature (88)..(88): n is a, c, g, or t
  misc_feature (173)..(173): n is a, c, g, or t
tgcgcgagcccaggtacgtagagtgatagatggtacatagctcgcgttgcattactgcatgactcgcgtgagtgctttaacatgacgncgcattcgagattccatcggacccagtcatgaaacacgaccccgtggggcaaaatcgaagaggctaacgtagaacaaaaatctgnagatgagtgaatacatagggggatcaattcactggagaacatatctaaccaggcagtccgagaacagaccgtcggaacatcgacatagttactggccgcaagcatgcttcctgcaagacctgcagagtgtatgacacataaccagcacccaagaaatgtctaccgaggaattaatgaatgagggtcccatacttcctagccatgctgttggcagggattaacatcattgcaattctctgggtagaccttgggaggtttaaaccaaccagtgacccctatcatcctagctccagagattggcttagggatagtcacccaatgcaggccaatgcaaggtgactttgccaggggcttctgggaaagaagtttcctttctctgaggaaatgtgaatgaggacatccataactcaggttgtgtctggcagccatcttgtgatcatctggcaagacagcccaagaataaagccgtcaccatggagactaagaagagacagaaagacactgggtcttcattgtctcgtccagctgttcatgaggccttatctgaagcccacgtgacctccggactactcacttacatgagagaataaagctcttttttgtttagaccaaataaatacataatacaattacataatcccttgattcctttttatgactgagctcagagactatattttgtcattttaaatcacctttgtcttacagtttatttaactgaaacaaataaacaaaccaaaacacgccagtttttcactcctctgtcaaagcctttccaagatcactaagcttgtgatgtcctgggtgaatgaagaagtaacagtgttttcaacaacatagaagcttatttctctctcatataaaagaaggctggagtctggctggtatgggagatacagcatcatcaaagttttatcttttcgtcctgccatccttagaatatggctttcatcttcaagatcacttcctaagctatgaggatgcaaaggtataagaatgacatagcggactttggggactcggtgtggggagaagttgggaggggtgagggataagagactacatattgggtacagtgtacactgctctaaaatctcagaaatcaccaccaaagaacctatccgtggaatcaaaaaccacctatacccccaaaaccactgaaataaaactaaaaattaattaaaaaaaaaaacaacataacttcatggtccaatgtgacagctagagcgccaatcatcatgttaaacttcctgttccagaaaggcatggaaggaagggagaaggagaaaa

SEQ ID NO: 460825 - DNA, 1160 bp, Homo sapiens
gccggcaaggcagtgattaagtgtgatgacaactaccaatttagtgaagggccatctgctgccaccaagccagggcactgggcctagagagctacatgtgggtcgtaatgagccatctggctgcctggcagaaggcatccatgggcaggtgtctgagacgctactgacattaccactgacctttgccaagaagcaggtttggttttatccagaatggcccagcgtggtgagccacgattcaattcacatagtcatctctagaggcaaagctctggtaaagggcttgatgactggtcactgtcgtcacgaacttgacctttcctgcagcactgcctggtactttcccagtacagtgttctgccctgacacagccaaggccaagggcagtgcaggcacagccaccgtgactctctgctgggaggttaacagctccatcagttcagggactgcctgacccagcctgaccaaattagagcaagtaatgggtgtgacataatttgacatgtacattgttaattgaacccaatgggagatgattttaaatagaggcgaataccacgctgtgaactatttgggttatgaagctcttattctcttatccttgcaggagaaagaattgtgccatgaaaaatggaaaactcctgagaagctgttccagcgtcaggagagcagcagacaagctggactggggaagattcttcctgcaagacctgcagagtgtatgacacataaccagcacccaagaaatgtctaccgaggaattaatgaatgagccatcttgtgatcatctggcaagacagcccaagaataaagccgtcaccatggagactaagaagagacagaaagacactgggtcttcattgtctcgtccagctgttcatgaggccttatctgaagcccacgtgacctccggactactcacttacatgagagaataaagctcttttttgtttagaccaaataaatacataatacaaaaaaaaaaaaaaaaaaattttgtgggggcttgggcccgggaaaagtttcaacacttgtggggggggggcccaggttatggaactggcaaggggtcccaggaaacgggtcgaatggggggtttcacaaaaaaggcggggaacgggttggaaaccaggggttggggttgggttaaagggccggca

SEQ ID NO: 460826 - DNA, 1069 bp, Homo sapiens
tgaacccgcagagagggcctgggagcacaatgctgagcgagaaagaattgtgccatgaaaaatggaaaactcctgagaagctgttccagcgtcaggagagcagcagacaagctggactggggaagattcttcctgcaagacctgcagagtgtatgacacataaccagcacccaagaaatgtctaccgaggaattaatgaatgagccatcttgtgatcatctggcaagacagcccaagaataaagccgtcaccatggagactaagaagagacagaaagacactgggtcttcattgtctcgtccagctgttcatgaggccttatctgaagcccacgtgacctccggactactcacttacatgagagaataaagctcttttttgtttagaccaaataaatacataatacaattacataatcccttgattcctttttatgactgagctcagagactatattttgtcattttaaatcacctttgtcttacagtttatttaactgaaacaaataaacaaaccaaaacacgccagtttttcactcctctgtcaaagcctttccaagatcactaagcttgtgatgtcctgggtgaatgaagaagtaacagtgttttcaacaacatagaagcttatttctctctcatataaaagaaggctggagtctggctggtatgggagatacagcatcatcaaagttttatcttttcgtcctgccatccttagaatatggctttcatcttcaagatcacttcctaagctatgaggatgcaaaggtataagaatgacatagcggactttggggactcggtgtggggagaagttgggaggggtgagggataagagactacatattgggtacagtgtacactgctctaaaatctcagaaatcaccaccaaagaacctatccgtggaatcaaaaaccacctatacccccaaaaccactgaaataaaactaaaaattaattaaaaaaaaaaacaacataacttcatggtccaatgtgacagctagagcgccaatcatcatgttaaacttcctgttccagaaaggcatggaaggaagggagaaggagaaaa

SEQ ID NO: 460827 - DNA, 1638 bp, Homo sapiens
gccggcaaggcagtgattaagtgtgatgacaactaccaatttagtgaagggccatctgctgccaccaagccagggcactgggcctagagagctacatgtgggtcgtaatgagccatctggctgcctggcagaaggcatccatgggcaggtgtctgagacgctactgacattaccactgacctttgccaagaagcaggtttggttttatccagaatggcccagcgtggtgagccacgattcaattcacatagtcatctctagaggcaaagctctggtaaagggcttgatgactggtcactgtcgtcacgaacttgacctttcctgcagcactgcctggtactttcccagtacagtgttctgccctgacacagccaaggccaagggcagtgcaggcacagccaccgtgactctctgctgggaggttaacagctccatcagttcagggactgcctgacccagcctgaccaaattagagcaagtaatgggtgtgacataatttgacatgtacattgttaattgaacccaatgggagatgattttaaatagaggcgaataccacgctgtgaactatttgggttatgaagctcttattctcttatccttgcaggagaaagaattgtgccatgaaaaatggaaaactcctgagaagctgttccagcgtcaggagagcagcagacaagctggactggggaagattcttcctgcaagacctgcagagtgtatgacacataaccagcacccaagaaatgtctaccgaggaattaatgaatgagccatcttgtgatcatctggcaagacagcccaagaataaagccgtcaccatggagactaagaagagacagaaagacactgggtcttcattgtctcgtccagctgttcatgaggccttatctgaagcccacgtgacctccggactactcacttacatgagagaataaagctcttttttgtttagaccaaataaatacataatacaattacataatcccttgattcctttttatgactgagctcagagactatattttgtcattttaaatcacctttgtcttacagtttatttaactgaaacaaataaacaaaccaaaacacgccagtttttcactcctctgtcaaagcctttccaagatcactaagcttgtgatgtcctgggtgaatgaagaagtaacagtgttttcaacaacatagaagcttatttctctctcatataaaagaaggctggagtctggctggtatgggagatacagcatcatcaaagttttatcttttcgtcctgccatccttagaatatggctttcatcttcaagatcacttcctaagctatgaggatgcaaaggtataagaatgacatagcggactttggggactcggtgtggggagaagttgggaggggtgagggataagagactacatattgggtacagtgtacactgctctaaaatctcagaaatcaccaccaaagaacctatccgtggaatcaaaaaccacctatacccccaaaaccactgaaataaaactaaaaattaattaaaaaaaaaaacaacataacttcatggtccaatgtgacagctagagcgccaatcatcatgttaaacttcctgttccagaaaggcatggaaggaagggagaaggagaaaa

SEQ ID NO: 460828 - DNA, 1535 bp, Homo sapiens
gccggcaaggcagtgattaagtgtgatgacaactaccaatttagtgaagggccatctgctgccaccaagccagggcactgggcctagagagctacatgtgggtcgtaatgagccatctggctgcctggcagaaggcatccatgggcaggtgtctgagacgctactgacattaccactgacctttgccaagaagcaggtttggttttatccagaatggcccagcgtggtgagccacgattcaattcacatagtcatctctagaggcaaagctctggtaaagggcttgatgactggtcactgtcgtcacgaacttgacctttcctgcagcactgcctggtactttcccagtacagtgttctgccctgacacagccaaggccaagggcagtgcaggcacagccaccgtgactctctgctgggaggttaacagctccatcagttcagggactgcctgacccagcctgaccaaattagagcaagtaatgggtgtgacataatttgacatgagaaagaattgtgccatgaaaaatggaaaactcctgagaagctgttccagcgtcaggagagcagcagacaagctggactggggaagattcttcctgcaagacctgcagagtgtatgacacataaccagcacccaagaaatgtctaccgaggaattaatgaatgagccatcttgtgatcatctggcaagacagcccaagaataaagccgtcaccatggagactaagaagagacagaaagacactgggtcttcattgtctcgtccagctgttcatgaggccttatctgaagcccacgtgacctccggactactcacttacatgagagaataaagctcttttttgtttagaccaaataaatacataatacaattacataatcccttgattcctttttatgactgagctcagagactatattttgtcattttaaatcacctttgtcttacagtttatttaactgaaacaaataaacaaaccaaaacacgccagtttttcactcctctgtcaaagcctttccaagatcactaagcttgtgatgtcctgggtgaatgaagaagtaacagtgttttcaacaacatagaagcttatttctctctcatataaaagaaggctggagtctggctggtatgggagatacagcatcatcaaagttttatcttttcgtcctgccatccttagaatatggctttcatcttcaagatcacttcctaagctatgaggatgcaaaggtataagaatgacatagcggactttggggactcggtgtggggagaagttgggaggggtgagggataagagactacatattgggtacagtgtacactgctctaaaatctcagaaatcaccaccaaagaacctatccgtggaatcaaaaaccacctatacccccaaaaccactgaaataaaactaaaaattaattaaaaaaaaaaacaacataacttcatggtccaatgtgacagctagagcgccaatcatcatgttaaacttcctgttccagaaaggcatggaaggaagggagaaggagaaaa

SEQ ID NO: 460829 - DNA, 3687 bp, Homo sapiens
agcaagcagcccagtccctgcccttgccaatcaccccagggtgactttgggcaggtgactcctggggctccctgctccataatcagccctcacctcctgccaccccaagcccaacctccctgggctctttgggcttgcgtctcccaggacctgggtcccccagccccaggccctgccctcaccagtcatccctgggtggctttgggctggtgactcccggggctccctactgcagactctgccctcccctcctgctgccccaagctcgacctccctaggcttcttgggctggcgtctctgaggacctgggtcgaaaccgtgtgtttccctcccccatcgtggagcagcgactcgggcatcgcgctgatgtggtcccctcccctgggaggagtggaatgcaatgatgtcacagcgcccctaggaactgttcgcacatctaaggaggagaagaagcatgagatacatctggtacagaagcttgggaggagcttgttcaaactcaaaaaccagacggctgaacccctggccccacagcccccagcagggccatctaaggtggagcagctacaagatgagaccaaccacctaaggaaggagctagagagtgtgggaagacagctccaggctgaggtggaaaacaatcagatgttgagtctcctgaacaggagacaggaggagaggctacgtgaacaggaggagaggctacgtgaacaggaggagaggctgtgtgaacaggaggagaggctgtgtgaacaggaggagaggctacgtgaacaggaggagaggctgtgtgaacaggagaagctgccagggcaggagaggctgctggaagaggtggagaagctgttaaaacaggagaggcggcaggaggagcaggagaggctgctggagagggagaggctgctggacgaggtggaggagctcctggagcaggagaggcttcggcaacaggatgagaggctgtggcagcaggagactctgcgggagctggagaggttgcgggagctggagaggatgctggagctggggtgggaagccctgtacgagcagcgggccgagccacgcagcggcttcgaggagctgaacaacgagaacaagagcacactgcagttggagcagcaagtaaaggagctggagaagtcgggtggagctgaagagccaagaggctccgagtctgcagcagcagccagaccagtacctggagccccagtcccacaaggagcttggatgtgcggacaagcagggtggactccccaggagcacccaggcttgagtggagaagctgttggtacaggagaggcggcaggaggagcaggagaggctgcatgccattcttttcgggctgccgagaacagggagctaaacatcaccatcatctaagagcgggtcaagaaattgaaaaaaaaaaacaaaacatttaaggggttaatatcctacacaattcatttacttcatttgaatgttagagccacttatgtttgtgtttctaatttatagtttaaatttatttgtgtttctaatttatagtttaaatttatttgtttctaatttatagtttaaatttatttgtgtttctaatttatagtttaaatttatttgtgtttctaatttataatttaaatttatttgtaaaaagttaaatgagagtgggtctttctctcatgttcactctggcatcttttagcatttttttaatttgataattataggacgttagcatgcatatcgagtttgcccttatgtggtgggagttcaaacacacaaagacccactgtatgcacacaactgttcttgctggtttgggataggctgccatgcttttttaatgttagtacagcctgtatattcattacggaattcagataaaatttccttatgttctgctgttatgtttgatcgaatcctaatcacagtgagctcttcattagctcaatatgtggtttgccctctggaaacagcctttccccctttttctgtgtattggggatgggagtaataacattttggggaggtttttaaatctcccagaagaggaaagtggcctgctttggcaggtgtgtgcaggatagaatatgtttcatttgttccggtgccaagaatgagcgctgtactacggtagttcccttaggatttgtatgtgctctaggctcatgaagatactgcctcatgagctgtggcagttgtactcttttttgatgacctgaaaagggattatttctgaggaatgaaaggctcccatcatgactgtggatgtggaaaaccttttctagctgagagcatttatatctacaatacattttaaagtcagagttcatgttccctgttttaatcacatgactacatgtcccagtacacaaaagggcactggttggcgttctccttaatgtatttagtaaagatcagaagaaatcctttaagagtttaaatgcccctggaacaggcatatacaggctctagtcaagaatgaattcgagtgaaggaaagctgtgtgacacctggcattcctctgtgttcatggagcttatttgaggctagaagatggattttaccatctagacctctctggctaatagctagtcttcaaccatctgacataggaatttacttcttttccttgaatggagaacactttaaaaataataacaaacattattataaactaatatatgtgagagtacttagttgaaacaaaaaggagttttagtagacagtattatactacatttgaaaatcaaggagcagtttatgcaacgtaaaacgtttacaaactgcagcacaatctactgttcgtgaatgtcaaagtgtcatgaggaaagtgtctatacaatcacagagttatatttcctcacaaagttctttacaaagagtgaaatatgtttttatacctctcagtttcagttagaggcatattttgtgtaatatttatggcttaaaatggactaaaggtcctgttcttgccttgtctgaacttgccgcttttgcattctttgagttcagtttaaagacagttactttaagcccattttaaaccctcaggctagaaatcgtaccactgttaattagccacattatttggtctaacagtttatcattctgaaactgagcttacctaatacattgataaattatttcaaaggtatttttatagttcaaatcgcttcacttttaccctgacacgtataaatgactaggaatgaccttcagatagcgtttagcaactgtaaccaatctgacaataatgtgttcatcaggtacctgtggattaaatcacatactggcatatttaagctgaatgtcagtctgaaaaataaatgtactatattaactcaaataccactctctgtgtaggtattttgtcatatgtttaagaaaaagctaaagagaatggaaatcctatgacaataactatgacaataactatgacaagtctttcttcaaagtgcatgcagtcttttgcagtacctcattcagccaagtatttgttctctacctcattcagtataaggcagcctttaatttgcttagaaggcaacattagaaggttagagttcagcaggaacatagaattttaaaatgtgacttcaactgaataaatttgaatttctgtagggagtaaagaatcaaaacacctatttaaagactgcaaaatatgataattatttttaaagtaattgattaaacctggta

SEQ ID NO: 460830 - DNA, 1826 bp, Homo sapiens
  misc_feature (1823)..(1823): n is a, c, g, or t
cccccacagctcagctgaggctgagccgccaagaacatttttcatggatatattaatcatttataagtgtaagctgtacctgctcttggccttatttttctggcaagaacatgttaacgaaacaccaggggcttggtcgtgtctggagtttgttccttctgatgttcagacgtgttcggagtttcttccttctggtggggttcgtggtcttgctggctcaggagtgaagttgcggaccttcgcgctagacataaaggttctccaagtccctaccagactcaggagcccagctggcttcacccagtggatcccccacagggctgcaggtggagctgcctgccagttcccggccgtgtgcccgcactcctcagcgcttgggtgtcgatgggactgggcccatggagtagggggcggcgctcgtctgggaggctcgggccacacaggagcccacggagcacagcagctgctggctgaggtgctaagcccctcactgcctgaggccagtggggccggccagctgctccgagtgcggggtccgccgagcccacgcccatccggaactcgcgctggcctgcaagcaccgcgcgcagccctggttcccgcccgcgcctctccctccacacctccctgtaagctgaaggagcccgctccggccttggccagcacagaaaggggctcccacagtgcagcctcgagctgaagggctcatcaagtgccgccaaagtgggagcccaggcaggggaggcgccgagagccagtgaggactgccagcaccgctgtcacctctcagaaatgctgggaagaatatgagagatccggaagggaacagaagacaaggaatgtgggcaccctctagaagttgcagaagccagagaaacagactctcccctggaatgttcagaaagtgtacaatcctgccaagacctcggtcatagctcagtgaaacccattttgaaattcggaccaccagaactctgttcccaagtgtcatttagacatgaaggaggcctacaataaaatagtatgctgaatgttctgaaatatgtttcttattgctgctctaacaaatcaccacaaacttagtggcttaaaactacaacactttagcatcttagatctctgggtgttagctgttcaaaaaatctgactggactcaaatcaaggtgttgcctggattgtgttcctttttaggatgcctaagcgggaatctgcttccttgccttttccagcttctaaaggctgcctacacaccctggctcctgtggccttcctccattttcaaagccaaaagacttgtaactctctgtgcttttttttatagtcatatcttcctctgacgctcccttctgcttacctctaccactttcaagggctcttgtgattttattgaggccaccctcaatgatccagaagaatctcctgatctcaggatctgtaacttagtcacgtctgaaaatttactttgctttgtgacatattcatgggttttgggaattaagacatgggcattgttgagggataattaagcctagctcaagagacatccgtctttcaaaatagaccttatactgtcttctggttaataagatagctctcttctctaatgaactttgtaaattaaaaatatgtaaatgacaggcatatataatttaaagaattataacaaaaggaaaacacctaccactcaggttaagaaacacaacattgtttcttatgcgacatttttaatccggtgttttcaagctcatataaccaaggataaacattaagggataatacagttttttagaaaatcatttacccctttgatccacaaactctantaa

SEQ ID NO: 460831 - DNA, 2238 bp, Homo sapiens
cggccctggagatgcaccatggttttagcagcagctgcagaactcgaatgttcctcacttggcaggtcctcagcgcccgacaagtcaggttccaactccacggtgggtcctcagagccaagcagcccagcagccatgccagccccagactctgccgccaaccctctggtccctggccccacatccagggctgtgttcttttagtgacacaaagtgccaatgtcaagactgctttccttcaaggataagcaaaaggctcttaactccctcccaaagtgttttctccttgtctctggggactcaccagggacaaggtaaaaataaacctcagtgtgcagataacggcacatccctgtttctcagtggactgaggctggctctttggcagatcaaacagaacttagggaagacctcagacccagaagcaccaccgagtgttgggatcccctccaggatcggaaactcagaaacgtgtaagtgccagaatccgcatttgggaatctgttatttctccctctgcgagtcaacctgatcaccctggaagcctcactgtctctcagcccttgttcccatttttctttccatgaacaccgcaatcagatacgagattccagtaatgatggttcttgaaaattaaacaaatcaaaaagaaagccagccaaggtatggagtgggggacctctaagttcccctggaggagacactggggccaggttccgaggtgcattcggagccagaatccctaatggaattgaacaattatcctgaagctgctctctgaaagccgcggttttcctaaaacactgtgcttggcgtgcctgggcttcttggcactggcccatgacccacagcagcaaatcgttcccaggaagctattgttatttgtgtatctgatagcattcagctgagtacactgacagcaacatttagaaaggaaaagaaaaaagaagcgtagagtgaaaaggacaaaaaggaggcttccaacatcctggtgggaacagaaaaccagcaaagcctcttttccagcccttatccttgtgagtttggactctgcagaactgtcatcccccaggcatagctgcagcttgtatgaagaaagtaacacacacagaagagaaggttataggattccatgctgcttggcaaaggcacaaaatatgtgcacatatttacatggaatatgagggtaaactagaaaattaagggtaatctaaaatagaaaaaaagaagaaaacaataagttaaaagtatgaaaagacatccagaatgagcaagttactgaggttgtgcctcaactttagcttgagtttcctggcagcaaaggtaaaaaggtgatcttacagctggaaaatcagtgggtgaaaacggagatacagcaactctgtcttggactacaccttaactgaagacgtctatgtaggtgacgaaaactcatggaaggacttgccacaattcaaacatgggcttttggggtttctgagaccaacagaaccaccatatactttgtgggtgtagggattctccctgcatgttgagcctgtcaccctaatgacaaccagctttgcattaactagagtcagccccaaaaatgcatctgttactccagagaaggacaaatccttattattactttataggattttctctactaggggcttccataaagtaaacatgctttcaggaaattaacagagtaattttaagccaaaatccatagcattaaaaacaaataaaccccaaatgatagcaatgtatttggggggaaaaaagcatgtaatcaactgcctgcataatttaaactaccaaagctttgaagctccttaacatcaccatcacctcccttttagacactgtcacccagtagaagaaattcacagccctgctgctctaatgagtatgtttcagtaaacacagaagaaatcattttcacagcccccatgcatttctcagcaagcactcaaatctttcaaacccattccagggggaagtttccatcccaatcttttccctcatatttcatctctaagagcacccctcccccatctgagatccacaagttacaaaaattactgtttcaggtttctcatcattatctgttaaaaaactaaaattacagatgagatagtattctacagtcccaggaactccaactgttcaggaaacgtgagtaacagaagtaacgcggtatacaatgaaaacaaacatcttcctgtctttggagcaactgagaagcaaacaa

SEQ ID NO: 460832 - DNA, 1116 bp, Homo sapiens
gtgcacatattttgtgcacatattccatgaaaatatgtgcacatatttacatggaatatgagggtaaactagaaaattaagggtaatctaaaatagaaaaaaagaagaaaacaataagttaaaagtatgaaaagacatccagaatgagcaagttactgaggttgtgcctcaactttagcttgagtttcctggcagcaaaggtaaaaaggtgatcttacagctggaaaatcagtgggtgaaaacggagatacagcaactctgtcttggactacaccttaactgaagacgtctatgtaggtgacgaaaactcatggaaggacttgccacaattcaaacatgggcttttggggtttctgagaccaacagaaccaccatatactttgtgggtgtagggattctccctgcatgttgagcctgtcaccctaatgacaaccagctttgcattaactagagtcagccccaaaaatgcatctgttactccagagaaggacaaatccttattattactttataggattttctctactaggggcttccataaagtaaacatgctttcaggaaattaacagagtaattttaagccaaaatccatagcattaaaaacaaataaaccccaaatgatagcaatgtatttggggggaaaaaagcatgtaatcaactgcctgcataatttaaactaccaaagctttgaagctccttaacatcaccatcacctcccttttagacactgtcacccagtagaagaaattcacagccctgctgctctaatgagtatgtttcagtaaacacagaagaaatcattttcacagcccccatgcatttctcagcaagcactcaaatctttcaaacccattccagggggaagtttccatcccaatcttttccctcatatttcatctctaagagcacccctcccccatctgagatccacaagttacaaaaattactgtttcaggtttctcatcattatctgttaaaaaactaaaattacagatgagatagtattctacagtcccaggaactccaactgttcaggaaacgtgagtaacagaagtaacgcggtatacaatgaaaacaaacatcttcctgtctttggagcaactgagaagcaaacaa

SEQ ID NO: 460833 - DNA, 990 bp, Homo sapiens
aataaaacatcgctgagtagtaagttataccaaccagaaaaagtcacttgaattcagttctgatcttctttataagatgctgcggatagctgatctaacaagagagcttcatgtgatgctatttgctttattaggtcttggactacaccttaactgaagacgtctatgtaggtgacgaaaactcatggaaggacttgccacaattcaaacatgggcttttggggtttctgagaccaacagaaccaccatatactttgtgggtgtagggattctccctgcatgttgagcctgtcaccctaatgacaaccagctttgcattaactagagtcagccccaaaaatgcatctgttactccagagaaggacaaatccttattattactttataggattttctctactaggggcttccataaagtaaacatgctttcaggaaattaacagagtaattttaagccaaaatccatagcattaaaaacaaataaaccccaaatgatagcaatgtatttggggggaaaaaagcatgtaatcaactgcctgcataatttaaactaccaaagctttgaagctccttaacatcaccatcacctcccttttagacactgtcacccagtagaagaaattcacagccctgctgctctaatgagtatgtttcagtaaacacagaagaaatcattttcacagcccccatgcatttctcagcaagcactcaaatctttcaaacccattccagggggaagtttccatcccaatcttttccctcatatttcatctctaagagcacccctcccccatctgagatccacaagttacaaaaattactgtttcaggtttctcatcattatctgttaaaaaactaaaattacagatgagatagtattctacagtcccaggaactccaactgttcaggaaacgtgagtaacagaagtaacgcggtatacaatgaaaacaaacatcttcctgtctttggagcaactgagaagcaaacaa

SEQ ID NO: 460834 - DNA, 542 bp, Homo sapiens
atgagcactggccttaataatacacagaacgttaataaggcacagagaaggagcagaatgtgtgtgaagaagattttagacaaagtcctaaaaacggaaagtaaaaaatcaagaagcccgatgtggctcatcaggaagggggaatgtgcacatagatgaggtaaaaaatattcaggagttaaaattaagagataatctcccatctaaaatgaaattgatagatgctaaattcttcatgaatacatcgaaggatatcatgaaaaccatgtggagataaactacttatattatgtggattcattttgattactaattgagtagggagaaaaatgttaccttttccttcagcagcttagtctggttcctgttcaactcgtatttcatgttcaaggtaactatccctgagccaacaaagacaaaccatttgatctgtgcccaagggtgaataccaaaggaacttatactctctaatttcacctgaattgtttataagggaatgccatatttgtccctggttcctcctctttcactcatcccaatga

SEQ ID NO: 460835 - DNA, 2006 bp, Homo sapiens
  misc_feature (2)..(3): n is a, c, g, or t
  misc_feature (7)..(8): n is a, c, g, or t
  misc_feature (11)..(12): n is a, c, g, or t
gnnattnnttnngagccaaatatgagtgaccatggcccatcacacagccctcagggggtcctgagaacatgtgcccaaggtgaaaggcgggacaattcaaagcgggggcttccaggttaccgaaagaaagtaagaaagaaagaaagaaagaaagtaagaaagaaagaaagaaagaaagaaagaaagaaagagagagagagagagagagagagagaaagaaagaaagaaagaaagaaagaaagaaagaaagagaaagagagagaaagagagaaagaggaaagaaaaaagaaagaaagagagaaagaaaagaaagaaagaaaagaaaaaagaaaaagagaaaggaagaaaaaagaaagaagaagaaagagagagaaagaaagaggaaagaaaggaaggaaggagaagaaagagaaagaaagaaggaaggaaagaaagaaagaaaaagaaagaagaaaggaaggaaagaagaaagaaaaagaaagaaagaaagaaaaagaatcatcaggggtgattaaagttcagattcttgggcaatgtcttaaacttactgattcacaattttcaaatttctggcagtggccctttaaaaatagcaccctacatatttcttaggcattctaaagtttactcagaatattgctgagtagttattttttaaaataatgtgttaatagatatgctcagagaattacaagcattgagaaaggacttgaaatgaatgtatttgttaattgtgttttcaaaggattttataggtatgagaaccacagttcaagtgcaaaaaaaagttatccacaggccacccgaatcctagttacactggagatgtttttccagtataaatttctagcccgtcaaatcagaatttctgaaggtggagctcaggaaattcattttaacaatatctccagatcatttgtatggactttaactgtggagactcagatgtcgagatgatttataaacgctcttgaaagtctaagattttataattttaagatcaatacctgtaaaaaaaaaaacatagtgtgaactaaggcattattaaagaacagcatacttcagacaacataacatgtcctaaatcatctttggcttagtcaccttcaatagtgtcttttcctgattgcacagtcaggccagaagtacattctcaggcaatttctgtttctccaatccattcagtttttcattagcaatattttgagccatattatttgtcaggcactattttagggactacagatattagtgaataagttgtccaaaatccttccatttatgaagttaactttcatgccaataaaaaagcaaaataatgaacttggtttagtatataataacatgatttcagagaataatataaagtaaataaaattgggtaagaagctagaatgtgacacaggtgaggtgtgagcatattcaagaatgttgaacagcttcaacttggatgcttcaggaaagctacttggtagaagtgacggatgagcagaaaagtaaaaggtgaagagaaggagcagaatgtgtgtgaagaagattttagacaaagtcctaaaaacggaaagtaaaaaatcaagaagcccgatgtggctcatcaggaagggggaatgtgcacatagatgaggtaaaaaatattcaggagttaaaattaagagataatctcccatctaaaatgaaattgatagatgctaaattcttcatgaatacatcgaaggatatcatgaaaaccatgtggagataaactacttatattatgtggattcattttgattactaattgagtagggagaaaaatgttaccttttccttcagcagcttagtctggttcctgttcaactcgtatttcatgttcaaggtaactatccctgagccaacaaagacaaaccatttgatctgtgcccaagggtgaataccaaaggaacttatactctctaatttcacctgaattgtttataagggaatgccatatttgtccctggttcctcctctttcactcatcccaatga

SEQ ID NO: 460836 - DNA, 2488 bp, Homo sapiens
gaggaactaagagaccagaatgttagaaggattgtacatgtggatattaaaatcatcaagaacagtcactaaagttatgttgaagaaacaaagccatcccaagaatccaaatgacaaacaccgtagcaaaaagtgcaaagatcccaaaccacgggtaaagaagttaaagtaccaccaatacattccaccagatcagaagggtgagaagaatgagccgcagatggactctaactacgcccgcctgctccagcagcagcagctgttcctgcaactgcagatcctgagtcagcagaagcagcactacaactaccagaccatcctgcctgcaccattcaagtacggcggggcccatgctatcctcaacgcgggagcttatcacacagtgtctgaagtccacatggtgagagtggcctgcattccattccagtttctgtcctccaaaataggttctgaatttttacaagttagaaatgccttttcacaattattcatccagatttgcctattattagaacaccaaaatagtactagatgctctgagaaaagcaaggctcgagaagggcctttccaggcacaggggaatgctgtgagcactagtacagaggaaggaatagataaaaagtggaagacaaaaatagagtacagccaatgtctaaggggacttgaagctgggcagaagaccttactcaacacagcagatagacaacggagtgcttcagagcaggctgctgacgcagtgaggccaaaatataagaaaaaacagctggatgctggtgttgaagggacgtctggagacaatgaagagctctggcagcagaattcaaatatcttgaggaagattaaacctattagtaattcagacctgattgtgaagtacttaaatctaaaacatcagggcatggagatgaagagagaaagaactttgtatccagttactattttaagagcaggcaggcccgagccactcaatgacaaaaatagtaacagtgggaattcagctttgaacaatgccacacctaacacaccaagacagaatacatctactcctgtatcagaactgaagacagaactgaagttaaggggtctgccagtgtcaggcaccaaaccggacctcattgagcgcctaaaaccctaccaggaagtgaacagcagcggccttgctgctgggggcatcgtggcagtgtcatcatcagccattgtcaccagtaacccagaagtcactgtggccttgccggttacaacactacacaacactgtgactagctcagtctctactctcaaggcagaattgccacctacaggaaccagcaacgcaacccgtgtggaaaatgttcattcccctctgcccatttcaccatctccctccgaacagtccagtctcagtactgatgacacaaacatggcagacactttcaccgagattatgaccatgatgtcgccttcacagttcttgagttcatctcctttgagaatgacaaataatgaagacagtctgagtcccaccagcagcactctgtcaaacctggaactggatgcagccgaaaaggatcgcaagcttcaggagaaagagaagcaaatcgaagagctgaagaggaaactggaacaagagcagaagctcgtggaagtgctgaaaatgcaacttgaggttgaaaaacgagggcagcagcagcggcccctggaagcccagcccagtgccccaggtcattctgtcaagtcagatcagaagcacggcagccttggctcctccatcaaagatgaggcctcactccctgactgctccagctccaggcagcccatcccagtagccagccacgctggacagccaccgcctgctgttgttgctcagccccaggctttactgaccacgcagactgctcagctgctgctcccagtgtccatccagggctcgagtgtcacctcagtgcaactccctgtaggcagcctcaaactccagacttcaccacaagcaggaatgcagactcagcctcagatagcaactgctgcacaaataccaactgctgccttggcctcaggcttggccccaactgtacctcagacacaagacacgttcccgcagcatgtgctcagtcagcctcaacaagtcagaaaggttttcacaaactcagcatcatcaaatacagttcttccatatcagagacatcctgccccagctgtccagcagccctttatcaataaggcctccaacagtgttcttcaatccagaaatgctccgcttccatccctgcaaaatggacctaacacacccaacaaggtaaccctgtgaggcttgtgcgtcagtgacagtgccgcaggggcatcaaatcattccaaagcctagtgctttgggcttggagtgactaatgttaatgggataaaattgttgaaaatacagtgataacttgtgaaggaggagctcagctattatcacagtgaagatgatcgttcgcacataaggtggccaccagtgctgtcagcctcacaggtgctt

SEQ ID NO: 460837 - DNA, 2879 bp, Homo sapiens
gaggaactaagagaccagaatgttagaaggattgtacatgtggatattaaaatcatcaagaacagtcactaaagttatgttgaagaaacaaagccatcccaagaatccaaatgacaaacaccgtagcaaaaagtgcaaagatcccaaaccacgggtaaagaagttaaagtaccaccaatacattccaccagatcagaagggtgagaagaatgagccgcagatggactctaactacgcccgcctgctccagcagcagcagctgttcctgcaactgcagatcctgagtcagcagaagcagcactacaactaccagaccatcctgcctgcaccattcaagtacggcggggcccatgctatcctcaacgcgggagcttatcacacagtgtctgaagtccacatggtgagagtggcctgcattccattccagtttctgtcctccaaaataggttctgaatttttacaagttagaaatgccttttcacaattattcatccagatttgcctattattagaacaccaaaatagtactagatgctctgagaaaagcaaggctcgagaagggcctttccaggcacaggggaatgctgtgagcactagtacagaggaaggaatagataaaaagtggaagacaaaaatagagtacagccaatgtctaaggggacttgaagctgggcagaagaccttactcaacacagcagatagacaacggagtgcttcagagcaggctgctgacgcagtgaggccaaaatataagaaaaaacagctggatgctggtgttgaagggacgtctggagacaatgaagagctctggcagcagaattcaaatatcttgaggaagattaaacctattagtaattcagacctgattgtgaagtacttaaatctaaaacatcagggcatggagatgaagagagaaagaactttgtatccagttactattttaagagcaggcaggcccgagccactcaatgacaaaaatagtaacagtgggaattcagctttgaacaatgccacacctaacacaccaagacagaatacatctactcctgtatcagaactgaagacagaactgaagttaaggggtctgccagtgtcaggcaccaaaccggacctcattgagcgcctaaaaccctaccaggaagtgaacagcagcggccttgctgctgggggcatcgtggcagtgtcatcatcagccattgtcaccagtaacccagaagtcactgtggccttgccggttacaacactacacaacactgtgactagctcagtctctactctcaaggcagaattgccacctacaggaaccagcaacgcaacccgtgtggaaaatgttcattcccctctgcccatttcaccatctccctccgaacagtccagtctcagtactgatgacacaaacatggcagacactttcaccgagattatgaccatgatgtcgccttcacagttcttgagttcatctcctttgagaatgacaaataatgaagacagtctgagtcccaccagcagcactctgtcaaacctggaactggatgcagccgaaaaggatcgcaagcttcaggagaaagagaagcaaatcgaagagctgaagaggaaactggaacaagagcagaagctcgtggaagtgctgaaaatgcaacttgaggttgaaaaacgagggcagcagcagcggcccctggaagcccagcccagtgccccaggtcattctgtcaagtcagatcagaagcacggcagccttggctcctccatcaaagatgaggcctcactccctgactgctccagctccaggcagcccatcccagtagccagccacgctggacagccaccgcctgctgttgttgctcagccccaggctttactgaccacgcagactgctcagctgctgctcccagtgtccatccagggctcgagtgtcacctcagtgcaactccctgtaggcagcctcaaactccagggaatgcacacaccgcttgcaagcagcaattgggacagttaggtctcacgagttgccttgctgttattcaagtattacagtacctgagctattatgtgtagaactgccttaggttcttattatttccatttccattttctcaaaattttcaaatgaaaaatcttagctacttaggaataataagagcatgcagtgactggtctgatgtttccctctctggtttagaatcattaaagttcagatttctgtgcagatgaagtgtgtatctgtaaccttggtcttatttcatttagatacaatccccaagtgaccagtgattctacacctaagttctgatttctaactttgattctgacaattaaattgatgtttttttcaattcacctcctagacttcaccacaagcaggaatgcagactcagcctcagatagcaactgctgcacaaataccaactgctgccttggcctcaggcttggccccaactgtacctcagacacaagacacgttcccgcagcatgtgctcagtcagcctcaacaagtcagaaaggttttcacaaactcagcatcatcaaatacagttcttccatatcagagacatcctgccccagctgtccagcagccctttatcaataaggcctccaacagtgttcttcaatccagaaatgctccgcttccatccctgcaaaatggacctaacacacccaacaaggtaaccctgtgaggcttgtgcgtcagtgacagtgccgcaggggcatcaaatcattccaaagcctagtgctttgggcttggagtgactaatgttaatgggataaaattgttgaaaatacagtgataacttgtgaaggaggagctcagctattatcacagtgaagatgatcgttcgcacataaggtggccaccagtgctgtcagcctcacaggtgctt

SEQ ID NO: 460838 - DNA, 5618 bp, Homo sapiens
gtacaggtgtcttcgcgcttttcctttcaggcttctgtggcttcaggtgcattgtcccagaggtgtcacctctagactaagacctatggctattgaatttgaagggacatggggcggaatagagtggcgaggactcctggaggacaaatgcctgggtagcagaaaggaaaatgaaggaaaggaaatggattcaactgctgatttggacctggggacaattcagttgagggtctcagagaagtttgatcatctgaagccttcttctctcaactcatcaaagtcattatccgtccagctttgttccattgctggaccctcagctgcaggtctgttggattgtgctggaggtccactccagaccctgtttgcctgggtatcagcagcggagtctgcagaacagcgaatattgctgaacagcaaatgttgctgtctgatcgttcctctggaggtttcaaatcagaggggtacctgcctatgtgaggtatctcaaaatccatgctgggagaaccactaccctcttcaaagctcagttggaaatgcaaaaatcacctgtcttctgcatcgttcacactgggagctgtagactggagctgttcctattcagccatcttggaaccgcgcctctggatacaagtttattaaaatgaagacaaacttacatgggaatattgcctggaaagtagaatcaaatatgcaataaatttctagaaattaacaaatggtttcatttacattataagcaattattgatttataaccattaatcttttcatttgttttctgatcttataaacacttcaaataacatttatttaaaaactttttaattgattaaaaattaatctcaataattataataatttttggataaagtttacgtaatcatcattattattaaaaatgtaaaaagtccaactatataaagttaaacctgtacagaagaccacaaacttattcaagcatatttttgctttgtcaaaaatctttttcccttaacgtcaaacaaaagattatagagctaagtagtacgtttctatgaaaagaaaaataacaatgacaacaatgaaaataaaagtcaggacttaagctaagaaagaatagaaaaccttaaggaatataatagtgacaggcaattttagcattaattatataatctcttatttaaagttaaacatcgctatgaaaaaactgaaacagtctcttgctgaatgtgatatgccagctgaataatgaggtttggcttctaagtagcttaaacttagcctggaaatgcagattgttggtattttctctgccctccaaaattgtgataatgaaatcttttagtctttccatttctgttatacataaatatgataaaacaagaacaagaaaatatgttttcattgccttaggatgatgcatttcaactcagagtcttcatataattatcatactatcagaacttctacaatggcagtagtcaatactgagagcaaaaggaatcccaaaattcttccataacgaaatgtattattagcaaagatttatttaacaatttcaaagtattttatagtctaaaatcacatacattcacacctttgtatatttgaataaatgcctaagaaaatgaaaccaatgtttaaagaaaacacatttttaaattttaaagcaaagataatttatagctctaattaaaatgttaaatacctcttaagtgtgtctacgattcatgggcaaagcagtcagtactcttgacggattttatttcttgacaatttttgctcacttgaaatccatagaaaatatgcccacaaggttaacaacaattttagaataacttatgaattggcttttaggtaaagtttctgaatattccttcttgagctacatcctgcttcacacataaattatgatataaattgttctaaatgtaatatatattatcgttacatgtgatcaagtgtcaaacatgtccccaaatacctgttcacctcatctgcatgactgaatggtagaagttttagagttattaccccaagcaacaatgtcagccatctctaatcttccctacacttcccacagttctctcatagatgacaatatgcccttcaccaagatccatcctttcttaattatatggaaaacctcaatttcataacccatgaacagaaaggagaaaaatctctcattcttttactctctacagtgccaaatatactgtttgatttttctctttctgcctctctgactctgttttcctgtgtctttttctttatcttctctcttttttagtgatcagaaattttcagtgtatatatattctcattatatggtgatgaaattattctctacaaactcaatttctactcttctttttgtaatgcaatacttattgaccacatttatattaacatatcctttataacatctgcataatattccatggaacggtcactttgtagtgtagctaataagtttatattaatggatttttttactattataaataatactgtaataagcatcttcatatatattcatctagattgattcttagtgtaaattattagtggtgccattgctggatgaaaggaagtgagtgttttaatttgccagatatttgtaatggctcttcgaaaatttggaactattacagtctcgcaggtagtgcattagcatgtttctttcctttatctttgccaaaattgaatgttttacagctaaaatttttgttaatctgatattcttattgtttcaattgacattttttaaaaagttatgattgaggttggacttttttcatatgtatattaattatcaacatgctttttctgattaactcaataatttttagtaagttgtttatatgctatgatttcatttttaccacctaccccactttacaaataaaagaataatgtattgtcaatatggataatttggaaaatgtacaaaagttagcaaaacaatcgaacaggaagctgaagaaggaaggaaaatgctgctatcttgataaaatctttagcaatccagtgtaaattcatcttaactttattatatttgaaaatgttctgttttcaaataaagtcacattcacagagcccaggtaaaaaagaattttggggagatacattcacttctattttttttttgatgaatataaggtaaaaaaaagttgagtataaaaaataaaattagaaaactatttttaacatgggatgagaatattattttcaatgaatcatgtttgttaaactatttcaataaaaaaagacaaaatccaaaattgtaataaatgtttaacagctaattaaatacaggatcctgaatcactgactgacagaaatattctcccaagttagaaatatagaaatgataaagtgtaatttaatatatttttttctgatatatggtcatccaatatcagcaccagccaatctcctacatatgccttttgttaacagtaatggtaaatactaataaaatatgccttatcaaatggaattattttgtgttcatggaagccaaacaattttcaaagcaggactttagcgacttaggaaaaccatttttattgcttcatttagaagaggaaatggaaatactgagttacaagagaagatggcattttttttaaaaccaatctttacatcatgattattagaagccgtgacactcccctatgatgaagctcttcaacattttaagggcattcattcacaatattgagatatcagtttgcacttttcggaaggcaaaagttaaacgaagtgcaatcctggaatactttacaatgaatagcacaagtgttgtgaacggactgaaacattcaacaaatatctatttagtactatgtgttactatgtgaggcactgttctatttgtgggggatagtgcaggaaacagagggacaaaagtcaggctttcatgcaagttgcgttgccctagtcatgctgaatattctccacctgctcctctggctctgcttctcacccttcagtgagctttgcgctctggccactgactcctaagtcctgcttcactttctatactctggctttgtgttgctttgaccaataaaagacaaagacagcagatcagagatgttatatcgtcaataacaatttcctggtggtcctctgcaacatttttttaaatgaccaaaatagtcatatgtcccaacggaggtacaatttacagcattgtgcgttctatttctggacatataactatataatctgagttatgaaaatcaaagaaactaatttaatatgtgaatttctatcactgaacattttaaatacttgtattcaagataatatcacagattatatatgcaaattaatgtaaattcgcagtggacaatattatattgtcaaaatcacactgacacagactctcagaagtagaagcttcctatcagaaggttaatattttctggatataacacagcaataataaaaagcaagctctggattagatagaaatccagggatttagatcctggggattgtgaatctaaatttatgttaaataaatgtatgcatactcttgggatagtaagagagttcatttttacccagtcatgtctaaaataactctgagctaaaaatattctccctgatacataatgcaaataagcctaccatgcaattttcatggttgattctttgaaacttttgtaaaacttaagctctaaaatatttggaatcttgtggcagtaaaaatagtgggaacatcctgttttacatactgctataaagtattcaccagaatgatgtttttctgtattagaaatactttcttagtttgattgcctgagagaaagagaaatctttttaaaagaaaagagagaatatttttagtattttaataacaattaaaattttcgcttcaaaattcattaaataagtgtttggaataaatcctataactagaacatagtcctgagcattaaacagtcatttgcaaaggggaaggcaagtgggctgataaatatgaaaaaaaaaaaatcttgaggactactagcagattccgttttatagacacttgagaacaaaactatagatttttgaaggtgaattttcatcaaagaaaatactttgaatacattatgttactggaatttaaacatggattatcttttagtcttgaggatccattttctgagacggtgatgggaaagatgttggttgtcaagtggaatctcagcagtcattttcagacaaagttagagaaaacaagtatggaagatgcctgattctcaaagagtcatccagtcttgggattaccgcctacgtccatggaagtgaaagtcctctttttctttgtaccacttactgaggctgaagaggaagaggaagagcaggtgttggtcttgatgtctcagggcaggcagaggtggaagagaatctgtgtgtaaagcacctgcacagttcaaacccatgctgttcgagggtcaactgcattcttgaaaattgctaaaagactccattgtaagtgttgtcaccacaaaaaatagtaagcatgtaatgtcatgcatatgttaaatcagctcaatttagccattccacaatgtatacatttttgaaaacgtaatgtacacaatatatataattttgtcaattaaaatgggt

SEQ ID NO: 460839 - DNA, 1437 bp, Homo sapiens
gaataggaacagctccggtctacagctcccagcgtgagcgacgcagaagacgggtgatttctgcatttccatctgagttaggcttggccacaagagacaaattgcaaggcatggagacatttttctaacacttgaaaattctatgcaagagcaccaggcagctcagtcaccttgtcacttatctactgggtcaccttgttggcatgggatgccagccaggcttgcagctgctccatcctcccctgaatttgtacttcagcttctccactcatggcctgccctgaggacttcatggttcagcatcagatatgaagacgacagccctatagagactatttaaccagcttctaaggtggttaaatatcttaccagcctatgtaaggccgaatcctactaacaaagcactggtatatgtaatatcccagtggtttgcttctctaattgaaccctgactactacaggtaagaattttgacaagaatatattaattcttctaggatgaagaaagggaaactcacttcaggtcaatagagattgtcatttgggaccccttcaagacaaccaattatatgactgtctctaaaatattgctatccagcccccattcctcacttttgtcctactggtaataagacattcatcgtgtatctttcagaagtccagataccacagtctgagtagttctttaatctgcttatctggtgattccatcacaaatggttcagtgcacagagagctgctcatttttgttattgctatcacttttctttggctttgactcttggaaaaaaatgtcttgggccattctggcagtgtctccaaacctgccctctgctccctgtactgcagtttctaacgagagactggggatcatccatcatccctttcctacctggcccgttactgggccaacttcccagatgggacggagttggctggcaggcagacctcagaagggtccactgtctgagaatgaggttgagcatcagggagagctactgagctttgaacaagccaagagaaatgtttcttgtaactgtggctggagtcttctgcctggaaagataggcaggagatactgcttcaacaaccaaaggaagcaggagacatcccacttgatgaccccaatatttccctgctgccataaatgtgttttttcttttttaaatattacctggtcccattgttccttccggtgggttcgtggtctcgctgacttcaagaatggagctgtggaccttcctgagtgctgattggtccattttacaaacctctagctagccccaaagcactgattggtgcatttttacagagcactgattgatgcattttacaaacctctagctagccacagagcgctgattgtgcagcagcacaacttctcccaaatgctgccataacgtattgaaagctacaacctctctccatatgtttaga

SEQ ID NO: 460840 - DNA, 1539 bp, Homo sapiens
agcttgtgctgttaacatgtatgcatgatgcttctggcagaaagaatggggaaaacaaaacccaaagtcccctccaaatcccagcaacacatatggaagtacgcagagaggacccgttcctttgcgggcctttcctgcccaagctccgggctacccgtaaatctgaccctctccagggccaggaggcctcaagagcttggagactcaccggagcaaacaacttagcaaaaacaatctgtcccataaacaaagccagtggaaagcatccaggcccacacaatggagctaatcttctgggcacacatttcccgtctggggtattagcaaggataccgcttccttctaggtggaggagcgagccacatgggaagcatgagaaagaatgcaggctgcctctacgatcaaagaccagcccccagcagaaaagagtcacctcagtcctacaaccacgaagaactgaattcagccaacaacttaattcacccccagagctggtcctgccaacagattgatcttatccttgtgagactctaacagaggacacagctgagccacatgctatccatgggcttctgacctccagaactgtgacataacaaacgggtgtcatcttaagctggtgttagtgccactgcactacaagtgaatagcagggcttggtctaaaaatatctcctccactgacataccacatgggttgatattcctgctgtcagaggcacaccttgaaattaaggtgtcttcctacaaaaagtcttgttgttaagttcagacactgtctgagatgaggtatttataattcctgccccaaatttggctataagcttcaagaatactgggacctggcttgtttactgaagcatctctagagccacaacaatgggtgaaacaccatggacagttagcaaatatttgctaagcaaatgaaagactacacgacaagagcaaaagaagtgcaggaatgggcccatgctcatggaattcactggtcttaccatgttcgtcatgatgctgaagcagctggcttcatagaatattgtaacagccctttgaagactcaattacagcaccagctaagtagtaataccttggagggctggggcaagtttctccagaaggctgaatatgctctgaattagtatccaatatatggtgctatttctcccctagccgggattcacagatccaggaatcaacggggtggaaatgggagtggcaccagtcaccatcacccctagcgacccactagcaaaatgtttttttcctgttcttgagactttatgctttgctggcctagaggtcttagttccagagggaagaatgctgccaccagaagacaaaacaatgatttcactgagctggaagttaagactgccaccccgccacttggggctcttcatgcctttgagtcaacaggctaagagaggaagagaaggaaggaatagccaatgatcagtaactgtgcagagccaggatcaaaaactcaaatgcccacaggggccaggtaataaagcaagtaaatgaaggcatttgcaatgtt

SEQ ID NO: 460841 - DNA, 1182 bp, Homo sapiens
ggcctggggagaggaccctgacccactgccagggagctgtgccagaggttcccatgggacatggaaggggaaccgacatccgtttctgcactggggtgtggacacctggccccacaccacctaggttcccccacaggggcctgaagactggaggttctctccagaatgttctggtttgattctgagagcaggagagacacccataaaaatgattggggttaaatttctggccaggtagatgggaactcacagccaaaatttaattaaggagaataaacaattgtgccacgccatgcatccaagtccggcagggcaaatccacacccgctactcactgagcttcccctgggccggaatgctccccctacatttgcaagaacaaagcctccttcctgtagaaaagaaaacaaaagtaaaataaaaaagaacaaagccattgggcttgggtttcctctttccaatcaatcgatcggtcatcgggagatggaagagacggtggaacctaggagcttggcgaatgctcctgagacctgggttctttcccaggtggcttctggcagctctgtccctggtgtctttggttctctttttctggaccctcttttggctggatgatggactgcctgggatggaagacagccctcctgactcatcgacccctccctacgcaggatctggcaatggtcaggctggcaaatcctggacacgggtcagacacgagcctcagggcatctgccactgcaagcaagtttcccatgtgagtgaccccaggcacacaatggacaaccaggcattaggccatccatcaggaggacttggtgctacgtggcacagcctgcatcagctagcagagaggctctcagattggagaggacagaagaatcatcacgagagggcttctcaaaacacagttgatgggcaaacccagaggtctgggttgggcctgagaatgtgcatttccgacaaatattcaggcattgctgttgctgctggcctgggaccctgtcatgaggagcacggatctgcacagttgtccctcattacatgtttgctgattgactgaatgagtgaatccaggcagtgagaataatggcactcagaggaggggcccaaggaacagagttgggagtggttgctgtgctgtgatcccttgaaggttggtttagaggcttgtttctcaaa

SEQ ID NO: 460842 - DNA, 6155 bp, Homo sapiens
gatcaggtgagcaagaagccggagccccgtggtttggcctttaaggcagatcaggatctgtaagaggggcctggaagcttcctgtgaatctggtgcaaggctccacctgcccttggtttcacaggcaaatggggctcctgtgatggaggatggatttcgggcctcagactgggcagccaggaggtctttgggactgcctgagctgagggctgcctgggctgaggactgcctgggctgagggactgcctgggctggggggactgcctgggctgagggctgcctgggctgaggactgcctgggctggggggactgcctgggctgagggctgcctgggctggggggactgcctgggctgaggactgcctgggctgagggactgcctgggctggggggactgcctgggctgaggactgcctgggctgaggactgcctgggctgaggactgcagctgaaggctgcctgggttgaagactacctgggctgggtgcctcctgggctgggaaggaagtgggtttggccttgtttcctctgatgttgactaagccgcctctccttgccctgggctgggcctgtcctgcccgaggaggctaggtggtcagagatgggtggtgggagaggccggcagggagcactgtcctcgggggtgagtgacgctgggcttgttgactccctcgcagagtggagggttaatgctctgattctccctgggcgcagggacccatgttaacatcttaattatgtgctttctgcagcaaagttgccaacagcaaactttcccagagagtctcagcaggacagcgaacaaggggacaggtcccagagagtctcagcaggacagcgagcaagcggacaggtcgcagagcgactcagcaggacagcgagcaaggggacaggtcccagagagtctcagcaggacagcgagcaagcggacaggtcccagagagtctcagcaggacagcgagcaagcggacaggtcccagagagtctcagcaggacagcgagcaagcggacaggtcccagagaatctcagcaggacagcgagcaagcggacaggtcccagagagtctcagcaggacagcgagcaagccgacaggtcccagagagtctcagcaggacagcgagcaagcggacaggtcccagagtctcagcaagacagcgagcaaggggacaggtcccagagagtctcagcaggacagcgagcaagcggacaggtcccagagagtctcagcaggacagcgagcaaggggacaggtcccagagagtctcagcaggacagcgagcaagcggacaggttccagagagtctcagcaggacagcgagcaagccgacaggtcccagagagtctcagcaggacagcgagcaagcagacaggtcccagagtctcagcaagacagcgagcaaggggacaggtcccagagagtctcagcaggacagcgagcaagcggacaggtcccagagagtgtcagcaggacagcgagcaagcggacaggtcccagagagtctcagcaggacagcgagcaaggggacaggtcccagagagtctcagcaggacagcgagcaagcggacaggtcccagagagtgtcagcaggacagcgagcaagcggacaggtcccagagtctcagcaagacagcgagcaaggggacaggtcccagagagtctcagcaggacagcgagcaagcggacaggtcccagagagtctcagcaggacagcgagcaaggggacaggtcccagagagtctcagcaggacagcgagcaaggggacaggtcccagagagtctcagcaggacagcgagcaagccgacaggtcccagagagtctcagcaggacagcgagcaagcggacaggtcccagagagtctcagcaggacagcgagcaagccgacaggtcccagagagtctcagcaggacagcgagcaagcggacaggtcccagagtctcagcaagacagcgagcaaggggacaggtcccagagagtctcagcaggacagcgagcaagcggacaggtcccagagagtgtcagcaggacagcgagcaagcggacaggtcccagagagtctcagcaggacagcgagcaaggggacaggtcccagagagtctcagcaggacagcgagcaagcggacaggtcccagagagtgtcagcaggacagcgagcaagcggacaggtcccagagagtctcagcaggacagcgagcaagcggacaggtcccagagagtctcagcaggacagcgagcaagcggacaggtcccagagcgtctcagcaggacagcgagcaaggggacaggtcccagagagtgtcagcaggacagcgagcaaggggacaggtcccagagagtctcagcaggacagcgagcaaggggacaggtcccagagagtctcagcaggacagcgagcaaggggacaggtcccagagagtctcagcaggacagcgagcaagcggacaggtcccagagcgtctcagcaggacagcgagcaaggggacaggtcccagagagtgtcagcaggacagcgagcaaggggacaggtcccagagagtctcagcaggacagcgagcaaggggacaggtcccagagagtctcagcaggacagcgagcaaggggacaggtcccagagagtctcagcaggacagcgagcaagccgacaggtcccagagcgtctcagcaggacagcgagcaaggggacaggtcccagagagtctcagcaggacagcgagcaagcggacaggtcccagagagtctcagcaggacagcgagcaagcggacagcaggacagcgagcaagcggacaggtcccagagagtctcagcaggacagcgagcaagcggacaggtcccagagagtctcagcaggacagcgagcaagcggacaggtcccagagagtctcagcaggacagcgagcaaggggacaggtcccagagagtctcagcaggacagcgagcaaggggacaggtcccagagagtctcagcaggacagcgagcaaggggacaggtcccagagagtctcagcaggacagcgagcaagcggacaggtcccagagagtctcagcaggacagcgagcaagccgacaggtcccagagagtctcagcaggacagcaagcaagcggacaggtcccagagtctcagcaagacagcgagcaaggggacaggtcccagagagtctcagcaggacagcgagcaagcggacaggtcccagagagtctcagcaggacagcgagcaagcggacaggtcccagagagtctcagcaggacagcgagcaagccgacaggtcccagagagtctcagcaggacagcgagcaagcggacaggtcccagagtctcagcaagacagcgagcaaggggacaggtcccagagagtgtcagcaggacagcgagcaagcggacaggtcccagagagtctcagcaggacagcgagcaaggggacaggtcccagagagtctcagcaggacagcgagcaagcggacaggtcccagagagtgtcagcaggacagcgagcaagcggacaggtcccagagtctcagcaagacagcgagcaaggggacaggtcccagagagtctcagcaggacagcgagcaagcggacaggtcccagagagtctcagcaggacagcgagcaaggggacaggaaacatcctcatggtcatggccatcagtctgaatccaggcctccacacgccagtgtacttctttctcaccaacctggcccttttagacatcgtctgcacatccatggacaacagcagagtggtggctgtgctgtacacagtggtcagccccaccctgaacccctcacctactccctgcggaacaaggacttatcagagcaatgtgggagcattcaccttgggggtgccgctggccgtgtcttcgtttagtcaggggttcttgcccggggatgggtcgagagtcacatatgcccactgtgcacactgcctggtctatgttgacggggtgggggcatttcttgatatcctgctttggagaaaatcacccaaaccccgactctccaacccaactcctcttggtgtgaggtcaaggaaaacatgagaaatgctctcctccctgtgtgaggtttcgtggtcctggcaccataaagggtgagagatggggttatccagcctttctttttaatgacctgcaggaaatacatggggctttactgatttacttcctttcagagaagggcattctcattctttaatttatgcaccaatcacctacattctgtcattaacttattatctttgtttaattgattatccttgtgtccatcaccaatccatctattttatgcatttcaaagccagttgcaaacatcatttcacttcttaaatacttctgcgtgcatatcattaaacatttgtttatagttatttttccttttaaggtaatattttcaaacaacaaaatgcataaataagggtgtacgtttgctgagtaatgtaattatcaaatcaggtgcccatgtgtgatgatcaaatcgggtacccgtgtgtgatgatcagatccttctgtctaattgtatgtttgtaccccttaacaacctctgttcatccccttcccccacactcttcccagcatctggtaactatcattttaccctctacctccatgagatcaactttttaagctcccacatgccccacctccaacattggggaacaaatttcaacatgagatttggaggggacaaatatctaaactgtattgtcacgtatagaaatgctactgatttttgtatattagaatcctgcaactttactaaatttatcagtactaagagttagaactttcttttcctctaagcactgaaacaaggatgcccccccgacttttcttcattcaataagctgttaactgtgggtttgtcatatatatttattatgttgagttactttgattatatatttaatttattaagagtttttatcatgaaggagatgttgaattttatcaaaacatttttctgcatctattgagatgatcatgtttttttcccttcattctactgatgtatgtatgatgtttgttgatttgtgtaggttgaactatccttgcattcctgggataaagcccacttgagcatggttattgttttttgatgtgttgtttaattcagtttgctagtattttgttgaggatttttgcatctatgtacacaagagatattggcctgtagttttctttttgctgttgttatgtccttgtctggttttggtatcaaagttattctggtcttgaagaatgagttaggaagaattccctctgctttaattttttggaatagtttaagaggaagcagtattaattattctttaaaaattctataggattcagcagtgaagccatccagtactggacttttctttgttgaaggactttttattactgattcaatcttgttacttgtcttggtctgttcaggttttctatttcttcttggtttaatcttgtgtagaaacaatgagttggggaaatttttcaacacatgtggtgccaggcagaatgggggagggggcattgcaaatgtgggtgtctagttctcttaccaactactcagagtgttttcacttctctgtgggcctggaagtggtctcatctttttatttgagttctgggatatttctggtgataatctttgtttttggttttctgtgggagagagtgaaaccagtttgcttctattctacattgccttttgaaactagaaaaaaaacctctcttttttgaagagcttgtgtgcttaggtcaggcttaccaggaaaatctcactgtcttaaggttaactatgccatgtaatgtaacataatcacatgtatgttaaaagtgctacttgaattaataagtgagtttatcaaggtcatataaagtaaaacatacaaaaataaatagtgttttatgtactaataacaaggattggaaattgcaatcaaataaacaccatttgcaattgcatcaaaggcatgaaataaggataaatttagcaaaatgtgtttaagacttaagtactatgatcacagcattgttgctaaaactcaagggagataaaaataagtggagatacacgctatgattgcagagtcaatattgataatatttcagttcttccaaaattgaactagtacctagaaattgacatttgattttaaattttata

SEQ ID NO: 460843 - DNA, 899 bp, Homo sapiens
acgtcgggtgctccggtgagagcgatgttttctaagcatgaccacatgacctcagatgacacctggaggagaaaggctattcttcttaagagtccacactcaccaggcccaggatctccaatcccacctctgccctacacaggtgaatgctatcttctcattgcacagatgaggaaactgaagctcgtgtcaaatagccacacagctgaggaaggacctcggggtcccagagctgtgcacacgctgcccccctggacgtacagaaccagcaggtggcatcgctccacacaggccaccgaacggccctgccccgccccctgccacgccctgtgcgtgcatccgggtccccgcgcagtggctgcacgcagcccacctctcccgacgatccgggtcctcccgcccttcgcggtgattctgtcgcgaaccctctcacggcagctatgagactgctgcgctccccagacgaggaaacctggtctcccggagccagagtcttgctctgtcgcccaggctggagtgcagtggcgcgatctcggctcactacaacctctgcctcccaggttcaagtgattctcctgcctcagcctcctgagtagctgggattacagctctgggacaaaccagcttctatgtcatgagcacactcaggcagctcattggagagatctgcatggtaaagcaatgaggcctcctgccagcagccatgtgagtggcatcttggagccagaccctccagccccagtcaagccttcggatgcctgcagccctggctgacattttaaccacaacttcatgagagattctgagccagaatcacccagctaagctgctcccgggttgccaggtgagaaaaatgaatggttatgattttaaaccgctaggttttggagtcatttgtt

SEQ ID NO: 460844 - DNA, 2090 bp, Homo sapiens
tcaccccagggtgactttgggcaggtgactcctggggctccctgctccataatcagccctcacctcctgccaccccaagcccaacctccctgggctctttgggcttgcgtctcccaggacctggtcccccagccccaggccctgccctcaccagtcatccctgggtggctttgggctggtgactcccggggctacctactgcagactctgccctcccctcctgctgccccaagctcgacctccctaggcttcttgggctggcgtctctgaggacctgggtcgaaaccgtgtgtttccctcccccatcgtggagcagcgactcgggcatcgcgctgatgtggtcccctcccctgggaggagtggaatgcaatgatgtcacatcagcaacaggtatctacggagaaggccgtgcatcctctactaccctggaggatctggagagccagtaccaagaactagcagtggccctggattcaagctccgcaataatcagtcaactcactgaaaacatcaattcactggttcgcacatctaaggaggagaagaagcatgagatacatctggtacagaagcttgggaggagcttgttcaaactcaaaaaccagacggctgaacccctggccccagagcccccagcagggccatctaaggtagagcagctacaagatgagaccaaccacctaaggaaggagctagagagtgtgggaagacagctccaggctgaggtggaaaacaatcagatgttgagtctcctgaacaggagacaggaggagaggctacgtgaacaggaggagaggctacgtgaacaggaggagaggctacgtgaacaggaggataggctacatgaacaggaggagaggctacgtgaacaggaggagaggctgtgtgaacaggaggagaggctacgtgaacatgaggagaggctgtgtgaacaggaggagaggctatgtgaacaggaggagaggctacgtgaacaggaggagaggctgtgtgaacaggaggagaggctacgtgaacaggaggagaggctgtgtgaacaggagaagctgccagggcaggagaggctgctggaagaggtggagaagctgttagaacaggagaggcggcaggaggagcaggagaggctgctggagagggagaggctgctggaagaggtggagaagctgttagaacaggagaggcggcaggaggagcaggagaggctgctggagagggagaggctgctggacgaggtggaggagctcctggacgaggtggaggagctcctggagcaggagaggcttcggctgcgggagctggagaggatgctggagctggggtgggaagccctgtacgagcagcgggccgagccacgcagcggcttcgaggagctgaacaacgagaacaagagcacactgcagttggagcagcaagtaaaggagctggagaagtcgggtgagctgaaagagactgtaacctccgacccatccaagaagatgtgggaggcgggcaccagcctctggggaggggaggtgccaggccacaggcagctgcagcctggggacagggtcttccggcaggtggagctgaagagccaagaggctccgagtctgcagcagcagccagaccagtacctggagccccagtcccacaaggagcttggatgtgcggacaagcagggtggactccccaggagcacccaggcttgggtggagaagctgttggtacaggagaggcggcaggaggagcaggagaggctgcatgccattcttttcgggctgccgagaacagggagctaaacatcaccatcatctaagagcgggtcaaggaattaaaaaaaaacaacaaaacgtttaaggggttaatatcctacacaattcatttacttcatttgaatgttagagccacttatgtttatttgtgtttctaatttaaatttatttgtttctaatttatagtttaaatttatttgtaaaaagttaaatgagagtgggtctttctctcatgttcactctggcatcctttagcattttttaaatttgataattataggacgttagcatgcatatcgagtttgcccttatgtggtgggagttcaaacacacaaagac

SEQ ID NO: 460845 - DNA, 1194 bp, Homo sapiens
ggtcagcgggtgacattgcattaatttgctctggtgatgatttctgctttgctagggagattgggaatggaatacaaagcccagggcctggcattgggctccagttcctgcctttcctaccactcaccattcaataccatctctaatgccttcttcccaaagacagtcgctcctccccacccagcgccatgcattctcatgccatattactgagctttgatcaaaatcaaccattcctttccaaaattcagaagcttccacaacaagtgtatacatacacaaccattaaaagtggccgttaccacgatgcattctgggaaagaagcagcaccaaatccaagatggcggccagcaggaggctgatgaaggagcttgaagaaatccgcaaatgtggaatggaaaacttccgtaacatccaggttgatgaagctaatttattgacttggcaagggcttattgttcctgacaaccctccgtataataagggggccttcagaatcgaaatcaactttccagcagagtacccattcaaaccaccgaggatcacatttaaaacaaagatctatcacccgaacatcgacgaaaaggggcaggtctgtctgccagtaattagtgctgaaaactggaagccagcaaccaaaaccgaccaagtaatccagtccctcatagcactggtgaatgacccgcagcccgagcacccgcttcgggctgacctagctgaagaatactctaacgaccgtaaaaaattctgtaagaatgctgaagagtttacaaagaaatatggggaaaagcgacctgtggactaaaatgtgccacgattggttccagcaagtgtgagcagagaccccgtgcagtacattcagacaccccgcaaagcaggactctgtggaaattgatacgtgccaccgtctggcgttcgcttgcagcagttactaactttctacagttttcttaattaaaagtggtctaggtaacctgtaaagaaaggattaaaaatttaagatgttcttaaaaaaaaaaaaagtggccattaatagacggaactatacactggactagttgttgttttaaaaacataaaatctggctaccctaacgggataagagttcagacatcaggatgttgacacagtgtcctaccagaacccagggtttacttagagaacataaaagaaaagagattgtatgctatatt

SEQ ID NO: 460846 - DNA, 1095 bp, Homo sapiens
ggacatgggcagccgcggcgcgcccaccccccgcgccggtaaaatcaaaacccaatcgtggcaggcagcagcaaattaactgaacccaccttctctcccgagcaccagagcctgagtgaacaacttgccgcagaagagccttctctagtgtcctccaccgtctcaccagagtagggatgctcttccgcttctccttagtgctgcctccaaaccaatgcaccatcaccaaccaagtctcctctcggaagccctgaaggtgtctgcgtttgctgactggttgtcaccccctgccccacttcagaacgcgtttgtgaagaagacattctctctggatgaagcaactacagaagtgcagaattccctttatgaatgtgatagaatggaggggaaagaatgcaagtcttgctaagtggactcaaggccattttcacaaagagcactgaaaatatctgctctgggaccccatggagggacttgcagttttcctggaacctcgagtttttggaatactgtgctggcatcactccagaatcactggacctgtacaacatgctgattccctgatgcacaggcgatccaggcttcattcccagctttgatgagagcaccagcctcaagccttgttctgtgcccacaaggaaatgaaagtaaaaattgatagcaaacttcttttaactaaaccatagtctttaaagcccagaatcaggcttgtttcttggttttggtagctgtaaatgagcaatttatgctttttgttgttattgtcattcactggttcattcttttcttcaagaaggttttatttaaatttgtgtaattgtgaaaatagcacacttgttaaagtattttgaaaataaggaaaagcagaataaaaatgtacccagtgccactatttacatttcagtttatttctttccactgttttaaaagatatgactatactaatacttctagtcctagaatccttgcctcaccctctccaagatggttgtaggatttctgggttgctgaggtaatgtacagttgaaaaaatgtcaagatgtgtcaggtaagctatatctgctgttggcctaaggacagatattttggtgtaag

SEQ ID NO: 460847 - DNA, 1175 bp, Homo sapiens
ggacatgggcagccgcggcgcgcccaccccccgcgccggtaaaatcaaaacccaatcgtggcaggcagcagcaaattaactgaacccaccttctctcccgagcaccagagcctgagtgaacaacttgccgcagaagagccttctctagtgtcctccaccgtctcaccagagtagggatgctcttccgcttctccttagtgctgcctccaaaccaatgcaccatcaccaaccaagtctcctctcggaagaacgcgtttgtgaagaagacattctctctggatgaagcaactacagaagtgcagattggccgcctcccttcagttatgcagaaatctctgcactggctggaagagcactgtcaaatgttgtaagcattctaaagttcacctttgtgggtcagaaacacatcacccctcacccttctacctccaacagaattccctttatgaatgtgatagaatggaggggaaagaatgcaagtcttgctaagtggactcaaggccattttcacaaagagcactgaaaatatctgctctgggaccccatggagggacttgcagttttcctggaacctcgagtttttggaatactgtgctggcatcactccagaatcactggacctgtacaacatgctgattccctgatgcacaggcgatccaggcttcattcccagctttgatgagagcaccagcctcaagccttgttctgtgcccacaaggaaatgaaagtaaaaattgatagcaaacttcttttaactaaaccatagtctttaaagcccagaatcaggcttgtttcttggttttggtagctgtaaatgagcaatttatgctttttgttgttattgtcattcactggttcattcttttcttcaagaaggttttatttaaatttgtgtaattgtgaaaatagcacacttgttaaagtattttgaaaataaggaaaagcagaataaaaatgtacccagtgccactatttacatttcagtttatttctttccactgttttaaaagatatgactatactaatacttctagtcctagaatccttgcctcaccctctccaagatggttgtaggatttctgggttgctgaggtaatgtacagttgaaaaaatgtcaagatgtgtcaggtaagctatatctgctgttggcctaaggacagatattttggtgtaag

SEQ ID NO: 460848 - DNA, 1228 bp, Homo sapiens
ggacatgggcagccgcggcgcgcccaccccccgcgccggtaaaatcaaaacccaatcgtggcaggcagcagcaaattaactgaacccaccttctctcccgagcaccagagcctgagtgaacaacttgccgcagaagagccttctctagtgtcctccaccgtctcaccagagtagggatgctcttccgcttctccttagtgctgcctccaaaccaatgcaccatcaccaaccaagtctcctctcggaagccctgaaggtgtctgcgtttgctgactggttgtcaccccctgccccacttcagaacgcgtttgtgaagaagacattctctctggatgaagcaactacagaagtgcagattggccgcctcccttcagttatgcagaaatctctgcactggctggaagagcactgtcaaatgttgtaagcattctaaagttcacctttgtgggtcagaaacacatcacccctcacccttctacctccaacagaattccctttatgaatgtgatagaatggaggggaaagaatgcaagtcttgctaagtggactcaaggccattttcacaaagagcactgaaaatatctgctctgggaccccatggagggacttgcagttttcctggaacctcgagtttttggaatactgtgctggcatcactccagaatcactggacctgtacaacatgctgattccctgatgcacaggcgatccaggcttcattcccagctttgatgagagcaccagcctcaagccttgttctgtgcccacaaggaaatgaaagtaaaaattgatagcaaacttcttttaactaaaccatagtctttaaagcccagaatcaggcttgtttcttggttttggtagctgtaaatgagcaatttatgctttttgttgttattgtcattcactggttcattcttttcttcaagaaggttttatttaaatttgtgtaattgtgaaaatagcacacttgttaaagtattttgaaaataaggaaaagcagaataaaaatgtacccagtgccactatttacatttcagtttatttctttccactgttttaaaagatatgactatactaatacttctagtcctagaatccttgcctcaccctctccaagatggttgtaggatttctgggttgctgaggtaatgtacagttgaaaaaatgtcaagatgtgtcaggtaagctatatctgctgttggcctaaggacagatattttggtgtaag

SEQ ID NO: 460849 - DNA, 1070 bp, Homo sapiens
ggacatgggcagccgcggcgcgcccaccccccgcgccggtaaaatcaaaacccaatcgtggcaggcagcagcaaattaactgaacccaccttctctcccgagcaccagagcctgagtgaacaacttgccgcagaagagccttctctagtgtcctccaccgtctcaccagagtagggatgctcttccgcttctccttagtgctgcctccaaaccaatgcaccatcaccaaccaagtctcctctcggaagaacgcgtttgtgaagaagacattctctctggatgaagcaactacagaagtgcaggcaagacattgtgctgccgtcgctgagtgtggcttaaataaaaaacatgtttatgtgggagagaatgtgtgggggttgctttcgcattatggaattcttaaaattgttgaaccgggaagatgttattcagaaacccctggtggcttcagcttgctttttgtgtatttcaggtttcttttttcccccatttttaattatctctggaaaaactcaagagtcctcccctgctcctaaaatagttataaaattaatgtgctgtactcaagtcgttactccacgtaaaagagtaaaagactcccatattaagcagagaatgagaaccatgccccgacacagccagtccctgaccatggcaccatactcatctgtaagcctcgtggagcagctggaagacaggatcctctgccatgagaaaaccaccgccgccctcgtagagcacgcctttcggattaaagatgacattgtcaacagtttgcagaaaatgcaaaacaaagggggaggtgaccgcttggccaggcttttcttggaggagcatatcagaaacataactgccatagtgaagcaacttaatcgggatatcgagtctgttcccaatccaggtgctaccttcctgaacagttgggataggcaggcaggaaagcctggggagccagcaggatcccatggttaggagtctcaggaggagggtccaggctcactgcttcgcaccctataactaagccagtctcctgccccatggaggggtggacaggttgtaggggcgggctc

SEQ ID NO: 460850 - DNA, 1305 bp, Homo sapiens
ggaaccagacaaattacgcactgccaaaatacaacattgggacaggcataagataaatgttcccattccgaaagggagaactcagaagaaagaaaggagtgacagaccccaagcaagtccaaaacctagcaaggcaaatcctattagatcttaaggctcaggaattatcctctttggctcaatgtcccatcttccaggctcactggggtggaagcatcactccaatagctccaggcaggggccctgcccctgtggttcttgcagaccctgggtcttgtcagaaggctgtgtccccaaggctcctctggatggtcctcctgcaaagcttcaggctccgaggggaaaagaaacagctctcaaagctcagacgtcatggtaacactgggaaaagcccagcttttccagcagacaccgaagagccaatgataccaggagaaaaccagaagtgaatgggcatcttgtgttttattgagacacagaggacaggcaccttctgcctgaccccacccagagctgcggaaataacgaaaatataggggtttggactcaaccaggcctggactgagtcctggctccagctctttcttgccatgcaaccttggttaaattaacttttaaagcttgagttttcttacctgcaaaggggagaaaatatagtactactttctagggctgttaagagaattaagtaaaaaatccatgtaaagcacttagcatggcacgttatgcattgttctaagtgttctaagaacactacttagaaaatgttagcattgttattgctatagtatcaagggtagcgtggataccagacgttttgtgttcagttgtgagaaaagactatttaaggtaatacgctcctgaatgtgctaaaatcaaataccgcagctggaccagattaactcaggacaccaccagtggactagaattgcaatgaccccacacgatcttacctgctcctcagaccacagccaaggaagagatttctgacaaacaagcaaaaacacaacactgtccacacaactgtaaatatgcaaggaagagtttcttcttgcctgaaaactgcctttggacttggactagaatttcaccactggggctcttggatctcgagtctgtagagggcagatcgtgggatttttcagcctccaaaatcatgtgagccaattcctcataataaatctccttctatatctatgtcccagtggttctgtttctctggagaactctgactagttcaggaagagaatgattttggtttggcagctgctgagaaatgaggcataagcccaggtgagaacaggt

SEQ ID NO: 460851 - DNA, 880 bp, Homo sapiens
cactactgcacatattatattgaatatgaggcactatgttctagcaagagatcagacagagaccatccaggaagaacatggcttgaatgatagacagcttaattgtcatgagacacagaagtcaggcagaatgtactggtgcttatccacgactgaggaagggagaagacagacgatgattgcactgactcgaaagaataagtggaaaaacgatgctactggatgtctgattttgacttttcttggtctattagtcgtctcctcttccgcatcaaacagtgaaacatctttagtgtcatcattactatcctgctgcaacatggcggccctacgccagccttacttccgggagccacgtcagcgcagcagcgtacgggtccgggtcggaactcagaatctagctctttcttaaaggctgtatctaacatatggatgtattattcatatacttaagctaccaggttttttgctattacaaataatgctataatgaatatcctcattcattttgggggcatcctttgatgatatacctataaattaaatttctaataatggaacacgcccttaaaactttgataaggtcactttgccttccaaatggttgtgccaatctgtagtccagcttacaaggtgatggaatcaggataaccacagcagccccacgaacactttcctggttattctatcccaggaaataaacatcctcctgtgaaatagtatttaccaattagaagcagcaatcagaaaaggaagagcagcctgaagtggcagatgataaaaatcaaacaataaataacaatttgagtaatctagtaatgacccagcaatcattctgtgcatggacaacaatcttacataccttaacagtgcttcgggg

SEQ ID NO: 460852 - DNA, 439 bp, Homo sapiens
gattactagtttgaatctgacaatgtacttacttttaccagtaagttttttatttttgtatttttatcgtatcaattagtatccttttaatccagcttgaagaattcctagaatttcttgtaaggcacatctaatggtgatatccttcctcgacttttgtttgtttgagaaagtcttattcttgccttcatttttgaaagatagtattactaggtatggtattcttgggcagtaatttttttttcttttaggattttgaatatatcatccagctccttcctggcctataaagtttctggaaaaagaaaatccatggatatcttacacggtgggcatcccttttgtgtaactatttgctgtcccttgttgctttcaaaattctctctttgtctaaatttttaacaatttgattataatatgtctcaaatgtgtgtctctg

SEQ ID NO: 460853 - DNA, 508 bp, Homo sapiens
gcggccgcctactactactaaattcgcggccgcgtcgacacaggttcctgctgttttatcaagggctgatttacctgacgactcatttcagttttgggtgaacaggttcctgctattttatcgagggctgatttacctgacgactcatctcactcttgctgcttccaggactcccagtttccctttgattgtttgactacagtgtgtgcagatgggagttcccctgcacaagctctcttacctaccaccatgtgagatgtgactttgctcctccatcgccttccaccatgaccatgaggcttccgcagccatgtgaaactgattttgaatatatcatccagctccttcctggcctataaagtttctggaaaaagaaaatccatggatatcttacacggtgggcatcccttttgtgtaactatttgctgtcccttgttgctttcaaaattctctctttgtctaaatttttaacaatttgattataatatgtctcaaatgtgtgtctctg

SEQ ID NO: 460854 - DNA, 3690 bp, Homo sapiens
cacctatctctgtaagtcagttttgtgggagtgggacggttaggtcactggatatgtggatttacaatgttaatagagggcgcggggctctgtgctgtgtcctgtctcctgtcagccggctctgcccgcacgctgagctgcggttatggctccgggagcaaacaacccggaagtggcagcgcggctgggcggagggcgccctcctggttccgctggggctgcggctccctgaggccccgaggggaccccgctcacccgggccccgcccaccagagggcgccagagagaagccaccggggaggcgcctgcgctgtttccctgagcctcctggtaccccgtttgagacacaggaaaaaacgcgtgaaaggcttctgtaaattatcaagtgtggtgacgtatgaaccccaggcagcccactcccaaccccaaacaacatctcattcaagctgcgtctaccagaagctcgcacatccaactgcctccctccagaggtagccgctgtcccgaattttgctttgaatgttccctgtgattttcttttttatactgtgtaattggatttttaaagggatttcataacatttatattcccggaggcttgaatttttttgctcatcgtttttcgttaccacgtagtgaggtgttgctgcagttcctcgactttgtgactccacagatacgaatatgtggcactttgtttaaccactgtcctctaatgccctcttgtgaggagcaatacctcgagtcccaccaccgttttttatttcaagagtgccttgcatacaaattttaagactcagttagttaaatttcctcaaaaagtcttttgagattttgattagaatcacataaactctgtgaattaaatatctttaaaatactgatttttcctatccatgatgtggaatctgtttccatttatttaggccattttaaaatgttttcaataaattttataattttccgcatgtaaattgtacacatttttgttaaccttactcttagttaacgttgagttttctaagcagagttcttgataaattatgttttccaactatttattgctagtgtatagcaatacaaatgatttttgcttattgatcctagaggcagcccccttcctaaactctcttatttccaataatttctgtgcagattcttttgtggtttctcagtagaccatcctgtcgtctgtgaccaatgagagttttgctttatatctttcaatccttattcctgtaatttctttttcttgtcttattgcacaaacagatcctcagtacactgttgccttgatttttattttaatgggaaacatctcagaagttctctaagaggacgctcagtagccattgcccctttatgaatgatgtttattgtaaggttttgataggtatactttttgagtttaaggaaattaccttttatttctagtctactaagaatttttaagttaataatagatgttgaattgtattaaatgcttcttttgaaatgttcagatgattttcccctttaatttgtgaaagtggtgaataaatgtatggaataaacacagtttggtcctgacagtttgtctttttaatgtattgacggatttgcacccagaggaagggctggctggcagctgcatttggtttactcacaggttgttttggatttttgcatctatgttcagtatgaggctggcccatagttttctcttctgtctttctctgtgttgaatatcaaaattatccaggctccaaagaatgatttgatgaccattcattcatatttgatccttttgaagagtttatgtaagattgaaatgatctaacagctttagaagaactcacttttgaaaccatatggtatttttacttgtgaaaacatttagaattaataattcaatgtatttaagagtagcataactggtcaggctctacacttcttgaattgattacgaaaactacattttttctaggaattgtgatttcttgtaagctgtcaaatttattcacataaatttgttttagtattgtcttatgtttacagtcatggttgtatttatcattatgttcctttgacatcccaaacattgtttatttgtgcttttttgtgcttaagtagtctcagaagcagtttctctactttattaatctttttcaaatagcaagccttggttgtgttcctctctatttcctcattattttgtatttcatgatttctgcccttctttgggtccagtatgctgcttagtttcagttggacatttggcttattaattttcagtccgtctttcttagtacaaggacttatgattatatatttacctgtaagatcttctgttactgcttccccaagtgctgatatttaacggttccattattcactgagctctgtgtgctttcttaatctccatcccttgattcatgattcatgtgcaaatggggtatttttcaaaatatatagaaattattttttaattagagaaaatttcaaatgtgaaaaaacagtgagagaaagataaagcacccccacatagctaacactcaaattcaacaatggtcaaaatgcagttaattttgttgcatctttagagttaagaccttactctctctaatctctctcaaactacttacaatgccaataccacagctaaaaataaaataattttatgaagattgttagtttatacttttactgatgtctaatttaattccattgttgtcagagaatgtggtgtgtatataagttttgtacagtttactgaacttactgtatggcctagcacagtgctccctagagtgtgcactgtttgttgaaaagactaccctttgtccatcaagttgctactgcacctatgtaaaaacagatgggagttcccctgcacaagctctcttacctaccaccatgtgagatgtgactttgctcctccatcgccttccaccatgaccatgaggcttccgcagccatgtgaaactgattttgaatatatcatccagctccttcctggcctataaagtttctggaaaaagaaaatccatggatatcttacacgagagacatggaatcatgattggagcgatgtccaccagatgtcaaaatagagttctggattcttgttttgtatcaactttaatgagatataatttccatataataaaatgtacatatttgtgtataatttgataagttctcaaaagcttatacacccatgtaaacacctccacatcatgatacagaacgtttcaattaccctaacaagctcttctctgcccttttgatacaaatccttcatctcagccccaagcaatcactattctctcactttacattagttctcttattgtgcagttttatataaatggaattatacaatatgaacttattttgtatctatcttcttttgctaatctaaacacttttcagattcatccatgttggtgcatggatgaatgcatgctaagtcctattccattatatagatgtatcacattcatataattatactccattatatagattgctaaatcctattccattatatagatatatcacaattgttttgtccatcatctattgatggatatttgtcttaattttagctttagattaatttggataaagttggggtaagcataaatacataggcctttgtgttgatatatgtttttcaagctcttatataaatccctaggagtatac

SEQ ID NO: 460855 - DNA, 1684 bp, Homo sapiens
atttaaagtatgagagttagaataaactttcaaaaaaacaaagtatccaaaaatatatttggaggagaagaggtagaaatgaaaaaatggatgaaacagagctctgccatggcagccgagggacttgagcaccacattgaaagggccgctggccttacacaggtctctggggccacaactgatagaaaggatggtcagaatacccaatatttgcgaatctgtaagtggccttttctaaaaaagaaagaaatgctttacagaacaacagatgacacgagatgtccctgctggggagaaaaacttgatgatcccattggcaaaccagctcctgagatttgtatcaaggcctctgcatctcacagctaccttgtgtctcctctattgaaaagctgctgggactttcagagacattctactaatggcaagttctgagtgccatcatgaagaatttcaggaagagacgtgatttgaccttagtgttttaaatgggcatggtcctgctgtcaagttcagcaaaacagcagctactgctgtctgatgtactctgaaagcctgatcagtcagatcagccattagagacctgacctcatggacccagttgcagggttggctggatgatgggctgatatgaggacaactgctccatcgtgctcagcgctgctgggttgtactgcatgaggagccaagctcagttttatttccctgcctctttgcaaacaattattctagcaacatgcactaggcatacagaaaataatatgaaatggattctgatgttttttgtgcttggattagtttgcttcactgtagcccttgaactcttgaaacagaagtatcaagaacctgctattctcttagtgggctctgaccatgtggtgccccagaagttatctccaaatatacttcaaaatatcaggcagaggtttcctgtctaaagttaccatgtgccatatacctgttaaggtgtccaccagcggcatctttctgatgatgaccctgaatgttcacaatgatgcttgagagagggtaaaagaggcaaaatatgctggtgaatatattgagtgtcttttgggaactttgttcttttcactggatcatctttagagccttcagtgaactagctcaccttctacaatttgtttattacatgcacattagccacaacatctggcagaattgagcctagtatacttccttctttgtaactgaaaggatcccagaacaaagtgccatgtttagggtctggatatgtgaacaataggcattctcaagagcaccctcagttctctcctgggcatcaacaagaaaccctcgcagtgaagattgaatgacatcaagtgcagtagctccatggacttcatgacactcaggggaacttaggcttttgttttgttggactgtcttttgtttttcagcgtgtgtgttcattggaaattcagagataagccatttgtgaaccagggatctagaaaacttgtcatcagatgacgcatctattttaggggctgccgagctccaggtggcctgattgcttgtctcaggctccccccaccactggaactccatgcttatagtctcagctaatgtggaacacggtgggtgtctatcctgaaggtgggttccttctgggatgccacctgtgcaaccagaaggaaaactaacaaccagaaaggacatctacacc

SEQ ID NO: 460856 - DNA, 1448 bp, Homo sapiens
tccccttcgccttttgccatgattaacaacagatgacacgagatgtccctgctggggagaaaaacttgatgatcccattggcaaaccagctcctgagatttgtatcaaggcctctgcatctcacagctaccttgtgtctcctctattgaaaagctgctgggactttcagagacattctactaatggcaagttctgagtgccatcatgaagaatttcaggaagagacgtgatttgaccttagtgttttaaatgggcatggtcctgctgtcaagttcagcaaaacagcagctactgctgtctgatgtactctgaaagcctgatcagtcagatcagccattagagacctgacctcatggacccagttgcagggttggctggatgatgggctgatatgaggacaactgctccatcgtgctcagcgctgctgggttgtactgcatgaggagccaagctcagttttatttccctgcctctttgcaaacaattattctagcaacatgcactaggcatacagaaaataatatgaaatggattctgatgttttttgtgcttggattagtttgcttcactgtagcccttgaactcttgaaacagaagtatcaagaacctgctattctcttagtgggctctgaccatgtggtgccccagaagttatctccaaatatacttcaaaatatcaggcagaggtttcctgtctaaagttaccatgtgccatatacctgttaaggtgtccaccagcggcatctttctgatgatgaccctgaatgttcacaatgatgcttgagagagggtaaaagaggcaaaatatgctggtgaatatattgagtgtcttttgggaactttgttcttttcactggatcatctttagagccttcagtgaactagctcaccttctacaatttgtttattacatgcacattagccacaacatctggcagaattgagcctagtatacttccttctttgtaactgaaaggatcccagaacaaagtgccatgtttagggtctggatatgtgaacaataggcattctcaagagcaccctcagttctctcctgggcatcaacaagaaaccctcgcagtgaagattgaatgacatcaagtgcagtagctccatggacttcatgacactcaggggaacttaggcttttgttttgttggactgtcttttgtttttcagcgtgtgtgttcattggaaattcagagataagccatttgtgaaccagggatctagaaaacttgtcatcagatgacgcatctattttaggggctgccgagctccaggtggcctgattgcttgtctcaggctccccccaccactggaactccatgcttatagtctcagctaatgtggaacacggtgggtgtctatcctgaaggtgggttccttctgggatgccacctgtgcaaccagaaggaaaactaacaaccagaaaggacatctacacc

SEQ ID NO: 460857 - DNA, 832 bp, Homo sapiens
agaaagtaagatccaggaggagaaggaccttatctgttttttgttctttgccacctgaaaacatgttcccaagcatggaaaagtcatgtgaccatttgaaatttgggccagcgctcctgtgcctgtactttcaggtggccctgccgattggagggtttgaggcttggagaaaacatggcagcaaaggctggtggggaagccagaggcttggaggcaaaagccctgggtccttcgctctcagctgtgaccctgggcaggctctggaattgggctgggtctcaagtgaaatgggaagtgggagctctatggaagacactgtccagggcgccaggggaggcacagttacacaaggaagatccccagccgtgggagcctttgctctactcattgaatcctgggtactcaagggaatacttggagtgttctggtgaagtggggttttctggtcttctagctggtctctttgttcagctcaataaaggtgtttatgtagcacctatcatgttttagtcatgttactagatgctgtcaatatcaaggggggaagatggggcacttgcctgagagcagcaattttcacactttctgatttctgaacttcattactctctagctctatttcccgaaacagaaaaaaaattgagaagagtgatattgttttatgtaatttcgcaaatgtagaaaatatttcacaagtctttttaatgcctaggttaataaaagacagatggattcacatacctgcttcaccagtggtctccagataatgctggaggggtagagcaatgggtattaatgcagggaaaacgtacttgcctttgggggcattttt

SEQ ID NO: 460858 - DNA, 1001 bp, Homo sapiens
  misc_feature (809)..(810): n is a, c, g, or t
  misc_feature (823)..(823): n is a, c, g, or t
agccggctcgggaaagaatcccccaagctccatttcatgagtaagcgtgagagccgctcagtttcctccagctctgctgaagccagcacagaagtagcccaaactcttccctctgctgacagcaaattttaggcaaagtcttgagaaagaagaaattgggtccagaaagggaagtgaggagaatcagatcccagacctttggggagaaggagcaaccgcctctggcacagcccatcagggagaaagagcaggttgagaagagtcctaagctaacagccccaaacaggtgggtgttgctcagctccctgaggcatgtggttgtaaggcagaacccacagaccttgcaggaagaaggctctcggggccatggcccaggtcagcatcaacaatgactacagcgagtgggacttgagcacggatgccggggagcgggctcggctgctgcagagtccctgtgtggacacagcccccaagagtgagtgggaagcctctcctgggggtctggacagaggcaccacttccacacttggggccatcttcatcgtcgtcaacgcgtgcctgggtgcagggttactcaacttcccagcagccttcagcactgcggggggcgtggcagcaggcatcgcactgcagatgtgccacgtcagcagtgtgcccgtcttcaacagcatgcagcagcctgaagtgaagacctggggtggagtggtgacagctgccatggtcatagccctcgctgtctacatggggacagatggtgggtgcatggtacagtacggaatctcttggtcaccctgggagcttcatcttcnngccagaacacagncaaacgcaatctatgtgcgatctcctgggcataaacaactgtctcccaagggaaacaaaaaggactttggcattggtcgcaaggaaacccattctttagagctatgaggagcattcttaagtcacgatcattcaatgagtggatgaaatccggaatcatttcccggaatggagaaaat

SEQ ID NO: 460859 - DNA, 2303 bp, Homo sapiens
agccggctcgggaaagaatcccccaagctccatttcatgagtaagcgtgagagccgctcagtttcctccagctctgctgaagccagcacagaagtagcccaaactcttccctctgctgacagcaaattttaggcaaagtcttgagaaagaagaaattgggtccagaaagggaagtgaggagaatcagatcccagacctttggggagaaggagcaaccgcctctggcacagcccatcagggagaaagagcaggttgagaagagtcctaagctaacagccccaaacaggtgggtgttgctcagctccctgaggcatgtggttgtaaggcagaacccacagaccttgcaggaagaaggctctcggggccatggcccaggtcagcatcaacaatgactacagcgagtgggacttgagcacggatgccggggagcgggctcggctgctgcagagtccctgtgtggacacagcccccaagagtgagtgggaagcctctcctgggggtctggacagaggcaccacttccacacttggggccatcttcatcgtcgtcaacgcgtgcctgggtgcagggttactcaacttcccagcagccttcagcactgcggggggcgtggcagcaggcatcgcactgcagatgggtatgctggttttcatcatcagtggccttgtcatcctggcctactgctcccaggccagcaatgagaggacctaccaggaggtggtatgggctgtgtgtggcaagctgacaggtgtgctatgtgaggtggccatcgctgtctacacctttggcacctgcattgccttcctaatcatcattggcgaccagcaggacaagattatagctgtgatggcgaaagagccggagggggccagcggcccttggtacacagaccgcaagttcaccatcagcctcactgccttcctcttcatcctgcccctctccatccccagggagattggtttccagaaatatgccagcttcctgagcgtcgtgggtacctggtacgtcacagccatcgttatcatcaagtacatctggccagataaagagatgaccccagggaacatcctgaccaggccggcttcctggatggctgtgttcaatgccatgcccaccatctgcttcggatttcagtgccacgtcagcagtgtgcccgtcttcaacagcatgcagcagcctgaagtgaagacctggggtggagtggtgacagctgccatggtcatagccctcgctgtctacatggggacaggcatctgtggcttcctgacctttggagctgctgtggatcctgacgtgctcctgtcctatccctcggaggacatggccgtggccgttgcccgagccttcatcatcctgagcgtgctcacctcctaccctatcctgcacttctgtgggcggtgagcccccttccactccccagggcccctcctagcccctgtgagcgcttccaacatggtcctttggccttgtgtggaccccatcctgtagaaggagaaactgaagcctgtagaaaagagtcggtgcctaggatgggtccctacatatcccaggccaggtgtcagaagcgccctttgtcctggggtcaccagaacattccgtgagtcctgtaagaatctctatccatggcatggcacggtggctcacgtctctaaacccagcactttgggaggctgaggcagaaggatcgcttgagcctgggagttcaagaccacctgggcaacctagtgagaccccatctctacacaaaataaaataaatagccaggtgtggtgggatgcacctgtggtcccagctactcagccacttgggaggctgaggcagaaggatggctggagcccaggagttcaaggctgcagtgagccaagattgcaccactgcactccagcctgggtgagagagccagaccctgtctcaaaaaaacaaaaaacaaaagaatctctatccagatcctttcctgagctttcacatggacaccctcccctttggatgccccagacagttccttttaaggaaaaaacaatatcagtttccatgtgatgtaaagcaaagtgctaagctctcgacattcaccgtctctagtccctgtggtaaacagagtgctggtggcccattttacagaagaggaaactgagggtcaggaatggggctttccccgcagtctacccagttaggggtctggctcctgtgagctagaggtggggagctgctagcagcaggggcacctctaagcccttctccatgtgggcagggcggtggtggaaggcctgtggctgcgctaccagggggtgccagtggaggaggac

SEQ ID NO: 460860 - DNA, 1517 bp, Homo sapiens
tccccccaccgcccctgttcttccctttctggctgcagcctctttgcacagtgccaagctccctgcagagagagccctggtgtcacagctccaagggtacagggggtggatccatgggtaactgtccatgccagcgacccctgctatagtccagctgcttgaagctgtgagattgctgtggggctctgaggggtgggggtcagtctgggtaaccagggaagcggaatctgctcagatgtttggctgtccaggagtcccagagctggctttttccagggctctgagacccacagctttacatcaattgttccctctcaatctagactttgctcacctctgaatgtagcttatctctgtgcagaactgaccccggggctgtggcaacatctcccttgactcattattctgctaggctctagtacattatttactagcatgaggcatattccgtcagggccagttgaatgcctgcatgaatgcttcttgttcacagcatggtatgatcaggcggcacccaacacaacatgtacaatgatcaagcaggtcagtgaccctgtgcagctctcgagcatgtgcccctgcactggccgggagcagctgaagagtgcctgtgtgatccagaagccaatgacctgggactctctctctggaccacctgttcagagcatgcatgcaggctcaaagaataataggaggaagagctttatagctgaaccgggccgagaaattgtacgtgtgacactgaaacgtgacccacatcgtggttttggccaagctgaccctggcatttttatatcttctattatacctggaggaccagcagaaaaagcaaaaacgatcaaaccaggagggcagatactagccctgaatcacatcagtctggagggcttcacattcaacatggctgttaggatgatccagaattcccctgacaacatagaattaattatttctcagtcaaaaggagtacatgattactgtgaggtactagaccttgaagtccacgtaggtcttctatattgctttcctcatggtgttggcttgcaaagaagcagtgtagtggcacaaattaataagctttgcaatttcaggggcagaatgggcgttaccatgcttgtcttgctgaaagggagtaacctactctaattttgttagacacggctggatacaaccagtctttttttttctgtcaactctccttgcatggcagggaggacctttttattgccacccaaagtccttgttgatagggtcggctccaggatttctatattttgtatagaatcctatacaaaatttctatattttgtataggtatagcaatcagctggggaggagacaagcactgttctttgttaatcttttgttttgggtttagggctacatgtgtagtttcctgagaccaatgctgctttttggttgggtgatcctgtaaactaacagcagaccgcctgcaaattcaggctcatgattgcttcttcacacttgaggggtgttgtacagttttcccttgtata

SEQ ID NO: 460861 - DNA, 3565 bp, Homo sapiens
gtgggtcccggtgaccgtgctccccggctgcgtgggctgcaggaccgtcgcggcgctggcgtcctggaccgtgcgcgatgtgaaggaacgtatcttcgcggagactggcttcccggtgtcggagcagcggctgtggcgcggcggccgcgaggtaggcggtggccgggggcgctgggctgggctccgccacgcggaggaacggcgggcgtcgagggcccggggtgggcgacgcaggtttccgcgggcggcgcgaatgactccggcagcgtggccgcctttatctgactggatcaagattggagatctgacttccaaaaattgtcatctttttgtaaaccttcaatcaaaaggcttaaaagggggaggtcgatttggtcagacaacgccaccacttgttgattttctcaaggacattttgagaagatatccagaaggaggacagattcttaaggaattaattcagaatgcagaagatgctggggcgacagaagttaaatttttatatgatgaaactcaatacggaacagagactctttggtcaaaagatatggcgccatatcaggggccagctctctatgtgtacaacaacgcggttttcaccccagaggactggcacggcattcaagaaatagcaagaagcaggaaaaaggatgatcctctgaaggtcggaagatttggaattgggtttaattctgtctatcatataacagatgttccttgtatctttagtggtgaccaaatcgggatgctagatcctcatcaaacactttttggcccacatgaatcaggccaatgttggaatctcaaagatgacagcaaagaaattagtgaactttcagaccagtttgcaccatttgttggcatttttggaagcaccaaggaaacatttataaacggcaattttccaggaacatttttccgtttccctcttcgcctacaaccttcacaacttagtagtaacctctacaataagcagaaggttcttgagttgtttgagtcttttagggcagatgcagacacagtgctgctctttctgaaaagtgtgcaggatgtttccttatatgtccgagaggctgacggaacagagaaactggtgtttagagtgacttcgagtgagagtaaggcactgaaacatgagcggccgaattctataaagattctgggaactgctataagtaactattgtaaaaagactccaagcaataacatcacctgtgtaacatatcacgtaaatattgttttagaagaggagagtactaaggatgcacagaaaacatcttggttggtgtgtaacagtgtgggtgggcgagggatcagtagtaagcttgactctttagctgatgaactgaaatttgtcccaatcattggaatagccatgcctttatcaagcagagatgatgaagcaaaaggagcaacgtctgatttctcaggaaaagcattttgtttccttcctttaccacctggtgaggaaagcagcacaggcctcccagttcacatcagtgggttctttggccttactgataaccgcaggagcataaaatggagagagctggaccagtggagagacccggcagccttatggaatgagtttcttgtcatgaatgttgtccccaaagcttatgctactctgatcttagattcaataaaacgtctggagatggaaaagagctctgatttccccttgtcagttgatgttatctataagctttggccggaggcgagcaaagtcaaggtgcactggcaaccggtgttagagcctctattcagcgagctgttgcagaatgcagtgatttattcaattagctgtgactgggtcaggttggagcaggtgtacttctcagaacttgatgaaaatttagaatacacaaaaactgtgctcaactacctccagagctcagggaagcagattgccaaggtaccagggaatgtggatgctgctgttcagctcacagctgcctctggcacaacacctgtgaggaaggtgacgcccgcgtgggtgcggcaggtgctgcggaagtgtgcacacctgggctgtgctgaagaaaagcttcaccttctagaatttgtgctttctgaccaagcctacagtgagctgcttgggctggagctgctccctttacaaaatggcaattttgtccccttctcctcatctgtatcagaccaagatgtcatttatattacctcagcagaatatccaaggtcccttttcccaagtcttgaaggaagatttattttggataacttgaaacctcaccttgtggctgctttaaaggaagctgcccaaacccgaggtattatagtttagtattcttttaaataaacttctatataaaaatacaagttttttaaaagttttctgttattcattttagacctataaatcaacaatttcttatggctcaagctaataaactttttgtgttttaagatatttcagttgccagaatggcatctaagagatgctgtctaaaagaatccagaggtgataagtgtaaaaatctctcctgtcatggtgtgatggtgtagtcaacatcttatacctgcatggtgctttacagttttccagtgctttcccatttcttttttcatttgagcctcccagcataacttgtagcttgtttggtaatgacagtgattattaaatttcacagaagaggagagagaaaggttaagatcaagaccaccagccaagtgccgagaggtcaggtcttccacttgccctgtccttgctctatttctgacaccactgcccctccatggttttatgtagttatgatgctgggtttgcattaggcttgatcagcttctgggaagtgtggacaaatccaattaactctgtaacaggggcaggaaaagggtcttgcgggggtcttaaagtgatgggtgtctgataggtgtccttttaggaaaagacagtaattttgggaaaacagtcaacatggttctaattttaatactacctttcaacttctgcaagcatccttttccttgtgaaactgttacctgagctttttctaagtgagatgttgtcctgaaaagttctgggtttgtcctgctgttcacattgtcaagcatactctgtgatgtgtcttttatggaatgtacttttttcttgtccaggataatggcttagggaaagttgctaatcattgtacacctttattcattaaaatataagtgaaatgagttggaatgggagaggcaagttaggttggagttaaagtgagagtaaaagaaaatgagtaggcaaatgttgtttcccatcagggatttgcatctatgagttggtagctgtgagactgacttttcaaacgtctgagttactcatttaattgtaattgtcatcttcaaaacaacctttttgaaagtctaagcctggattcctataagcctgccaatctttgctctaacgatttggaactcctttttttttaatgttgtattatatttttgttaaaattttgtgttgaaatataagatgcatatagaacagtgcacatatcataaatgtaggcttagtgaaattttaccatctgaacatacccatgtaaacctagatcagaac

SEQ ID NO: 460862 - DNA, 3355 bp, Homo sapiens
gggttttagccaaatgcctcgacatcgccgcgcctccgcctcctcgtcgctgaaagaaatgtcggggtttcatcagagctagggagcgacagtcgggaacagcgagtctgccgaagccggctgttgtgtgagggtgtgagacggcggggcggtgaggggccaccgcggcttgggggatagtgcgtgtggggttgaccgtgtgtctgcttgagaggctgtgaagatatggggggcagatatgggagaaatgctcgggcctgaagtccccagcccaccgtgctcaagagtagcggacgttttgccaccatccttgtctgtgctactgtctgctgcagcttccgtgccccgttctcctggagcaggcaagacctggagtgagggcgtaaaagcggcttgcattcaattagcagcgaagctcgcgggcgctggcgggacaggcgcgtgaggccacaacacatgcgtgtatcttgcttgggctatcttccctgctctgccacgccgggtctggagaaggggtttcagccccaggacatttactgagagtcggcgaatattgggagccgcgatgttcccccttcgggccctgtggttggtctgggcgcttctaggagtggccggatcatgcccggagccgtgcgcctgcgtggacaagtacgctcaccagttcgcggactgcgcttacaaagagttgctctgtccgcgaacaagatcactgtgctgcggcgcggggccttcgccgacgtcacacaggtcacgtcgctgtggctggcgcacaatgaggtgcgcaccgtggagccaggcgcactggccgtgctgagtcagctcaagaacctcgatctgagccacaacttcatatccagctttccgtggagcgacctgcgcaacctgagcgcgctgcagctgctcaaaatgaaccacaaccgcctgggctctctgccccgggacgcactcggtgcgctacccgacctgcgttccctgcgcatcaacaacaaccggctgcgtacgctggcgcctggcaccttcgacgcgcttagcgcgctgtcacacttgcaactctatcacaatcccttccactgcggctgcggccttgtgtggctgcaggcctgggccgcgagcacccgggtgtccttacccgagcccgactccattgcttgtgcctcgcctcccgcgctgcagggggtgccggtgtaccgcctgcccgccctgccctgtgcaccgcccagcgtgcatctgagtgccgagccaccgcttgaagcacccggcaccccactgcgcgcaggactggcgttcgtgttacactgcatcgccgacggccaccctacgcctcgcctgcaatggcaacttcagatccccggtggcaccgtagtcttagagccaccggttctgagcggggaggacgacggggttggggcggaggaaggagagggagaaggagatggggatttgctgacgcagacccaagcccaaacgccgactccagcacccgcttggccggcgcccccagccacaccgcgcttcctggccctcgcaaatggctccctgttggtgcccctcctgagtgccaaggaggcgggcgtctacacttgccgtgcacacaatgagctgggcgccaactctacgtcaatacgcgtggcggtggcagcaaccgggcccccaaaacacgcgcctggcgccgggggagaacccgacggacaggccccgacctctgagcgcaagtccacagccaagggccggggcaacagcgtcctgccttccaaacccgagggcaaaatcaaaggccaaggcctggccaaggtcagcattctcggggagaccgagacggagccggaggaggacacaagtgagggagaggaggccgaagaccagatcctcgcggacccggcggaggagcagcgctgtggcaacggggacccctctcggtacgtttctaaccacgcgttcaaccagagcgcagagctcaagccgcacgtcttcgagctgggcgtcatcgcgctggatgtggcggagcgcgaggcgcgggtgcagctgactccgctggctgcgcgctggggccctgggcccggcggggctggcggagccccgcgacccgggcggcgacccctgcgcctactctatctgtgtccagcggggggcggcgcggcagtgcagtggtcccgcgtagaggaaggcgtcaacgcctactggttccgcggcctgcggccgggtaccaactactccgtgtgcctggcgctggcgggcgaagcctgccacgtgcaagtggtgttttccaccaagaaggagctcccatcgctgctggtcatagtggcagtgagcgtattcctcctggtgctggccacagtgccccttctgggcgccgcctgctgccatctgctggctaaacacccgggcaagccctaccgtctgatcctgcggcctcaggcccctgaccctatggagaagcgcatcgccgcagacttcgacccgcgtgcttcgtacctcgagtccgagaaaagctacccggcaggcggcgaggcgggcggcgaggagccagaggacgtgcagggggagggccttgatgaagacgcggagcagggagacccaagtggggacctgcagagagaggagagcctggcggcctgctcactggtggagtcccagtccaaggccaaccaagaggagttcgaggcgggctctgagtacagcgatcggctgcccctgggcgccgaggcgacggtgggcgatatctatgtccctccattcccgtcgcgattatctgcgaaatccaccccgcagcccgccccaccgtgggctctggagccagaggaaacgagcgaagactttggaaacctcgcgcgccgcaggaccgcgcgccccttggcggctgagcctgtggacttggtcgcgggccaatttcgttgtccgtgtgttgggctttccggagctggaaagcgccggaggcggaggaagctgactgtggcctcccgggccgcggctctctggagggctcgcgccctagttcgcacaaagcctgctcgtgactgtgcgactaattgggggccctcctcgagaccctctaggatcctgagtgccactagggcaggtggagaggaggtgaaagctctgcccctctttgtccagggccacgtatcctaatggatgagcaaatactactcagctagaccttgtgccttctgggcttggccaggcccaaaggctccaaccacaggtttataatgagaaaacagtcccatactttatctctgattccagttcctagtgctttcccttccactttgaactttttcagttttttctgctgtttcctaccatattaaaaaataacatgctttcctgttattttttcaattttatgtat

SEQ ID NO: 460863 - DNA, 2978 bp, Homo sapiens
tccgttgaacctcgagatttttattgaccttcacttcagagaggctcctggccatagaggaggttaccggagccctggaactagtgctaaacgggcttgcggaggcacagcttgataggggaggtaagctggggttcagtgagtcaccttctttcttcttcacctggcttccatctgcaggagccgcgatgttcccccttcgggccctgtggttggtctgggcgcttctaggagtggccggatcatgcccggagccgtgcgcctgcgtggacaagtacgctcaccagttcgcggactgcgcttacaaagagttgctctgtccgcgaacaagatcactgtgctgcggcgcggggccttcgccgacgtcacacaggtcacgtcgctgtggctggcgcacaatgaggtgcgcaccgtggagccaggcgcactggccgtgctgagtcagctcaagaacctcgatctgagccacaacttcatatccagctttccgtggagcgacctgcgcaacctgagcgcgctgcagctgctcaaaatgaaccacaaccgcctgggctctctgccccgggacgcactcggtgcgctacccgacctgcgttccctgcgcatcaacaacaaccggctgcgtacgctggcgcctggcaccttcgacgcgcttagcgcgctgtcacacttgcaactctatcacaatcccttccactgcggctgcggccttgtgtggctgcaggcctgggccgcgagcacccgggtgtccttacccgagcccgactccattgcttgtgcctcgcctcccgcgctgcagggggtgccggtgtaccgcctgcccgccctgccctgtgcaccgcccagcgtgcatctgagtgccgagccaccgcttgaagcacccggcaccccactgcgcgcaggactggcgttcgtgttacactgcatcgccgacggccaccctacgcctcgcctgcaatggcaacttcagatccccggtggcaccgtagtcttagagccaccggttctgagcggggaggacgacggggttggggcggaggaaggagagggagaaggagatggggatttgctgacgcagacccaagcccaaacgccgactccagcacccgcttggccggcgcccccagccacaccgcgcttcctggccctcgcaaatggctccctgttggtgcccctcctgagtgccaaggaggcgggcgtctacacttgccgtgcacacaatgagctgggcgccaactctacgtcaatacgcgtggcggtggcagcaaccgggcccccaaaacacgcgcctggcgccgggggagaacccgacggacaggccccgacctctgagcgcaagtccacagccaagggccggggcaacagcgtcctgccttccaaacccgagggcaaaatcaaaggccaaggcctggccaaggtcagcattctcggggagaccgagacggagccggaggaggacacaagtgagggagaggaggccgaagaccagatcctcgcggacccggcggaggagcagcgctgtggcaacggggacccctctcggtacgtttctaaccacgcgttcaaccagagcgcagagctcaagccgcacgtcttcgagctgggcgtcatcgcgctggatgtggcggagcgcgaggcgcgggtgcagctgactccgctggctgcgcgctggggccctgggcccggcggggctggcggagccccgcgacccgggcggcgacccctgcgcctactctatctgtgtccagcggggggcggcgcggcagtgcagtggtcccgcgtagaggaaggcgtcaacgcctactggttccgcggcctgcggccgggtaccaactactccgtgtgcctggcgctggcgggcgaagcctgccacgtgcaagtggtgttttccaccaagaaggagctcccatcgctgctggtcatagtggcagtgagcgtattcctcctggtgctggccacagtgccccttctgggcgccgcctgctgccatctgctggctaaacacccgggcaagccctaccgtctgatcctgcggcctcaggcccctgaccctatggagaagcgcatcgccgcagacttcgacccgcgtgcttcgtacctcgagtccgagaaaagctacccggcaggcggcgaggcgggcggcgaggagccagaggacgtgcagggggagggccttgatgaagacgcggagcagggagacccaagtggggacctgcagagagaggagagcctggcggcctgctcactggtggagtcccagtccaaggccaaccaagaggagttcgaggcgggctctgagtacagcgatcggctgcccctgggcgccgaggcgacggtgggcgatatctatgtccctccattcccgtcgcgattatctgcgaaatccaccccgcagcccgccccaccgtgggctctggagccagaggaaacgagcgaagactttggaaacctcgcgcgccgcaggaccgcgcgccccttggcggctgagcctgtggacttggtcgcgggccaatttcgttgtccgtgtgttgggctttccggagctggaaagcgccggaggcggaggaagctgactgtggcctcccgggccgcggctctctggagggctcgcgccctagttcgcacaaagcctgctcgtgactgtgcgactaattgggggccctcctcgagaccctctaggatcctgagtgccactagggcaggtggagaggaggtgaaagctctgcccctctttgtccagggccacgtatcctaatggatgagcaaatactactcagctagaccttgtgccttctgggcttggccaggcccaaaggctccaaccacaggtttataatgagaaaacagtcccatactttatctctgattccagttcctagtgctttcccttccactttgaactttttcagttttttctgctgtttcctaccatattaaaaaataacatgctttcctgttattttttcaattttatgtat

SEQ ID NO: 460864 - DNA, 1170 bp, Homo sapiens
caccgcaagctctcacaggatcgcagacatgcgtgagttaacgggtgacaaggacagactcagtactcggcagcaccatcaccaatgcttcctcaagggcttcataatggcgacaacagctcctcaagcccatcccgacatcctgcagtgcttagtgacggaaccagaggtgcagcctggaagatcactgtcagccccctttgcacactgcagggaggttcccttctggcccagcatccccatctgtgcaagacctcctgacctcccctgcaccgagcccttaacctttccctcctgtgaccctctggacctcagccaccctatccttgctacattcatcctgctgtcatcggttcctccttcccctcctgggagcaaggaatccagggtctatatgagtgaccagcatccagcactggtctttttccagaaagctgcatgcatgcttgatgtttttcaactagaaaagaccactgctctcaacaccaccaccactcgcgacctcaccactgaaaggggtaccgcgctggacatgaaaaattcagataaccaccacccgcagctgcggaaggaaagcggcagagaaaagactagggcgccccctggtggctccaatgtggctcttcctgaaattggcaggaataaagcctgagccgctttcttgcaacctccagctcccaaataaccatatattcaaacgaaattaactcaagagtagaaactttgttgttaaaaaggaggtgaagggagacaaggctgttgtaaacaccaacaaatatcaactgaatgaattttgattaagatctagtaaagtagtaccagtgagctggtttccgcagcagtgacggtacttccgcagctacggagtcaggatcacttagtctggtgcattccacagcctggaacactctgaaggagagtcgtgaaagcaaaggaacttctccccaggaaaatccacgtatgtgcacaaacacacaagcacgattttgcacacaattgcaagaggtatctgaaatctctaaaactatctatgagcctccaatgaggttcccagatacaacagacacttcatataactcccaggaatccaccaaggggataatattaccaccatttcaaggactgggaaaacgagttcagagaaattaaagcatttgcccggggtcacat

SEQ ID NO: 460865 - DNA, 1017 bp, Homo sapiens
ccacttcatattcttctcacccagcacactccttgaaaaatagttattgtttgataaacaatttgattgatgaatgaaggaaaaactaaaaagagggattttctttaagctaaggaaaatatcaggccatagtcagacagcatctgccatgcacccgtggatgcctgctacagggtgtggaaccaagggaccgagcattttcttgcagttgtgcgtcagtggagggttgtggatgatcagtgtattaaagtctgtgtttgcttccttcagcaaaaaaagttcaccatcacaagcagtgtcactgggaagaagcacacatttgtcacagattcagccaagaccagtaaatacttactggacctctgctcagcccagcatgggtttaatgcacagatgggctctgggcagccttcccatgttttatttgaacacagtcacatggcccccaagacaactgcaagacgggttggaaagggaggacttcctgtgtgcccaggaagaggaagtagtgtaacgatacaccatggtccttgccataacggctgcagccgtctgctgtatcactcttaattgagagtttggtattaaactcatagcaggaccagattacggaagaggcagagtttatcatttgtgtttagattggaatccttgcaaggaaaaacattaaaatgtttctgcaatacacataatctagagatcaggtggacagcatggtgacctgaatgcagcacagttgaagattaactaccaacaagaataacaatgaatgtcctattaaatagccctggaagcacctgtaccaatcaggaagctatttgctgctgcttagcaattacagtgagaaatgtaactcatcacattctcctacttttggttgcttagcagatcttttgcttactgtgcttctaaattcaaaaactataaatacccttgttttaccaggaccatatcttaaaaatttaaggtaccttgtagagtagggtttttttttttttttgcctgaactcatttttt

SEQ ID NO: 460866 - DNA, 2268 bp, Homo sapiens
ccacacttacacttcctgttctctgcaaggcagccagagtgacctttcactaatttcaacacaagtcattggttgggagtagagggcactctgcatggtcgtctggaaccagggtttgcctacatgatgggtctccatttgccaccggccttggacgtctccactggatgctctgatttcacctgataagtaaagggagagagacagagcatggagaattacacaggtagttttagggtcaggcctggcagtgactcacatcgcttcctctgcccaccttccaattgtccagaactcagtcacatgactgctcctaactgcaagggaggctggaaaaaagtgttttatgtgggtgtcagcaacatcaggacctttcaagccccttgccccagtatcatccctgaatgcaaaactcactcagaggcctggggaagagattcgaactctgcttttcctctgccacctcagagtgagcccatctgtggaatgccatgccccttctctatcccatctttgcaagtgggcttgggttcttgggatgagttcttcaggccttataaatgcaaactgtgcagaggtgcctccaacaagaaaaaccagtctctggcagggcccctaagggcaggattctggagaggccgccctgtcctcagtttggccctgggacattctggccgaaaggaggaagggtggctggcagctggcggcagggcttgtgaaggcttagccctgggcctggtcctgcttctcttagaggtggctggttgtgcaatggcatcctggctgctcctcttggagccctgtgaccacagttccaggctccacccccatttctcaccgccggtgccttgtatgacctctgaaaatatgacctgaagcagatggatgcactcacataagaaacatcacctgtggccttcatcgaaaatgggcctgctgcttgaagaagttgggctcttggagttctctagcacaggggccatgaaaatcaatgacttccttgtttgctgacggagcagaggtagaatctcttggtgtttccacggagaaaacactgaccatgaagagccaagaaagatgacatgatgaagccatcaggggaagcaccaaacatcctcaactctgctcacccatggttttctcccgccctcccagagctcctcctgcgtgagtaatgcagtgtgtgctggtgcagtgtctcactgaaaaaagaaagaaaccctgatttgcagcattggccaatttctgtagtgtaaatactcccaccatagcagatttcaggttaccaagggtttcacaactggttcacaagtcttgactgtaatgaccagctcatgcaactccagcatctcatcatctccgccctgtcccagaaaatccccacatcacacccaggctgaatatcactttcagcttctcagtcagaaggagaagtggttaactatgccaggatggtaatgactaaatatcagaatgaatgtccaggcacttgtttcactaatatttgctgagcccctaccatgctccaaccagcactttaagcactctgcaagtgttaactagtgaatgttgaggtgttgaggttgggttccttccctgaagatagttttgtcacatggttgttaatgacctgcaaaagcagtgtttttgctttggagaatccagttacagtgctcctgagctgcagaaggagctctgagacccaacaaccttgtgtggaattccacaattctcttattcataaacggaccctctatatagactggtagtgaaacatatcaagaaacatttcccactttagtttttcacgaagaaagccgctattgtctcatctcagctgagatggggtcacgcagggacgcagctcccttgcctgatctctgactccctggaagtttcctaaaatgtttctgtgggcctaaatcctttggccttcattggcatcaccagcactggagctattccagtgaggatttttgctgcggcacatcacggagtggcatgagaggtcagagaactcctagtatcccccaaatatccattctgttcttcttccttagtgatgggcccccgacatgaaactggcactcagaatgaagaatgccttttccagcctccctcgctggtggagtctccgtgttccagccaatgaaaggaggaagcctggacagcctgcagttgaggggacctgcacaagctcacaggactcttcatcaccatgacaccacgctcaccgcaaaataaaaatgatcaaacctgtcatgatgt

SEQ ID NO: 460867 - DNA, 465 bp, Homo sapiens
ccacacttacacttcctgttctctgcaaggcagccagagtgacctttcactaatgtaagtcatattatgtcccctctctgctgcaaacccttcaatcactttccatgaatggttctgggaataaagtccagcttccttcccctgattcacttgatctggcccttcccacttgtctgacctgttttccagcccatgctccctgtccttttctacactcctaacatgtggtctttctattccttaaacttgcctggctcagtcccatgttagagcatttctgctggctcttcttcctgcctggaccttcacacagctggaaattcttgcttttcaaattgtaatttatttctatttttattttttgagacggagtttcactcttgtcgcccaggctggagtgcaatggcgcaatctcagctcactgcaacctctgcctcctgggttcaagcgattttcccacctcag

SEQ ID NO: 460868 - DNA, 1466 bp, Homo sapiens
tggcagggaccatttgatggggattcggatgtcttcctggggtgccttgtatgacctctgaaaatatgacctgaagcagatggatgcactcacataagaaacatcacctgtggccttcatcgaaaatgggcctgctgcttgaagaagttgggctcttggagttctctagcacaggggccatgaaaatcaatgacttccttgtttgctgacggagcagaggtagaatctcttggtgtttccacggagaaaacactgaccatgaagagccaagaaagatgacatgatgaagccatcaggggaagcaccaaacatcctcaactctgctcacccatggttttctcccgccctcccagagctcctcctgcgtgagtaatgcagtgtgtgctggtgcagtgtctcactgaaaaaagaaagaaaccctgatttgcagcattggccaatttctgtagtgtaaatactcccaccatagcagatttcaggttaccaagggtttcacaactggttcacaagtcttgactgtaatgaccagctcatgcaactccagcatctcatcatctccgccctgtcccagaaaatccccacatcacacccaggctgaatatcactttcagcttctcagtcagaaggagaagtggttaactatgccaggatggtaatgactaaatatcagaatgaatgtccaggcacttgtttcactaatatttgctgagcccctaccatgctccaaccagcactttaagcactctgcaagtgttaactagtgaatgttgaggtgttgaggttgggttccttccctgaagatagttttgtcacatggttgttaatgacctgcaaaagcagtgtttttgctttggagaatccagttacagtgctcctgagctgcagaaggagctctgagacccaacaaccttgtgtggaattccacaattctcttattcataaacggaccctctatatagactggtagtgaaacatatcaagaaacatttcccactttagtttttcacgaagaaagccgctattgtctcatctcagctgagatggggtcacgcagggacgcagctcccttgcctgatctctgactccctggaagtttcctaaaatgtttctgtgggcctaaatcctttggccttcattggcatcaccagcactggagctattccagtgaggatttttgctgcggcacatcacggagtggcatgagaggtcagagaactcctagtatcccccaaatatccattctgttcttcttccttagtgatgggcccccgacatgaaactggcactcagaatgaagaatgccttttccagcctccctcgctggtggagtctccgtgttccagccaatgaaaggaggaagcctggacagcctgcagttgaggggacctgcacaagctcacaggactcttcatcaccatgacaccacgctcaccgcaaaataaaaatgatcaaacctgtcatgatgt

SEQ ID NO: 460869 - DNA, 2257 bp, Homo sapiens
gtggcttaacacaataaagatgtatttctcttttatgtcacagttcaacacaagtcattggttgggagtagagggcactctgcatggtcgtctggaaccagggtttgcctacatgatgggtctccatttgccaccggccttggacgtctccactggatgctctgatttcacctgataagtaaagggagagagacagagcatggagaattacacaggtagttttagggtcaggcctggcagtgactcacatcgcttcctctgcccaccttccaattgtccagaactcagtcacatgactgctcctaactgcaagggaggctggaaaaaagtgttttatgtgggtgtcagcaacatcaggacctttcaagccccttgccccagtatcatccctgaatgcaaaactcactcagaggcctggggaagagattcgaactctgcttttcctctgccacctcagagtgagcccatctgtggaatgccatgccccttctctatcccatctttgcaagtgggcttgggttcttgggatgagttcttcaggccttataaatgcaaactgtgcagaggtgcctccaacaagaaaaaccagtctctggcagggcccctaagggcaggattctggagaggccgccctgtcctcagtttggccctgggacattctggccgaaaggaggaagggtggctggcagctggcggcagggcttgtgaaggcttagccctgggcctggtcctgcttctcttagaggtggctggttgtgcaatggcatcctggctgctcctcttggagccctgtgaccacagttccaggctccacccccatttctcaccgccggtgccttgtatgacctctgaaaatatgacctgaagcagatggatgcactcacataagaaacatcacctgtggccttcatcgaaaatgggcctgctgcttgaagaagttgggctcttggagttctctagcacaggggccatgaaaatcaatgacttccttgtttgctgacggagcagaggtagaatctcttggtgtttccacggagaaaacactgaccatgaagagccaagaaagatgacatgatgaagccatcaggggaagcaccaaacatcctcaactctgctcacccatggttttctcccgccctcccagagctcctcctgcgtgagtaatgcagtgtgtgctggtgcagtgtctcactgaaaaaagaaagaaaccctgatttgcagcattggccaatttctgtagtgtaaatactcccaccatagcagatttcaggttaccaagggtttcacaactggttcacaagtcttgactgtaatgaccagctcatgcaactccagcatctcatcatctccgccctgtcccagaaaatccccacatcacacccaggctgaatatcactttcagcttctcagtcagaaggagaagtggttaactatgccaggatggtaatgactaaatatcagaatgaatgtccaggcacttgtttcactaatatttgctgagcccctaccatgctccaaccagcactttaagcactctgcaagtgttaactagtgaatgttgaggtgttgaggttgggttccttccctgaagatagttttgtcacatggttgttaatgacctgcaaaagcagtgtttttgctttggagaatccagttacagtgctcctgagctgcagaaggagctctgagacccaacaaccttgtgtggaattccacaattctcttattcataaacggaccctctatatagactggtagtgaaacatatcaagaaacatttcccactttagtttttcacgaagaaagccgctattgtctcatctcagctgagatggggtcacgcagggacgcagctcccttgcctgatctctgactccctggaagtttcctaaaatgtttctgtgggcctaaatcctttggccttcattggcatcaccagcactggagctattccagtgaggatttttgctgcggcacatcacggagtggcatgagaggtcagagaactcctagtatcccccaaatatccattctgttcttcttccttagtgatgggcccccgacatgaaactggcactcagaatgaagaatgccttttccagcctccctcgctggtggagtctccgtgttccagccaatgaaaggaggaagcctggacagcctgcagttgaggggacctgcacaagctcacaggactcttcatcaccatgacaccacgctcaccgcaaaataaaaatgatcaaacctgtcatgatgt

SEQ ID NO: 460870 - DNA, 1551 bp, Homo sapiens
tgcctctagcttttttctttttattcaagatttttttgtctatctgagataactacacttatcattgctggacaaagctctatccaaatgatggcggagagtgatggcatgtacctgtagtcccagctactcgagagcctgaggcaggagaatcacttgaggtcaggagttaaaggcctccattctctatgattgcacctgtgaatatctaagctgcactacaacttgggcaacatagcgagacatctcttaaaatgataataataataaataaaataactctacattcaggagagttgtggggagatgacctaacaagcgcgcccctaccccgcacgggcgagaggggcaaagctggagtgaacccagctgagcctgggccgcccagccctggaggctggaggcgctgtggtcaggaagcgctcggaggatggagcccttttccctgtaagcagggggccagggtctcacttctgagccggcttcccacggaccccaggccccggcagggtcctgcagtgaggatgatcatgcccacggggtgggtggggtgttggcaaagcggggccgcagggcaggttctggaagccactccgcgtggctgggctggagtgtgcagacgtgggagagcccggaatggggagcgcatggagtgtgtgattgtgagtgagaggggaatgggcactgaatccttacctacacaaatgcctaaactcacatatccactggggaattgtatggcaggaaggctgattttatttagctggtccttgattcttggtttgcgcagtatctgggtccagcctgcagccctcgggtccagttcagtctgtcatctgaaccatgaggatctggtggcttctgcttgccattgaaatctgcacagggaacataaactcacaggacacctgcaggcaagggcaccctggaatccctgggaaccccggtcacaatggtctgcctggaagagatggacgagacggagcgaagggtgacaaaggcgatgcaggagaaccaggatgtcctggcagcccggggaaggatgggacgagtggagagaagggagaacgaggagcagatggaaaagttgaagcaaaaggcatcaaaggtgatcaaggctcaagaggatccccaggaaaacatggccccaaggggcttgcagggcccatgggagagaaaggcctccgaggagagactgggcctcaggggcagaaggggaataagggtgacgtgggtcccactggtcctgaggggccaaggggcaacattgggcctttgggcccaactggtttaccgggccccatgggccctattggaaagcctggtcccaagggagaagctggacccacggggccccagggtgagccaggagtccggggaataagaggctggaaaggagatcgaggagagaaagggaaaatcggtgagactctagtcttgccaaaaagtgctttcactgtggggctcacggtgctgagcaagtttccttcttcagatgtgcccattaaatttgataagatcctgtataatgaattcaaccattatgataca

SEQ ID NO: 460871 - DNA, 279 bp, Homo sapiens
aatggagagacagaaatgtctccagaagaatcatgggagcacaaagaagaaataagtgaagcagagccagggggtggttccttgggagatggaaggccgccagaggaaagtgcccatgaaatgatggaggaggaagaggaaatcccaaaacctaagtctgcatattcatacctgtattgaggaggtggaatttacagccttaatctgcttggtagacaaaaatcaggggaaaaagttagacccccccgttttgtcaacaggtcaggttgcttgctcgct

SEQ ID NO: 460872 - DNA, 3393 bp, Homo sapiens
aatggagagacagaaatgtctccagaagaatcatgggagcacaaagaagaaataagtgaagcagagccagggggtggttccttgggagatggaaggccgccagaggaaagtgcccatgaaatgatggaggaggaagaggaaatcccaaaacctaagtctgtggttgcaccgccaggtgctcctaagaaagagcatgtaaatgtagtattcattgggcacgtagagagcaccatgaagcccaatgaaggtggatatggggcaggagctcgctggggctctggtgtgcaggaaggtttccctgtttgtcttcaaaactgattttgctgatggttgtcccctcaaggtgctggctgtctccaccctgcttccacactatccagcagggctggtccccttctctggctctggagaaggtcctgagggcagcacagggcagacctcatggttatggaggtgggaagagaacgaggtgctcaaagtccaactgaagaaatatgtaggagctgtccagatgctgaaaagagaaggtcaaacagctgaaggtggactggtggcattggaggtgacagctctgaagttgtatatcgtggccccactctcaggtggactggtggcgttggaggtgacagctctgaagttgtatagcgtggccccactctcgggtggactggtggtattggaggtgacatttctgaagttgcgtagtgtggccccactctcaggtggactggtggtattggaggtgacagctctgaagttgcgtagtgtggccctgctgtcaggtggactggtggcattggaggtgacaactctgaagttgtatagtgtggccctgatgtcagatggactggtggcattggaggtgacgtctctgaagttgtgtagtgtggccttgctgtcaggtggactggtggcattggaggtgacgtctctgaagttgtgtagtgtggcctcgctgtcagttggactggtggcattggaggccccggtggatgccatgatgcagacctgagacatggtcactccccctggggctcccagcctggagaggagggagtgtcagaaatctttctaacatctgttattctaacaaacagtgcctttggtattgattaatattgattaatatcaaaggcattgatattaataacagtatcagtgatattaatatcactgcctttgatattatcttttgatcagaggtaaagacagctgaactcttaatgtatctacctttaagggacatcttttttacttggctctaggtgtatcataaactttgtagtaggcatctggtaacggcttggctgtgtccccatccaaatctcatcttggattgtaactcccacaagtcccacgtgttgtgggaggatcccggtgggaggtaatagaatcatgggagcgggtctttcccatgctcttctcatgatggtgaataagtctcatgagatctgatggctttaaaaacgggactttccctgcacaagctctctctctttgatgtctgccatccacgtaagatatgatttgctcctccttctgccatgattgtgaggcctctccagccatgtggaactataagtccattagacctctctcttttgtaagttgcccagtcttgggtatgtctttatcagcattgtgaaaacggactaatacagcatccaggtcagcccaggtacaagttgtaaggtagaggcagcatggaaagttaaaggcctttctggcatcgcatgaagatttgaggagctgatacagggatttgaccagatctcagcaaagcccaaacaagtcttgttcttcctcatgtgttaaaaaaatgtgttgactttctagcatccagcccacattgacttgggcaccctcaatgtagttaactccacaataatacactagagttactgaagaggctctcctgccttttaactaaccccagtaagacagatgaagcaattgagttctgtgttttacactgggaaactagccagcatccagccctcatcctccggcattctagcaaggggcaaattcatacaaggtactaaacccctcgcatacaaatgacttctctgttgttccactctttcctaataattaatcctagtgatgattaatcttttcgaacttacatcatctgaagaacggtcgtgttcgacattctggagatctgaaaagtgctctatgtgtttaatgttaataggcagccactagaaaggtgcagaataaatcgaattaatattgtctgggagtttgggatgtcgtaaccagcagaggcccaaaaatgaagtggatgctggcagaaggcatgaatcacctccctgcaacaggagaatgttcttatgattttttaatgaccccctgaaaatgaatgtgcactattaagtgacaacgtggagtggctccgcggaagatggatgatacacacttgtgatgttgctcatgttttatggttaactgcctggaattcttcagagttcttttcatagcagttgaaggctgaaaggcacacagaaatgaccaactcaattctgtcaacatttgctgagtgttctttttctgtgtcaggccctgggaactggagcttatcttacacaaatctatggggggaaagattgtggccattttaaagtgtcaccagcaaacaggccctcttggccactctcaccagcattcataactgttgccattggaactccagtaggcaaaaacctagctccttatatttgtaattcatgagtcactgtggagatggaatacttacttttttctgtgtttatgaattgaatttctttttggtgaataatcagctcatttccttggcctatgtgtttcaggggtttttcctctgggttatgtgaggacttggtatcaataaagatgctggccctttgttttaatggattctcctcaccaacatttatctttcttctattttataacagccatcttaacaggtgtgaggtgctatctcattgtggttttgatttgcatttctccgatgattggtaatgttgagcagctggtcatacacctgttggccgtttggatgtcttccttgagaaatgtctatttgcatcctgtgtccattttttaatcaggttatattttcctgctattgagttgtttgagttccttgtatattttggatattaaccccttatcagacctattttgcaaacagtttcttccatttgaatccagttccgagtagctgaatgactaaggttcccgcttctggttggctctcagctgggggctgccctgagctctggaggcccccagaacccagaacaagcaatggcatgttgagtccttttcattcttggaatccgacttcctgttctcctgcttctcctctgtggttgtcttctgccatccctctcttctgctttc

SEQ ID NO: 460873 - DNA, 1373 bp, Homo sapiens
  misc_feature (5)..(5): n is a, c, g, or t
  misc_feature (15)..(15): n is a, c, g, or t
gctcnggctgagggnccgcgggacccggggaacgcggcctggaggacgaggaggactgggttcccggaggcaacaggaccggctcggcatctacagctactggcaggacacgtcctcacagaaaattgaagacttgatggaaatggtgcaaaagctgcagaaagtgggaagcctagagccccgagttgaggtcctgattaaccggattaatgaggtccagcaagcaaaaaagaaagccaataaagacctaggagaggcccggaccatctgtgaggccctgcagaaggaactggactcgctgcatggagagaaagtacacctgaaggagatcttgagcaaaaaacaagagaccctgaggatcctccggctgcattgccaggaaaaggaaagtgaggcacacaggaagcacaccatgttgcaggagtgcaaggagagaatttctgccctgaacttgcagattgaagaagagaagaacaaacagagacagctgaggttggcattcgaggaacagctggaagatctgatgggccagcacaaggacctctgggacttccacatgccagagcggctggcaaaggagatttgtgccctggacagcagcaaggagcagctgctcaaggaagagaagctggtcaaggcgacactggaagacgtgaagcatcagctgtgctccctgtgtggggctgagggcccctccacccttgatgagggactctttctccgcagccaggaggctgcagccacagtgcagctgtttcaggaagagcacaggaaggctgaggagctcctagcagctgctgcccagcgccaccagcagctgcagcagaagtgccaacaacagcagcagaagcggcagaggctgaaggaagagctggaaaagcatggaatgcaagtccctgcccaagcccagagcacacaagaggaagaggctggcccaggagatgtggctcccagaccaggtagaccagtgacatggtggagttgaagagagaggctcactgcagagcactgtttccatggaaaaatggaacatggcaaagtgcagaaattcttcagtcagtccaggacagacgagttctctaagatgcagttaatcatacctgtcttaaacaaactggcaatatactatcaaacatgacttttaaatcaagtggaagttagaaaatatattgaactgagtggcaatgaagacaccacattttaaaactgtaattcagttaagcccacaattagaaggaactttagcttttattggttcaccacaattttttaagaaatcaaccaatgattgttcagttaatgaataaaaggcctttgacacagttcacctattcatgtgaaaaaaaaagactaataaatagtcagcttccctt

SEQ ID NO: 460874 - DNA, 2605 bp, Homo sapiens
agcggaatcaccactggaggctccctcccgaggcaccctcgctggcgagctgagaggaaatggcggggaggtccctgacatcgaaggccgagcccaccgcaggagccgtggacagggctgagaaggccggagacgagattgtgctttgttgcccaggctggagtgcagtggtacaatcactgctcactgcagccttgacctcctggcctcaagagattctcccacctcagcctcttgagtagctggaatcacagggcaggacacgtcctcacagaaaattgaagacttgatggaaatggtgcaaaagctgcagaaaggtcgtgtgtctcctttgtgtgaggcacagcctgaggtttggggccaggcagatgtgggtttaatttcaggccccacaatgtacgaatttgggaaataatcctcttcaccttctctttcttttaaaacttaattacttaaactaaaaatagggccccatgtttcaaaattaaagaagcaaaagggtatagaaggcaaaatgttttcccaaaaccctgtcccaaacctctcgctggtcacccatctggctccactgcagtccattagatccagaagttgccgccttcacttcccttccttccccctcacccgctactccctctttgctcgctaggctcctgccagccatgttcccacctcatgatgggtctttgcactgactacctcccaaccccacccaaattgctgcagggcctgccccccaccacttgatttggggccctcaggtcccttcccatatctcaggagcacttcccactcctttgctctttagcctcccttggcctacttcatttctcttgaacacggttaccgcagccccattcggtatcttattgtgtctgttcccagtcttgcccacccagaacgtgagccccgtgagggccccacagagcacctgcttgcaggaggtactcaatagatctgtgttgcgtgaaagcagcagagacacaaggctggcaaccgccccaactctgcctgccctgtcaactcaacctcctttcctccgtgcagtgggaagcctagagccccgagttgaggtcctgattaaccggattaatgaggtccagcaaggtgagttcaggggccttggctgccagctaggaccagctgcatggtttgcggggctcagtgccaagtgagaatgcagggtcccttgttccaaagttactggttattcacaacagcaacagcagagccttaaattaagtacagggcatttcagcatgcgactgccatagttacatgcccatgatcctggccctgctatcagcagagcctggcaaggagagctggaagcctcgtttcctactctataaaatctaggccactatagatttacctgaaggcaaatgagaaatgtcactgttgggaagagaatagaggctgcactcacacaatgtttttctgctctttggtgaagcaaaaaagaaagccaataaagacctaggagaggcccggaccatctgtgaggccctgcagaaggaactggactcgctgcatggagagaaagtacacctgaaggagatcttgagcaaaaaacaagagaccctgaggatcctccggctgcattgccaggaaaaggaaagtgaggcacacaggaagcacaccatgttgcaggagtgcaaggagagaatttctgccctgaacttgcagattgaagaagagaagaacaaacagagacagctgaggttggcattcgaggaacagctggaagatctgatgggccagcacaaggacctctgggacttccacatgccagagcggctggcaaaggagatttgtgccctggacagcagcaaggagcagctgctcaaggaagagaagctggtcaaggcgacactggaagacgtgaagcatcagctgtgctccctgtgtggggctgagggcccctccacccttgatgagggactctttctccgcagccaggaggctgcagccacagtgcagctgtttcaggaagagcacaggaaggctgaggagctcctagcagctgctgcccagcgccaccagcagctgcagcagaagtgccaacaacagcagcagaagcggcagaggctgaaggaagagctggaaaagcatggaatgcaagtccctgcccaagcccagagcacacaagaggaagaggctggcccaggagatgtggctcccagaccaggtagaccagtgacatggtggagttgaagagagaggctcactgcagagcactgtttccatggaaaaatggaacatggcaaagtgcagaaattcttcagtcagtccaggacagacgagttctctaagatgcagttaatcatacctgtcttaaacaaactggcaatatactatcaaacatgacttttaaatcaagtggaagttagaaaatatattgaactgagtggcaatgaagacaccacattttaaaactgtaattcagttaagcccacaattagaaggaactttagcttttattggttcaccacaattttttaagaaatcaaccaatgattgttcagttaatgaataaaaggcctttgacacagttcacctattcatgtgaaaaaaaaagactaataaatagtcagcttccctt

SEQ ID NO: 460875 - DNA, 2483 bp, Homo sapiens
agcggaatcaccactggaggctccctcccgaggcaccctcgctggcgagctgagaggaaatggcggggaggtccctgacatcgaaggccgagcccaccgcaggagccgtggacagggctgagaaggccggagggcaggacacgtcctcacagaaaattgaagacttgatggaaatggtgcaaaagctgcagaaaggtcgtgtgtctcctttgtgtgaggcacagcctgaggtttggggccaggcagatgtgggtttaatttcaggccccacaatgtacgaatttgggaaataatcctcttcaccttctctttcttttaaaacttaattacttaaactaaaaatagggccccatgtttcaaaattaaagaagcaaaagggtatagaaggcaaaatgttttcccaaaaccctgtcccaaacctctcgctggtcacccatctggctccactgcagtccattagatccagaagttgccgccttcacttcccttccttccccctcacccgctactccctctttgctcgctaggctcctgccagccatgttcccacctcatgatgggtctttgcactgactacctcccaaccccacccaaattgctgcagggcctgccccccaccacttgatttggggccctcaggtcccttcccatatctcaggagcacttcccactcctttgctctttagcctcccttggcctacttcatttctcttgaacacggttaccgcagccccattcggtatcttattgtgtctgttcccagtcttgcccacccagaacgtgagccccgtgagggccccacagagcacctgcttgcaggaggtactcaatagatctgtgttgcgtgaaagcagcagagacacaaggctggcaaccgccccaactctgcctgccctgtcaactcaacctcctttcctccgtgcagtgggaagcctagagccccgagttgaggtcctgattaaccggattaatgaggtccagcaaggtgagttcaggggccttggctgccagctaggaccagctgcatggtttgcggggctcagtgccaagtgagaatgcagggtcccttgttccaaagttactggttattcacaacagcaacagcagagccttaaattaagtacagggcatttcagcatgcgactgccatagttacatgcccatgatcctggccctgctatcagcagagcctggcaaggagagctggaagcctcgtttcctactctataaaatctaggccactatagatttacctgaaggcaaatgagaaatgtcactgttgggaagagaatagaggctgcactcacacaatgtttttctgctctttggtgaagcaaaaaagaaagccaataaagacctaggagaggcccggaccatctgtgaggccctgcagaaggaactggactcgctgcatggagagaaagtacacctgaaggagatcttgagcaaaaaacaagagaccctgaggatcctccggctgcattgccaggaaaaggaaagtgaggcacacaggaagcacaccatgttgcaggagtgcaaggagagaatttctgccctgaacttgcagattgaagaagagaagaacaaacagagacagctgaggttggcattcgaggaacagctggaagatctgatgggccagcacaaggacctctgggacttccacatgccagagcggctggcaaaggagatttgtgccctggacagcagcaaggagcagctgctcaaggaagagaagctggtcaaggcgacactggaagacgtgaagcatcagctgtgctccctgtgtggggctgagggcccctccacccttgatgagggactctttctccgcagccaggaggctgcagccacagtgcagctgtttcaggaagagcacaggaaggctgaggagctcctagcagctgctgcccagcgccaccagcagctgcagcagaagtgccaacaacagcagcagaagcggcagaggctgaaggaagagctggaaaagcatggaatgcaagtccctgcccaagcccagagcacacaagaggaagaggctggcccaggagatgtggctcccagaccaggtagaccagtgacatggtggagttgaagagagaggctcactgcagagcactgtttccatggaaaaatggaacatggcaaagtgcagaaattcttcagtcagtccaggacagacgagttctctaagatgcagttaatcatacctgtcttaaacaaactggcaatatactatcaaacatgacttttaaatcaagtggaagttagaaaatatattgaactgagtggcaatgaagacaccacattttaaaactgtaattcagttaagcccacaattagaaggaactttagcttttattggttcaccacaattttttaagaaatcaaccaatgattgttcagttaatgaataaaaggcctttgacacagttcacctattcatgtgaaaaaaaaagactaataaatagtcagcttccctt

SEQ ID NO: 460876 - DNA, 2536 bp, Homo sapiens
agcggaatcaccactggaggctccctcccgaggcaccctcgctggcgagctgagaggaaatggcggggaggtccctgacatcgaaggccgagcccaccgcaggagccgtggacagggctgagaaggccggagacgagattgtgctttgttgcccaggctggagtgcagtggtacaatcactgctcactgcagccttgacctcctggcctcaagagattctcccacctcagcctcttgagtagctggaatcacagggcaggacacgtcctcacagaaaattgaagacttgatggaaatggtgcaaaagctgcagaaaggtcgtgtgtctcctttgtgtgaggcacagcctgaggtttggggccaggcagatgtgggtttaatttcaggccccacaatgtacgaatttgggaaataatcctcttcaccttctctttcttttaaaacttaattacttaaactaaaaatagggccccatgtttcaaaattaaagaagcaaaagggtatagaaggcaaaatgttttcccaaaaccctgtcccaaacctctcgctggtcacccatctggctccactgcagtccattagatccagaagttgccgccttcacttcccttccttccccctcacccgctactccctctttgctcgctaggctcctgccagccatgttcccacctcatgatgggtctttgcactgactacctcccaaccccacccaaattgctgcagggcctgccccccaccacttgatttggggccctcaggtcccttcccatatctcaggagcacttcccactcctttgctctttagcctcccttggcctacttcatttctcttgaacacggttaccgcagccccattcggtatcttattgtgtctgttcccagtcttgcccacccagaacgtgagccccgtgagggccccacagagcacctgcttgcaggaggtactcaatagatctgtgttgcgtgaaagcagcagagacacaaggctggcaaccgccccaactctgcctgccctgtcaactcaacctcctttcctccgtgcagtgggaagcctagagccccgagttgaggtcctgattaaccggattaatgaggtccagcaaggtgagttcaggggccttggctgccagctaggaccagctgcatggtttgcggggctcagtgccaagtgagaatgcagggtcccttgttccaaagttactggttattcacaacagcaacagcagagccttaaattaagtacagggcatttcagcatgcgactgccatagttacatgcccatgatcctggccctgctatcagcagagcctggcaaggagagctggaagcctcgtttcctactctataaaatctaggccactatagatttacctgaaggcaaatgagaaatgtcactgttgggaagagaatagaggctgcactcacacaatgtttttctgctctttggtgaagcaaaaaagaaagccaataaagacctaggagaggcccggaccatctgtgaggccctgcagaaggaactggactcgctgcatggagagaaagtacacctgaaggagatcttgagcaaaaaacaagagaccctgaggatcctccggctgcattgccaggaaaaggaaagtgaggcacacaggaagcacaccatgttgcaggagtgcaaggagagaatttctgccctgaacttgcagattgaagaagagaagaacaaacagagacagctgaggttggcattcgaggaacagctggaagatctgatgggccagcacaaggacctctgggacttccacatgccagagcggctggcaaaggagatttgtgccctggacagcagcaaggagcagctgctcaaggaagagaagctggtcaaggcgacactggaagacgtgaagcatcagctgtgctccctgtgtggggctgagggcccctccacccttgatgagggactctttctccgcagccaggaggctgcagccacagtgcagctgtttcaggaagagcacaggaaggctgaggagctcctagcagctgctgcccagcgccaccagcagctgcagcagaagtgccaacaacagcagcagaagcggcagaggctgaaggaagagctggaaaagcatggaatgcaagtccctgcccaagcccagagcacacaagaggaagaggctggcccaggagatgtggtaagccccagaagtgggcgtcagggaacagaaacagctactgaagggacagcggaaggggcgggaggacaagggagggggtcctgggactcctcagaggatggtctatggggagggcctttcccatactgggtccacccaaggtggtgatggggcaggaggggaccatgtggccatggggatgggtgtaaattcccaccctggacactaacctcctgcaggccagtcccaagcccctaaaaggagaaagacctggagctgcacaccaagcagggcctgatgtcctcataggccaggaggacacactccaccccgaccttagcccaaggggctttcaggaaataaaggagctattttg

SEQ ID NO: 460877 - DNA, 910 bp, Homo sapiens
agaaatcctcagcttgcagggagtcaatcaactaggatgtaagtcatgtgcatctgatacatgtttcaaattcactgaaatgcgttgacccaatcaagaccaatggtgggagtcaaagtctgcatctcctgagtcagaatgcattgaagtaatgacaaagcgatcccttttcttgacaggctcccagaccaggtagaccagtgacatggtggagttgaagagagaggctcactgcagagcactgtttccatggaaaaatggaacatggcaaagtgcagaaattcttcagtcagtccaggacagacgagttctctaagatgcagttaatcatacctgtcttaaacaaactggcaatatactatcaaacatgacttttaaatcaagtggaagttagaaaatatattgaactgagtggcaatgaagacaccacattttaaaactgtaattcagttaagcccacaattagaaggaactttagcttttattggttcaccacaattttttaagaaatcaaccaatgattgttcagttaatgaataaaaggcctttgacacagttcacctattcatgtgaaaaaaaaagactaataaatagtcagcttcccttagatttattggtgagatgtttgaagaatttcatgttgggaataactcaaggatgtctgcaatattcaaatactgttcattatactggaagttctatacagtgaaatagttaagacagatttatgattatatgctttgtgaatcaatctacagataaatttcagaatgtctaaatgagtataaaagtttgctaaatacaggtcaatattttaaaatcacctttatgtctcaatgctagggcacaggacccacaaaacacatcacttaggaatctacggttggttgatagaaaaggatacaataaa

SEQ ID NO: 460878 - DNA, 411 bp, Homo sapiens
tcacagtgcttgcaggtttatctgttgtaaataacaatccatgagcatccccactgcagtaccgcagagatgtgggatgacagaagtgcacagggagggaatggccagtgccatggccctgaggctgtactgtagctggtgtgcacagaggggcagagttgttggaagtgaggcatagtgagtaagtatgaaacaagatccagatagccttctttgaggcatgggggaaagccaagaggagtggacaggcctcttttctgcccctcagatgccagagcggctggcaaaggagatttgtgccctggacagcagcaaggagcagctgctcaaggaaggtgagaccagggaaggtggatggcccatatctgacctcacgtgccttcatgtgctcacctgcccctttgtgctgca

SEQ ID NO: 460879 - DNA, 1677 bp, Homo sapiens
  misc_feature (5)..(5): n is a, c, g, or t
  misc_feature (15)..(15): n is a, c, g, or t
gctcnggctgagggnccgcgggacccggggaacgcggcctggaggacgaggaggactgggttcccggaggcaacaggaccggctcggcatctacagctactggcaggacacgtcctcacagaaaattgaagacttgatggaaatggtgcaaaagctgcagaaagtgggaagcctagagccccgagttgaggtcctgattaaccggattaatgaggtccagcaagcaaaaaagaaagccaataaagacctaggagaggcccggaccatctgtgaggccctgcagaaggaactggactcgctgcatggagagaaagtacacctgaaggagatcttgagcaaaaaacaagagaccctgaggatcctccggctgcattgccaggaaaaggaaagtgaggcacacaggaagcacaccatgttgcaggagtgcaaggagagaatttctgccctgaacttgcagattgaagaagagaagaacaaacagagacagctgaggttggcattcgaggaacagctggaagatctgatgggccagcacaaggacctctgggacttccacatgccagagcggctggcaaaggagatttgtgccctggacagcagcaaggagcagctgctcaaggaagagaagctggtcaaggcgacactggaagacgtgaagcatcagctgtgctccctgtgtggggctgagggcccctccacccttgatgagggactctttctccgcagccaggaggctgcagccacagtgcagctgtttcaggaagagcacaggaaggctgaggagctcctagcagctgctgcccagcgccaccagcagctgcagcagaagtgccaacaacagcagcagaagcggcagaggctgaaggaagagctggaaaagcatggaatgcaagtccctgcccaagcccagagcacacaagaggaagaggctggcccaggagatgtggctcccagaccaggtagaccagtgacatggtggagttgaagagagaggctcactgcagagcactgtttccatggaaaaatggaacatggcaaagtgcagaaattcttcagtcagtccaggacagacgagttctctaagatgcagttaatcatacctgtcttaaacaaactggcaatatactatcaaacatgacttttaaatcaagtggaagttagaaaatatattgaactgagtggcaatgaagacaccacattttaaaactgtaattcagttaagcccacaattagaaggaactttagcttttattggttcaccacaattttttaagaaatcaaccaatgattgttcagttaatgaataaaaggcctttgacacagttcacctattcatgtgaaaaaaaaagactaataaatagtcagcttcccttagatttattggtgagatgtttgaagaatttcatgttgggaataactcaaggatgtctgcaatattcaaatactgttcattatactggaagttctatacagtgaaatagttaagacagatttatgattatatgctttgtgaatcaatctacagataaatttcagaatgtctaaatgagtataaaagtttgctaaatacaggtcaatattttaaaatcacctttatgtctcaatgctagggcacaggacccacaaaacacatcacttaggaatctacggttggttgatagaaaaggatacaataaa

SEQ ID NO: 460880 - DNA, 1114 bp, Homo sapiens
agcggaatcaccactggaggctccctcccgaggcaccctcgctggcgagctgagaggaaatggcggggaggtccctgacatcgaaggccgagcccaccgcaggagccgtggacagggctgagaaggccggagggcaggacacgtcctcacagaaaattgaagacttgatggaaatggtgcaaaagctgcagaaagtgggaagcctagagccccgagttgaggtcctgattaaccggattaatgaggtccagcaagcaaaaaagaaagccaataaagacctaggagaggcccggaccatctgtgaggccctgcagaaggaactggactcgctgcatggagagaaagtacacctgaaggagatcttgagcaaaaaacaagagaccctgaggatcctccggctgcattgccaggaaaaggaaagtgaggcacacaggaagcacaccatgttgcaggagtgcaaggagagaatttctgccctgaacttgcagattgaagaagagaagaacaaacagagacagctgaggttggcattcgaggaacagctggaagatctgatgggccagcacaaggacctctgggacttccacatgccagagcggctggcaaaggagatttgtgccctggacagcagcaaggagcagctgctcaaggaagagaagctggtcaaggcgacactggaagacgtgaagcatcagctgtgctccctgtgtggggctgagggcccctccacccttgatgagggactctttctccgcagccaggaggctgcagccacagtgcagctgtttcaggaagagcacaggaaggctgaggagctcctagcagctgctgcccagcgccaccagcagctgcagcagaagtgccaacaacagcagcagaagcggcagaggctgaaggaagagctggaaaagcatggaatgcaagtccctgcccaagcccagagcacacaagaggaagaggctggcccaggagatgtggccagtcccaagcccctaaaaggagaaagacctggagctgcacaccaagcagggcctgatgtcctcataggccaggaggacacactccaccccgaccttagcccaaggggctttcaggaaataaaggagctattttg

SEQ ID NO: 460881 - DNA, 1708 bp, Homo sapiens
agcggaatcaccactggaggctccctcccgaggcaccctcgctggcgagctgagaggaaatggcggggaggtccctgacatcgaaggccgagcccaccgcaggagccgtggacagggctgagaaggccggagggcaggacacgtcctcacagaaaattgaagacttgatggaaatggtgcaaaagctgcagaaagtgggaagcctagagccccgagttgaggtcctgattaaccggattaatgaggtccagcaagcaaaaaagaaagccaataaagacctaggagaggcccggaccatctgtgaggccctgcagaaggaactggactcgctgcatggagagaaagtacacctgaaggagatcttgagcaaaaaacaagagaccctgaggatcctccggctgcattgccaggaaaaggaaagtgaggcacacaggaagcacaccatgttgcaggagtgcaaggagagaatttctgccctgaacttgcagattgaagaagagaagaacaaacagagacagctgaggttggcattcgaggaacagctggaagatctgatgggccagcacaaggacctctgggacttccacatgccagagcggctggcaaaggagatttgtgccctggacagcagcaaggagcagctgctcaaggaagagaagctggtcaaggcgacactggaagacgtgaagcatcagctgtgctccctgtgtggggctgagggcccctccacccttgatgagggactctttctccgcagccaggaggctgcagccacagtgcagctgtttcaggaagagcacaggaaggctgaggagctcctagcagctgctgcccagcgccaccagcagctgcagcagaagtgccaacaacagcagcagaagcggcagaggctgaaggaagagctggaaaagcatggaatgcaagtccctgcccaagcccagagcacacaagaggaagaggctggcccaggagatgtggctcccagaccaggtagaccagtgacatggtggagttgaagagagaggctcactgcagagcactgtttccatggaaaaatggaacatggcaaagtgcagaaattcttcagtcagtccaggacagacgagttctctaagatgcagttaatcatacctgtcttaaacaaactggcaatatactatcaaacatgacttttaaatcaagtggaagttagaaaatatattgaactgagtggcaatgaagacaccacattttaaaactgtaattcagttaagcccacaattagaaggaactttagcttttattggttcaccacaattttttaagaaatcaaccaatgattgttcagttaatgaataaaaggcctttgacacagttcacctattcatgtgaaaaaaaaagactaataaatagtcagcttcccttagatttattggtgagatgtttgaagaatttcatgttgggaataactcaaggatgtctgcaatattcaaatactgttcattatactggaagttctatacagtgaaatagttaagacagatttatgattatatgctttgtgaatcaatctacagataaatttcagaatgtctaaatgagtataaaagtttgctaaatacaggtcaatattttaaaatcacctttatgtctcaatgctagggcacaggacccacaaaacacatcacttaggaatctacggttggttgatagaaaaggatacaataaa

SEQ ID NO: 460882 - DNA, 2935 bp, Homo sapiens
  misc_feature (1)..(2): n is a, c, g, or t
  misc_feature (6)..(7): n is a, c, g, or t
nncgtnngagctgatgaggaactgacgacccagagtcggcctgtgtgaggcccgtacaggtggctcccgaagtctttagcggcacagggtcggtccctccaggccgacctggtaaaattcccgcatctcccgcaggccgcccttctctggcccctggaccccgggctcctggcccgcgcgcaccaggagctgtccgcggtgctgaccgcaggcgcttcccgcgctcggccgatgcgcacgcgtcccgggaggggcgcgcgggacctgccggcgccgccactgcgcagcctcccgcggcctccccgcccggcgcagcctcccgcggccttcccgccgccgctctcgcccgggccggccatggcgctcaacaatttccttttcgctcagtgcgcctgctacttcttggccttcctgttcagcttcgtggtggtggtcccgctgtccgagaacggccacgacttccgcggccgctgcctgctcttcaccgagggcatgtggctgagcgccaacctcacggtgcaggagcgcgagcgcttcacggtgcaggagtggggcccgccggccgcctgccgcttcagcctgctcgccagcctcctgtctctgctgctggccgccgcgcacgcctggcgcacgctcttcttcctatgcaagggacacgagggctccttcttctccgccttcctgaacctcctggtcagcgccttcgtggtcttcctggtcttcattgccagcaccatcgtgagcgtgggcttcaccatgtggtgcgacaccatcaccgagaagggcaccgtaccccacagctgtgaagagctccaggacatcgacttggagctgggcgtggacaactccgccttctacgatcagtttgcaattgcccagtttggcctctgggcctcatggctggcctggctggccatcaccacgctggccttcctgaaggtctaccacaactaccgtcaggaggacctgctggacagcctgatccacgagaaggagctgctgctggcccggccgtccccacgcacctccttccaagaggagaagagcgctgtcatttaggcacagtgcaggcagggggagctggccccgacctccctgctgcgctcgggggcacgggcctgcctggggaagcagctggggcgctctgcctgggccctggccacatgcagccctgcgtgtgtcccctcgacgccacgtgtagtgaggtgagcgccccagtgcccacctgtgagcctggcagtggactgggtgggtgccggctccctgatgaggatggtgcagagagactatgggtgtggggcgggggcggggggcacctccaggcctcgcacagggccccttggctgtcccagtaggacctgactggccagcctatgtggagggcgtccagcttgtctcccccaaccctggccggatgctgtctccatgccagctggcccaggggtggccagatgtcacttagccctgaacgaattctgcatgaattctgccatccaggcagaggctgcgtgtggggaggagctcacggcaccttccagcctctggccccaggttggccccctccccagctgagtccccctcctggaatatggggcaggaacctgcccatcctccttcctggggtggggtgggatgggctgggcctggggagagatgctggagggtccccgggggagcccccaccatggtcccttctgggccacttctggaaacagccccttttgttacctccacccgcaactctgggctccctggattccaaagctggaagtgaccctggagaccacttcacctgttccctggcacctggagttgcagggacacaccctgactgcagggcaaagggagccggccgggcatccctcaagacccaggggcttggtcagcccctgcccgagtggacacatccactcccaggcctgcaggagatggggaggttccaggcgcccaggacatccgctttggccactgaggccgattccttagcaaatcggttctggtttctctcatttctataaaaacaccaagactgaaggaagccacggtgtgttttaataaaacagtgtctcccagttaagtggtgggacaaacaggaaccaccgggtggatggtcggccgtgcccacccgcctcaggctaacctcgaggacgctggtctgattgtccctgtgtctctcctgggcagttctgcctggtgtctaaccgtgggcctccctgctttgttcagccctccccccacgtagggtcgggggtgtctgggccccttgctgtcccctcggcttctacacctgaagccgcccctgatgaggggtccttccctggggcctctccagactcacggggctgggtaggggggtcagacctgggctcagaggatggcacctcacatcaaagggacccaccttgacaaccagacccttccctccccgtggggtttcgaggtctggattccccacaagccataatcgcaaaaggctgggtttgcctcctccgagcagccccttgaacacgggcagtgtgtccccctcctcaagagggtgcacacggtgatggccgggccaggccctagcagcagcaggagttcctgctgggacgagggaggggtctttgggtgagcctggggagcctcaactgttagcagtcgaatcctctttctaataaaatctcacatggacccaacacaggagacaggagggctgtgctgactagtgtggcggggccgcctgctgtgccccccatgtccgatctcacgccacggggtcccccttttcctagttagccctcaggcagcagccccttttggcccccatgattcaccaagcagcagggccagggctcaggctgtctcggagcccccggagtgcttgagctctcctggaagccctgcccgtcctgcccgtcctgcccgtcagagccgcaggaggccgcgccagcag

SEQ ID NO: 460883 - DNA, 525 bp, Homo sapiens
tgcatgaaaaataacgctattgatatcttggcaccactgggagaaaggagggggttgagctctggaagtcagacacagcaatggtatgcagagaacccaacctgtacctttcccattaaaactcggcgcctcctatccctggggtatacacggctatatcctctttgacatccggattttgatttgtcttacaactcccacccgctccaaagtctgggttggggaggtgggagtaccatgtggtgcaacaccattaccgacaagggcaccgaaccccacagctgtgaagagctccaggacatcgacttggagctgggcgtggacaactccgccttctacgatcagtttgcaattgcccaggtccaattccggaccccaggctggcctctgaaggctcttgctggccgtggctggcctgaggacgcttctcctggccaggagccctccaagggtgctggacgtgggtgggcctgaatgctctttgccgagatgaactggacctgtcaaagacaccttcatgcaaat

SEQ ID NO: 460884 - DNA, 1044 bp, Homo sapiens
  misc_feature (1)..(2): n is a, c, g, or t
  misc_feature (6)..(7): n is a, c, g, or t
nncgtnngagctgatgaggaactgacgacccagagtcggcctgtgtgaggcccgtacaggtggctcccgaagtctttagcggcacagggtcggtccctccaggccgacctggtaaaattcccgcatctcccgcaggccgcccttctctggcccctggaccccgggctcctggcccgcgcgcaccaggagctgtccgcggtgctgaccgcaggcgcttcccgcgctcggccgatgcgcacgcgtcccgggaggggcgcgcgggacctgccggcgccgccactgcgcagcctcccgcggcctccccgcccggcgcagcctcccgcggccttcccgccgccgctctcgcccgggccggccatggcgctcaacaatttccttttcgctcagtgcgcctgctacttcttggccttcctgttcagcttcgtggtggtggtcccgctgtccgagaacggccacgacttccgcggccgctgcctgctcttcaccgagggcatgtggctgagcgccaacctcacggtgcaggagcgcgagcgcttcacggtgcaggagtggggcccgccggccgcctgccgcttcagcctgctcgccagcctcctgtctctgctgctggccgccgcgcacgcctggcgcacgctcttcttcctatgcaagggacacgagggctccttcttctccgccttcctgaacctcctggtcagcgccttcgtggtcttcctggtcttcattgccagcaccatcgtgagcgtgggcttcaccatgtggtgcgacaccatcaccgagaagggcaccgtaccccacagctgtgaagagctccaggacatcgacttggagctgggcgtggacaactccgccttctacgatcagtttgcaattgcccaggtccaattccggaccccaggctggcctctgaaggctcttgctggccgtggctggcctgaggacgcttctcctggccaggagccctccaagggtgctggacgtgggtgggcctgaatgctctttgccgagatgaactggacctgtcaaagacaccttcatgcaaat

SEQ ID NO: 460885 - DNA, 3365 bp, Homo sapiens
caccaatggggtaggagctaccccatcgctgtcttgcagatgagaaacagagattgcaggggatctcgctgcattcccacagagccggtaaatggtactgcaggtctctgacagcctcagggaatgtcaccttgtgatgtgaagtagatgcagtgtagcctctgggatgcatttctggggcctcggctggtcatactgcctgtgcaaggggtataaatcagggcttgcaaatgcactggcccacggaggctgccaggacggggagcaggctgtcctggggagtgaggaagacgtaccaaagcgaagatgttttgtgtttcctcaggatgccaagtttgtggaggaacggagaaagcagctccagaattacctgcgcagcgtcatgaacaaagtcatccagatggtccccgagttcgctgccagccccaagaaggagaccctcatccagctgatgcccttcttcgtgaggcgctgccccatccgcaagtcagtgtcccccaccccctgcggggtccacagcccaggcatctccggtccagtgtttcccaaacattcgcatggcagagatccccggggagatgtgaggtaccgttcgtggagggaggctcggactccaagaattcgctcagtgagactggaccgcaaatcggtgacagcttcagtgatttgccgtgctgtcatttagcgcattattaaaatggttttctgcagagtaatttaactttgggaaatacattatgttctcctgctccttgaggagagagaaagttagggggctggaaggtggcagagtaatgtaggtcacagcacaaattcccaactggattttcagcagaaaacccagtctgggtttcccccgccgccgcccccatttgctgctgcattctctcttagggttgtgaaatatatccattttttgctgaaatatgagctgccttgttctcccagtgagcagctgcaccctcccccacctctaagcccttgtccctccccctctagttttgtcttttcaagaatgtcacataaatggaatcatactgtaagcaacctcttgaggctggcgtctttcagcatgtgtgagaaccgtcaagtcgttgggtgagtcagcagtgtttttattactgagcagagtttggttaaatggatataccacggtttatctagtcataaaggaataaagttgcgttggttccagttgttggcaatcttgaatagagctagtggaaacattcaagtgcagctttttgtgtgaacaaaagttttcatttctgtgcggcaaatacttaagagttgaggactggatcctatgctaaatgtaagaaactgcattcccacagtgtatgaggggcccagttgctctgcaccctgggcagcatgtcatactgtcatgattctttactgtggctgttcacaaggatgcagaatatttcatcatggtcttaatttgcattttcctaatgagtaatgatgttgagcatattttcatgtggatgttttcctttaacacatcctctttggggaagtaagtaagtgtccaagtattttgcctgttcttagaaactaggctgtttgtggttttacaaagatttgagttttgggagttctttgtatatgttagatgcaagacctttgtcgaacatggcttgtggacggataggatgccagtgactctcctcctgcaactgtggcaagaccgtgtgtcctgtcagagtgggtgaccagggcctttgccagcagacgacttatggagaaatgtttgagtagatggaggaaccgatttcctctggaatccagagtgctgataaagacatacctgagactgtgcaatttacagaaagaaggtttaatggactcacagttccatgtggctggggaggcctcacaatcaccgtggaaggcaaggagcaagtcacttaagctctttgcatggcaccatcgatgtgagctaggaaactcttccctatgaaaccatcacattcactgtcagaagaacagcacaggaaagactcgcccctgtgattcaattatctcccaatgggtccctcccatgatacatgggaattcaagatgacacatggtttggctgtgtccccacccaaggataatacaggtggaacataaatgccagcttgatctattgataattataaacaattaccaagaagagtggataaatcttcctttttgaatccatctagacccactgtgattaaagctattattttgactagaaaactaagaagataggagaaaattagacatttaaacagctaccttccatgcaacaattaaaggaaattttaaatacagaaaattaggattgctttcaaaatatatgaaaataaagggattaagattatacagtcaccaccccagtgtttcttggcacctgagaaacatgttggttaacttttctcccatgaggcgctccctgtctttccctgcgtgtctgctgggctgctggcccctcaggttgctttgtaggagacactcatgtctgtttacatcacaccaacttgtaacaccatctgcgtggctttcaattttcaagtgtttttttttgttcacttgtcctgtggactcatgccatgtcaccgtagtgctgagtgacgcttaaagggtgcttttcttattaatcttatagaattaatttctgctttcattgagaagtatgggttattactcttatgttctcaaagtgatggttggagtggttaaatcgctttgtcgccatgacacatcccagatgttgctgagtctgaaatgtaacctagggtcttccaattgtgaggttggtttcatggcgtcacaccccacctccctaaagctggcaagaaatccgaggtcctgtggggccagcgggcattggtctgctatagacgagctagaccaggacagaccacttgcacttcactcacctggttgagtataccagtcgtaattgtaggcactggcgatatagtacagaagatgacacttcagatggctacagatgctgtgaagaaactccaaggaactcttaggcgaaggccaaaagcacgaggaggagttagggcatggcaggcagtccccgtgttgccagaggaagtgacgatgggattacagctgtgggaaacatttgcatttgattctgaacacagtgggaagctatggaagggtttggggtctgaggaagggtcaaggcaagaagggacggtgtctgggtttaggagacacagcagagacagaagtggaagcagtagtcatgtgtctggaggcagaagccaaacgccagtgggtcttggattttgtttggaatgtgaataaagaaaaattaaggtgcccccagagttctggtttgagcattggagtcaacagttgccccc

SEQ ID NO: 460886 - DNA, 937 bp, Homo sapiens
gaggtggaggaggcgggcgcggcccggcgccgcggccgccccgccgagctgtgcttctactcgggccgtgtgctcggccaccccggctccctcgtctcgctcagcgcctgcggcgccgccggcggcctggttggcctcattcagcttgggcaggagcaggtgctaatccagcccctcaacaactcccagggcccattcagtggacgagaacatctgatcaggcgcaaatggtccttgacccccagcccttctgctgaggcccagagacctgagcagctctgcaaggttctaacagaaagattaatcagattaatccaagctttcccatgggaacatgctcttcctggctgaacatggcagccataggtttcgtgccctgttggtgaccctgtgttatgatagccttggacatggtctgagagtagccttgccggctcttgtagagttctgcagcgtctacataaagcatagtgtcagtgtctgtttctggtggaagatgaaggggagccagcgtgtcacatggggagagaagggagcaagagagaagggaacgagagagagcgaagaggccctcagcccctctggcttttgggtcactgctgaaaagcacacgtcccatttacaggacactgtcctttgctctgctcttggctgcttcagccttggctcaaggccaccccctgcccccagtgctattctaccctctttgggagtcccctatgccctgcattatggaaaagtcttcactgagtcatttcatatgcacttctgccagatgccccagggctcttccacaagtgcacatgtcatctctccttcagtgcttatccttaggccatcggaagcacaggatgatctacttgtgtgtgtagcacaggcttggggatttgtactggggaccctgcccatgtcccgctggtatcctgaactctgaatg

SEQ ID NO: 460887 - DNA, 609 bp, Homo sapiens
  misc_feature (432)..(432): n is a, c, g, or t
gaggtggaggaggcgggcgcggcccggcgccgcggccgccccgccgagctgtgcttctactcgggccgtgtgctcggccaccccggctccctcgtctcgctcagcgcctgcggcgccgccggcggcctggttggcctcattcagcttgggcaggagcaggtgctaatccagcccctcaacaactcccagggcccattcagtggacgagaacatctgatcaggcgcaaatggtccttgacccccagcccttctgctgaggcccagagacctgagcagctctgcaaggttctaacagaaaagaagaagccgacgtggggcaggccttcgcgggactggcgggagcggaggaacgctatccggctcaccagcgagcacacggtggagaccctggtggtggccgacgccgacatggtgcagtaccacggggccgangccgcccagaggttcatcctgaccgtcatgaacatggtatacaatatgtttcagcaccagagcctggggattaaaatgaacattcaagtgaccaagcttgtcctgctacaacaacgtgccgctaagttgtccattgggcaccatagtgagctgtccctgaagagcttgtgtcactgg

SEQ ID NO: 460888 - DNA, 696 bp, Homo sapiens
gaggtggaggaggcgggcgcggcccggcgccgcggccgccccgccgagctgtgcttctactcgggccgtgtgctcggccaccccggctccctcgtctcgctcagcgcctgcggcgccgccggcggcctggttggcctcattcagcttgggcaggagcaggtgctaatccagcccctcaacaactcccagggcccattcagtggacgagaacatctgatcaggcgcaaatggtccttgacccccagcccttctgctgaggcccagagacctgagcagctctgcaaggttctaacagttccacagtgtctgggcctcacctgggaggacttgaaatctggaggctggagtgatctggaggtgcctcattcatgtgtctggcctggaggtggatgacttgaagacaaggacaacaacgtggagcgtctacctgtggcctctgcagcttggcgtccataccttggtggcagacatacttcttctatggccaccagggctcccaatgcaagagttcccgcaagccagcaggagctgtgctgcctttgaggatcagcctcagaaatcctagagcatcactctgaaggtactctgttggctgaagcggttagaaacctacccaggttcaagggcagagagatagaccccaccgctcaatgtcaaagaatttgggggccttatttaaaacctcttcacacctct

SEQ ID NO: 460889 - DNA, 509 bp, Homo sapiens
tgtgcttctactcgggccgtgtgctcggccaccccggctccctcgtctcgctcagcgcctgcggcgccgccggcggcctggtactgcccgcgccacctccgggtcggcccgtccggtctgttgcgacgcagagtggtcgccgtggagggtgggggtggggcgcctctgctggaagtccagcctccaggggaaccggagggaaccccctgcctttccacctctccccatcccccaccccggccttcggtaccctctataggcaaagggggtgggaggggcagcatcccagtccagcgcctctgcagcccgtggaacccgcgcggagctggggttgcgtggggtatacgccgcccgctctagggagcgcagatctggcagggatgaaactgtcagggccctggacagaggcgccttggccccaatgtagagaacactgcatctgcaccgccgtgtcaaagtgtatgtcacgggagtacctgtgtacgtgtaggtgttatgttcttggactt

SEQ ID NO: 460890 - DNA, 1181 bp, Homo sapiens
cccaggctggagtgcagtggcttgatctcggctcaccacaaccactgcctcccgggctcaagcaattctcctaactcagcctcctcagtagctggggttacagcatctgtcttaatcaatgtaggctgctataacaaaattatattacatggggtggcttaaacaacagacacttacttcttacagtactgaggctgggaagcccaagatcgaggtgctggcagatcccacacctggtgaggactcatccccatttgcagaaggccaccttcttgccgtcctcacatggcggagaggagacagaaagagatcatctctcctgtgtctcttctttgcacagagggtcacgttccgcagggctcccgcctgagcagctgctccctccacccgtgctcccgccgcccacgctgccctccagcacgtcccacccatcatagcagggtacgcgcagcctccacacacacgttcctccgagatgtctttaactctctggaggttggcgagggaggaatcccttacattgagctggtgagcaaggccatgctcgagctgaagcctctggagtcttcagacctcaccaaagtcgtggtttatggctactatttgtacaagctccagaccaagtggatgctccagtccgtggctgagtggcaccgccagcgccaggagcccttggatgaagccaaccagcttccagccaatgcgatgaaggccaggatgtagagattacattgtgcccagagctagagggattcctctagtttggtttaaactctgctccagcctgataagttaagggaaaaccacctgtttaggggtctctgaccttgctctgagtcttgctgtaaatatctctttcatggttgccagtaaaataaagttaaaaaaaaaaaaaaaaaaattaaccaggcatggtggtgtgcacctgtaatcccagctacttgggaggctgaggcaggagaatcacttgaacctgggagatggaggttgcagtgagctgagatcatgccattgcactccagcatgggcaacagagtgagaatctgtctcaaaaaaaaaaaaaaaaaattctttctttttccccacacacttacacacacacaccccatactttcctgttccttggtatgcctggtgtcgggggtccacacctggcctttggattttcctcttgtggtacc

SEQ ID NO: 460891 - DNA, 2042 bp, Homo sapiens
cgccggggaaccactgtcaggatgcggtcactggagtcactggggaccactgtcaggatgcggtcactggagtcaccggggaccactgtcaggatgcggtcactggagtcaccggggaccactgtcaggatgtggtcactggagtcactggggaccactgtcaggatgtggtcactggagtcactggagtcaccggggaccactgtcaggatgtggtcactggagtcaccggggaccactgtggcagagatgcatggcgagctgattgagttcaacgagcgcctgcacagggccctggtagccaaggaagccctcgtgtcccagatgaggcaggagctcatcgatctccggggaccggttatctacatctgcttcctcctcctatatcatttcaatcaaattctggaggttttcaacccctcagctttgctgatggtatctctgtagtgtgattcgatatgcttcttcatttcctgtatttccttaaattagaggcttggattcaggtttaattttgctgattatatgactgtgtcgttgggtggtgttttctgtcaggagatgcctaatgtttgctatctttttgtgatattaacagccatctcttatcacttcctgggtccattacacaaacgtttctttaaggtcagtacctaagtgtgaaattgcggcgttttagtgtatggcgtcttaaactttactgagttttgccattttataaagtaaaagcacctatttattaaccccctgtttgtgtgcaaaagttcctgctgacgcttttacatccctgctgtgatattttatatatttgtgttttcatccgctgttcctggcccataattcccaccataccctttttatccaatcacgttgttaatcttgattatccagtgatgtctccataaaaggcccaggaagacaggattcagggagcttccaggtagctgaataagtggagattcctggaggttgatacatggggagagcatggaagctccgcaccgcttcccataccttggcctgtgcatgtcttcactgtatcctttgtaatatcctttataatcaccagaaaatgtgtttctctgagttctgtgagctgctctagcaaattaatggaacccaagaagggggttgtgagatccgcattttattgctatttctcctcatgctcccccagggtgctggacctcctgccctgtgctgccccccacccagggcctttgttcctagtgttccctcgcctggaacactgcccagtgccagggctgcatatcagctcaacgcttcctcaggaatcctccctgaagccctgacaaggtcacactttccaagttgactatgatgctgacatgtgtctctcccttcctgtcttaatgtcatgttacattgatttatcactgatcagtgttatctttcccgcgtccacaagggcaagtttttgtttctttctgctccctttgggtttcagtgattcacatggtatcaagtataatgatggcacaatggtggggttagttacctgctggggtatgtcatggaaggtttcaaagaggagacgtttgacttgagtttttaaggatgagttgaagttgatcaggaagatgggcctgttaggcagcgggaatggtggtatcaatcgacatggtttgctcacaatattctcattgctagtttcatggatgtatcctgtggcttctccatgagataatgaagttcttgaaagtgggagtgtcatttacactcctacctgcagacagcacctgatacagagtataaagcattggctgaatgcgtgaatcttagttcccgcttttcaccttagcatcctgactaccgatgccctgaacacacatggtgaatttggctgaaatgaagcattctgtgcctgccccacaaaccaccaagggactgtgggtttatttgtctcaagatggtcaacactgctgttttcacattttacttgctgtcaaatataaagagatatcatatgttgcccgcctctggttttcctgatgtctcaatttaagtggtttccaatttgg

SEQ ID NO: 460892 - DNA, 2053 bp, Homo sapiens
cgccggggaaccactgtcaggatgcggtcactggagtcactggggaccactgtcaggatgcggtcactggagtcaccggggaccactgtcaggatgcggtcactggagtcaccggggaccactgtcaggatgtggtcactggagtcactggggaccactgtcaggatgtggtcactggagtcactggagtcaccggggaccactgtcaggatgtggtcactggagtcaccggggaccactgtggcagagatgcatggcgagctgattgagttcaacgagcgcctgcacagggccctggtagccaaggaagccctcgtgtcccagatgaggcaggagctcatcgatctccggggaccggttatctacatctgcttcctcctcctatatcatttcaatcaaattctggaggttttcaacccctcagctttgctgatggtatctctgtagtgtgattcgatatgcttcttcatttcctgtatttccttaaattagaggcttggattcaggtttaattttgctgattatatgactgtgtcgttgggtggtgttttctgtcaggagatgcctaatgtttgctatctttttgtgatattaacagccatctcttatcacttcctgggtccattacacaaacgtttctttaaggtcagtacctaagtgtgaaattgcggcgttttagtgtatggcgtcttaaactttactgagttttgccattttataaagtaaaagcacctatttattaaccccctgtttgtgtgcaaaagttcctgctgacgcttttacatccctgctgtgatattttatatatttgtgttttcatccgctgttcctggcccataattcccaccataccctttttatccaatcacgttgttaatcttgattatccagtgatgtctccataaaaggcccaggaagacaggattcagggagcttccaggtagctgaataagtggagattcctggaggttgatacatggggagagcatggaagctccgcaccgcttcccataccttggcctgtgcatgtcttcactgtatcctttgtaatatcctttataatcaccagaaaatgtgtttctctgagttctgtgagctgctctagcaaattaatggaacccaagaagggggttgtgagatccgcattttattgctatttctcctcatgctcccccagggtgctggacctcctgccctgtgctgccccccacccagggcctttgttcctagtgttccctcgcctggaacactgcccagtgccagggctgcatatcagctcaacgcttcctcaggaatcctccctgaagccctgacaaggtcacactttccaagttgactatgatgctgacatgtgtctctcccttcctgtcttaatgtcatgttacattgatttatcactgatcagtgttatctttcccgcgtccacaagggcaagtttttgtttctttctgctccctttgggtttcagtgattcacatggtatcaagtataatgatggcacaatggtggggttagttacctgctggggtatgtcatggaaggtttcaaagaggagacgtttgacttgagtttttaaggatgagttgaagttgatcaggaagatgggcctgttaggcagcgggaatggtggtatcaatcgacatggtttgctcacaatattctcattgctagtttcatggatgtatcctgtggcttctccatgagataatgaagttcttgaaagtgggagtgtcatttacactcctacctgcagacaggtatactggcacttattacataccaaatcctattccatgagctgtgcatgtagtagcaagcactgatgtaggttctcatgtctccattttagagatgacaagactaaggcacagataaggtaggcaatatccccaagtctccatgtccccatgattagtaggagatggagctgtaagtctctttttagagtcttcatgtcctcacctttatttctttacattttgtatttttaatttttttaagagacagtctcgcttgcactccagcctgggcaacaaaccaagactctgtctca

SEQ ID NO: 460893 - DNA, 2161 bp, Homo sapiens
cgccggggaaccactgtcaggatgcggtcactggagtcactggggaccactgtcaggatgcggtcactggagtcaccggggaccactgtcaggatgcggtcactggagtcaccggggaccactgtcaggatgtggtcactggagtcactggggaccactgtcaggatgtggtcactggagtcactggagtcaccggggaccactgtcaggatgtggtcactggagtcaccggggaccactgtggcagagatgcatggcgagctgattgagttcaacgagcgcctgcacagggccctggtagccaaggaagccctcgtgtcccagatgaggcaggagctcatcgatctccggggaccggttatctacatctgcttcctcctcctatatcatttcaatcaaattctggaggttttcaacccctcagctttgctgatggtatctctgtagtgtgattcgatatgcttcttcatttcctgtatttccttaaattagaggcttggattcaggtttaattttgctgattatatgactgtgtcgttgggtggtgttttctgtcaggagatgcctaatgtttgctatctttttgtgatattaacagccatctcttatcacttcctgggtccattacacaaacgtttctttaaggtcagtacctaagtgtgaaattgcggcgttttagtgtatggcgtcttaaactttactgagttttgccattttataaagtaaaagcacctatttattaaccccctgtttgtgtgcaaaagttcctgctgacgcttttacatccctgctgtgatattttatatatttgtgttttcatccgctgttcctggcccataattcccaccataccctttttatccaatcacgttgttaatcttgattatccagtgatgtctccataaaaggcccaggaagacaggattcagggagcttccaggtagctgaataagtggagattcctggaggttgatacatggggagagcatggaagctccgcaccgcttcccataccttggcctgtgcatgtcttcactgtatcctttgtaatatcctttataatcaccagaaaatgtgtttctctgagttctgtgagctgctctagcaaattaatggaacccaagaagggggttgtgagatccgcattttattgctatttctcctcatgctcccccagggtgctggacctcctgccctgtgctgccccccacccagggcctttgttcctagtgttccctcgcctggaacactgcccagtgccagggctgcatatcagctcaacgcttcctcaggaatcctccctgaagccctgacaaggtcacactttccaagttgactatgatgctgacatgtgtctctcccttcctgtcttaatgtcatgttacattgatttatcactgatcagtgttatctttcccgcgtccacaagggcaagtttttgtttctttctgctccctttgggtttcagtgattcacatggtatcaagtataatgatggcacaatggtggggttagttacctgctggggtatgtcatggaaggtttcaaagaggagacgtttgacttgagtttttaaggatgagttgaagttgatcaggaagatgggcctgttaggcagcgggaatggtggtatcaatcgacatggtttgctcacaatattctcattgctagtttcatggatgtatcctgtggcttctccatgagataatgaagttcttgaaagtgggagtgtcatttacactcctacctgcagacaggtatactggcacttattacataccaaatcctattccatgagctgtgcatgtagtagcaagcactgatgtaggttctcatgtctccattttagagatgacaagactaaggcacagataagcacctgatacagagtataaagcattggctgaatgcgtgaatcttagttcccgcttttcaccttagcatcctgactaccgatgccctgaacacacatggtgaatttggctgaaatgaagcattctgtgcctgccccacaaaccaccaagggactgtgggtttatttgtctcaagatggtcaacactgctgttttcacattttacttgctgtcaaatataaagagatatcatatgttgcccgcctctggttttcctgatgtctcaatttaagtggtttccaatttgg

SEQ ID NO: 460894 - DNA, 819 bp, Homo sapiens
tggcatacggtatggaaaggctgggggcagtaaacctcttcatgagacttcccccctactccagtttgccctccaggagagccttggaggaacgctccaggcaggtccgcctctctctgcaaaccaagccctgtgctgaggtggaggggagcagccgcatccccattcccaatccaagccctcccagatgccacactggttcccgtgttgaatctgcccgcagggagaagcaagagagagaacgttgtcatctgtgttcgggtataaaaagacaatctactgtgaagaccttagatgtctccatcctcctgctccagaagttccatcagattctttcaggctctagaatgggaatgtctctctgtggtatgcaagcaatgcctccactaactgactgcccaggctatgaagtcgagaccatgaagatcaccattctacactccgtgtcccctgctttctctgtgaaaatgtttcagcagagacatgtagtaaaattaaacctgtgaactgttttatcacaacccttcagctatgaaagccctgagccactgagtctgaataagagtacaaccaactcttgcagaaaacacagttttttcatgtgtacgtggagcattaaccaaaaccaacctttgtcaaggcataaaatatatcacaataaacaccaaataaatgaaatttaaggaatatgttatctgaccacaactagacactaaagacaagtaagattaaatcaggtagctaaaagtatccctatacttggaaattaaaactctctctctctgacacacacacacgcgtgcacacatttctaaataa

SEQ ID NO: 460895 - DNA, 782 bp, Homo sapiens
cccagcaggttcctgctgaggacctggtccgtgccggcccccgggtgatggcagtggacatgacagatgcactgggacctgcagcccagctgggagaggctggcttcccctgctggggagcctgcagccccttcatgaatcccctgcaggcgctggtggagaaacccataagcaactcacagttccagaaacggcttctgcagcaccggcctcccgcggccagcccaagggtcacgcaaggccaggagcttctccgcagggctgagggtctggagggggccctggcgtgcaagccctttgcaggtggtgacttgtggcgggaaccacttggagctgtgtggttcccatctggcctggagagaccaggggtggaacttggatgctgcctcttggggcagagcgatttccagcagggctctcttcctgaagtcacacacagctttgagcgcctggatttcaaggcaccagggggctgaaggcttctgtgtcacccccgtgctggcatcacttgaaccatcgcccatcaaatggtttctgactgggggaggactcctgttacaggctgagccatgtccctcaactttgtgtgttgcagccctgacccccagttcctcggaatgtgcctgtgtctgtagatagggtcttcagaaaggtattaataattgggctagaagccgggcgcggtggctcatgcctggaatcccagcattttgggaggccgagaccggcagaacacttgaggccaggctggtcttgaacttgtggcctcagtgatccacccg

SEQ ID NO: 460896 - DNA, 894 bp, Homo sapiens
gagggacctagaaagaaagaacatgaattcatcaatccattcagcagctattttgaacgcctcctgtgtgccagatgctgttctagaagctcagaatatctatgaacgcgataggcaatgcccccatatgccaaggccctcatatgctagccttgactcaaggaaaactgtaggatgggtaaacgattatgagggaaatgactctgaagcagaagacctgaatttcagggaggctttgccttcatcaagtcaggaaaacacacctagatcaaaggtttttgaaaataaagttaattcagagaaggtaaaactttctcttcggaatttcccacataatgattatgaggatgtttttgaagagccttcagaaagtggcagtgatcccagcatgtggacagccagaggccccttcggaagagacaggtggagcagtgaggatgaggaggctgcagggccatcacaggctctctcccctctactttctgtattccattcaccagttgaaggacactgtgttgtttccagattttggcaattatggataaaagtactacagatattcacaaactttgtgtaaacataagtttccattactttaagatacgcgcaaaattgtttctgaaggagaactagatcagttggctcagattcggccattaatattcaattttcatgagcagacagccatcaaggattgtttgaaaatccttgaggaaaaaacagcagcgtatgatatcatgcaggaatttatggtaaatattttcttaacgaaagtctatatgtgatttctttttttatatcattgccagagggtttcttttcttttctttctttatttggttttagtacattgtttttacttttaaatgttatatatattttaaagtaatagat

SEQ ID NO: 460897 - DNA, 516 bp, Homo sapiens
atggcccctgcgcaaggatgacacgcaaattcgtgaagcgttccatatttttagtgaggatgaggaggctgcagggccatcacaggctctctcccctctactttctgtattccattcaccagttgaaggacactgtgttgtttccagattttggcaattatggataaaagtactacagatattcacaaactttgtgtaaacataagtttccattactttaagatacgcgcaaaattgtttctgaaggagaactagatcagttggctcagattcggccattaatattcaattttcatgagcagacagccatcaaggattgtttgaaaatccttgaggaaaaaacagcagcgtatgatatcatgcaggaatttatggtaaatattttcttaacgaaagtctatatgtgatttctttttttatatcattgccagagggtttcttttcttttctttctttatttggttttagtacattgtttttacttttaaatgttatatatattttaaagtaatagat

SEQ ID NO: 460898 - DNA, 750 bp, Homo sapiens
gaaaaccaatgcatgaatttacaatgataattaacatagtcaagttaccatgggtgagaaagcaagacagacactcagtgtattattatagaaacaagaggacaatgaccgttatttttaacttaagaaatccacctggtcgaactactgcctgtctgccaggcagacacagctgctctcagggtctgccagagccacgttacagcctgctgggaaatatgccgatgagcgggagtttggcgtgggagtggggctttgttctggagcaagagaagatgctggtgatacttgttctaatctatgtctcaaagtttccgctgccacagagaattcaggggccccttcccagtttggagcgggtattaaagtcccaggattttcttataatagttggcatcgtgaacaggaccccagagatcaaacgatgagtcagggaggagtatctgcagagggaaccctgaggtgattggcatcaaccatgtggggtgaagttgcctggctgcttgacctttgtgggctgccatagtgactggtttaacagtaccaatacggcaacccaggctcactgggggtggcctccacccagaggcccgatcgccaatactacggagacgcaacaacatgtgcccttatagccactacctgttgtgcctattggaggatttcttgagcacaggagttcaagaccagcctggataacataatgagatcccatctctacaaaaataaaataaaataaaataaaaatta

SEQ ID NO: 460899 - DNA, 1304 bp, Homo sapiens
ggaccccggttgctagggtgtgtctccttggcctcctagagggtggggatccgtggtgcttcttcgggaacagcctcctgcaggaagaccctcgctggacctttacctcgctgcctagattccgaggaaaaggagataggagacgaaaagccagttggtttggaaagcggccgattatcctaaagggtagtgtgggagtccagcacttccatgcccctctttgggtactacggaagggagatttccagcatcgtgtggaacatatgaccagggagtacaccttgagcgcttgtgtgcagttatcttttggcggattatgaaaaacagcacttattattcattaaaatgcaaaagcccccactgcttcttcgaagacccttacctccaaaattcactaagctgtctttacatgagaaaaaaacccatacagctaaaactggtaaaattgagtcactacatgtagcattcactgaagatgaaaccacttccattaaaatggatagaactcgttttcctgatgttttaagaaatcaatcactaacacctatcaatatccaaaatatctttcttgatcactgtgtacaagaaagagtgactgcaatttcatcaccccagaaatctactaagcatgtccgtgagcagattccagatactgctactggttccatattttttccacattgtaattcagcttctactcgaatttttgggaaacaaacaaacaaaatggaaagttcaagaaagtttaaaactatgaaagatgtttatactgaaaaaaggctagaaaacattttaattctttcttccaagttttccaaacctaaaagtactcctggctcagttatcgctcaaaaacttgagaaaatgcaccctaagcatcaacctttaccagagagtccaggctatacttatcagcacatctcgagagacttaagtgcaacagtgccaagccctccacctatgactgtatctatgaaaccagaaggacagtggcctgaacattttaaatcaactgctacattgacactaagagttactgaatttccaggttttgtttccttgccaacaccagttttaccaagaaaacctcacaggcagtctgtgatagaagtcctgaccttgcagatctgccaaggccagactgggtactccattcagatggtgataatgggaaccaacaagggaattcaaaggatcggaaaagctaatataaagaagcaaaactcttgtaacagaaaatggaaatatagaaagtgtcccaaagcaaatcccaccaagaccacctgaaggtaaatgctagattt

SEQ ID NO: 460900 - DNA, 694 bp, Homo sapiens
ccttggcctcctagagggtggggatccgtggtgcttcttcgggaacagcctcctgcaggaagaccctcgctggacctttacctcgctgcctagattccgaggaaaaggagataggagacgaaaagccagttggtttggaaagcggccgattatcctaaagggtagtgtgggagtccagcacttccatgcccctctttgggtactacggaagggagatttccagcatcgtgtggaacatatgaccagggagtacaccttgagcgcttgtgtgcagttatcttttggcggtaaacggcccatttgtgcagtttcagggtgttcccttctaggctatcaatggaataatgccgtgccaggcacttttgatgttgccctgcaaactaaaagcacattttgggggtgcatcttctcgcattatttctaaacagtatgagttgggatccagcagccctgggaaatctcattatagtgaaacccatcttattttaggattgaattgttttggcccaagcatagtggttgaaaaacaagccattatagaaagaaaacaatttgtttgtgaatggttagatatggtgggtcttcagaggcttatctaatgaaggcatcttctacacatttctgaccaaattctctttctacatttatagcgataacattttggagagagagaaaaaaaatgtcatttcgacta

SEQ ID NO: 460901 - DNA, 514 bp, Homo sapiens
ggaccccggttgctagggtgtgtctccttggcctcctagagggtggggatccgtggtgcttcttcgggaacagcctcctgcaggaagaccctcgctggacctttacctcgctgcctagattccgaggaaaaggagataggagacgaaaagccagttggtttggaaagcggccgattatcctaaagggtagtgtgggagtccagcacttccatgcccctctttgggtactacggaagggagatttccagcatcgtgtggaacatatgaccagggagtacaccttgagcgcttgtgtgcagttatcttttggcggattatgaaaaacagcacttattattcattaaaatgcaaaagcccccactgcttcttcgaagacccttacctccaaaattcactaagctgtctttacatgagaaaaaaacccatacagaaactcttgtaacagaaaatggaaatatagaaagtgtcccaaagcaaatcccaccaagaccacctgaaggtaaatgctagattt

SEQ ID NO: 460902 - DNA, 968 bp, Homo sapiens
ccccctttctttgtcagcagctggcctggactcccaggggagcctggtcaatattaatggacacgcaaggctgtggggcacacagggttttgtgattatggattatctcctgctcagcaccatcttgaaggtggagacaaaagttctcagccagggccaggaattccaagcccacagtgggtctggatttaaagtactattgtgcctgggcctgtgatgtcagcatcccccactcccagggggccctggagaacatggcatctcagagcagttcaaggggctcaagcagactgggcctcggaggactggccaggctgggaaaatgccattgtttcctgaatttccctggaccgcagccaccacctttaaagctttagttagttaatggggaaggatgaaagggggaaatttaatagggttcttccaaataaatggggattcacagcccaccgctgaatagcctaatgagatcctgcattgtgccagctgagcacctgccatcggcagcccatttaatcatcccagcaaccccacctgaattctcagaggctcagaagtcaagtcagctgcccaacgtcacccagctggtcacagtgagagccgagaatgcaggccagcatgtgtcctctgtcaagtacctagtccccgcacagtgtccagggcacagtgacggctggctgcagctgcccgagtctcctggacaatccacgaaacacatgcacaaaagcacgatccagagccaggcaggccaggccttctccacagcctctgctccccactccctgctgcctgccaccccctcctatcttcagagcctgtgcccggctttctctgctggccccccttttcagcggcaccccctcttcatgcacaaatggcttggagagggcgtgggccaccgcagatgagcgtgacacaatgactgaaggagcagagccgcctcacccagggcagtcagtttctcaagc

SEQ ID NO: 460903 - DNA, 374 bp, Homo sapiens
tagaagcaacaatcgcagacaaagagtacaacttgtttttgaagtagttccggagcaacagttcacgatgtgagtctccacacactgctctgtctgtctgcatggcagctagaatctaatcctgcctcctgtctgccatgagcctaaaaaatcttccagaaccaggagaccataactctctcttgtttaagtcacccagtgtgtgatgctttgtgacaggcagccctggcaaatgaataagctgccagggaacaggaactcccattgtggaattcacagaagtgagaaataaatatttgtgtgatccattatatgttttcggtttgtttgtcacagaaaccagttttatctcacctaagaggtgggaagagaac

SEQ ID NO: 460904 - DNA, 794 bp, Homo sapiens
cgatccttcgggtgaaataagatgatccacttcaacagatccatgcatttcagtagcacacaatacagttgtgcccgccttccccaacagcaccccctgctggttttcctcctacttcatcaagggtcctctcggttctctttgctgcgtcttcctcaggacttggaagaaggtggagtggggaagaaagcacttgccctcgtgtggtctttgggtgtgtgctgggttttgtcttccgagctggcccaagttccattctgggatatcctgatgggtctactgttgatgtctgcagttggtaaagtggacacagaaacaggtcaggagattgagctgaaagatcctttatcaggactggtaccttggcaagttgaagccatatgcacacttaagttgcatggaagcagagaaatcctgagtaagggcctgtggattctctctactttcctgcctttttcctacagtagttccggagcaacagttcacgatgtgagtctccacacactgctctgtctgtctgcatggcagctagaatctaatcctgcctcctgtctgccatgagcctaaaaaatcttccagaaccaggagaccataactctctcttgtttaagtcacccagtgtgtgatgctttgtgacaggcagccctggcaaatgaataagctgccagggaacaggaactcccattgtggaattcacagaagtgagaaataaatatttgtgtgatccattatatgttttcggtttgtttgtcacagaaaccagttttatctcacctaagaggtgggaagagaac

SEQ ID NO: 460905 - DNA, 1416 bp, Homo sapiens
ataggcttggaaaaagcaccattcagaaagaagcatcatagtgttgcattgttctgagaaacaaaatggggatttgtctgactgacaaagcacataatagtacaaatgtagcattccgccgcctgtgtgagatcttggaatgttgtgttcacaacacagaaaagctttacaggagccagacaggtgaggtgaggccaggtggacattatgccaaaccgtataacagatgcccacctatagaagacagcagctacttgctctatccaaatattgcaggtgagaagacagctgcagcgatagatagcccaatggaaacaaaatcgtattataaacctagaaacaggtgcatggcagccaagcaggaccacaagggaaaatgtcaggcggtcaggaggaacaaaggaggagcaagacaaatcaaacatcccacgtataaggacaccattagccacatgttccataaaactaccactaatccacctgttccaaagcagctgaacttgcaatttcaggcctgcaaagctaaaagacggccctatccctgtctcccttgggctgactctcttttcggactcagcccgcctgcacccaggtgaaataaacagccttgttgctcacacaaagcctgtttggtggtctcttcacacaaacgcgcatgaaatttggtgccatgactcggatcggggtacctcccttgggagatcaatccccagtcctcctgctctttgctccgtgagaaagatctacctaggacctcaggtcctcagactgaccagcccaaggaacatctcaccaatttcaaatctggaccccactgaaaatcggactgttcaactcatctggcagccactcccagagcccctggaactctggcccaagcctctctgactgactccttcccagatcttctcggcttagcagctgaagactgacactgcccaatcgccttggaagccccctagaccatcacggatgccgagcttcgagtaactctcacagtggagggaacgcgcatgaaaaaaccaaacaaacaaaaaaatttcttttggtagcagaataaaaaaacaaaaaaaaggactttttcttctggactgaactatatttaaatctcaaaggatggacatctcacaaccttcctacagcaagtactgtgaggtaataattgatatattaattattaaaattattgaagctggaactcagattccattttatattacctatttaattattctattaatgggttctagttaataagagaagcactgagtcttggggggtggatgggacctggatggtcccgttggaaatggcggacagggaaatcaagagggggaacgccaggggggacttgcgaaggactgacgggggaagtggaaaactttttttggggatgggaaaatgttgggaaaaacc

SEQ ID NO: 460906 - DNA, 3562 bp, Homo sapiens
ataggcttggaaaaagcaccattcagaaagaagcatcatagtgttgcattgttctgagaaacaaaatggggatttgtctgactgacaaagcacataatagtacaaatgtagcattccgccgcctgtgtgagatcttggaatgttgtgttcacaacacagaaaagctttacaggagccagacaggtgaggtgaggccaggtggacattatgccaaaccgtataacagatgcccacctatagaagacagcagctacttgctctatccaaatattgcaggtgagaagacagctgcagcgatagatagcccaatggaaacaaaatcgtattataaacctagaaacaggtgcatggcagccaagcaggaccacaagggaaaatgtcaggcggtcaggaggaacaaaggaggagcaagacaaatcaaacatcccacgtataaggacaccattagccacatgttccataaaactaccactaatccacctgttccaaagcagctgaacttgcaatttcaggcctgcaaagctaaaagacggccctatccctgtctcccttgggctgactctcttttcggactcagcccgcctgcacccaggtgaaataaacagccttgttgctcacacaaagcctgtttggtggtctcttcacacaaacgcgcatgaaatttggtgccatgactcggatcggggtacctcccttgggagatcaatccccagtcctcctgctctttgctccgtgagaaagatctacctaggacctcaggtcctcagactgaccagcccaaggaacatctcaccaatttcaaatctggaacgcgcatgaaaaaaccaaacaaacaaaaaaatttcttttggtagcagaataaaaaaacaaaaaaaaggactttttcttctggactgaactatatttaaatctcaaaggatggacatctcacaaccttcctacagcaagtactgtgagagctgcatcttgtcccactggatggtcttcagagacaataatacataatggagctgtcatctcctatgataacaatgccttcttctggatacctcctgaaggacctgcctgaggctctttcactccatgtaaaggtgtgctgctttccctttgccttccgccattattgaaagtttcctgaggcctccccagccatgctacctgtacgacctgtgaaaccataagccaataaaagatactagcgccagtctggcaggggccttttctagtctcaagcacgctgagcagtcctacaccttgccttctgagagagaagaggacagtcctcagcctcctgaagcctggcaagggtgccttagtgaggacatcatctgcaactcccagatggatagacgaggccatggagagaggagaacaccaacccatgagtgacaagtgcctgtcattgtcaatgatgctgcaagcaccacgatgccccttcttagcagggacccagtgggccttaccagcttcattattttctaggcatgatcgcatcctgtctcccatttttgctaaaattctatctagagaaagagctcatttttagctaaaaaaaaaaaaatcctgttttatctgctaaaaaatcacataaaataactattggactgtttgaaatggcgtggcctctgctctgacttattaactgtgatcttgactaagttaagcagtcactctgaccttacgttactccctcaaatttgaataaaaatagcaacttcctctacttataaattacttctaaaaattagattcttgagattcaaagataggcaatggaccacctttgtatttaaagtcttttctttaaaaagattttaaatttcagaaaaagcctttgcacttaaacagtgcttccttttctgtcactttcatgcttaaatggtcgtccaatttgacattaactttatcgagaataataagtctcaatagagcttctattatccagtgttctgtgagtaggtagcacttcagttgaaagaagattattccatttttatattttctggaacactagaggaaaatctcagacattgtcacatttcatttgcagatcaaatcaggcagctgtcatacttactaactcatgcaacagattataaaccaagccaacaataaaatgacaggaaatcaacctaaaattgtagacaatatggacataataattttgtgtccttgaacactgacattcattttttaaggtaagggattatttagtacttataactgaacaacagttttaactgtatatgaagataaaaaacactgtcctatgttctcaaactataataatgttttatgtcttataaatctctgtacaaataaatataaaaccatttgttttgatggcaaaattaaaaaaataagctgtagctatttaaacttggttgctctgaattttaataacttttaataattaaaatataaagacaaacactatttataatgttatgcttcaataagattgttttgaagtatacaaggacagagagaagccaggcagctgtggttcaaatcctagacctggtgatttcaagcaatgtgaacatttagcaaattacttgatcactgtgtgtcctagatttttttaaatctacaaaataaggataatagtgcctattgaagagagatccatataaagtatgtaaagtgctataacatatgaagcagtcaatttatatttgctacaattattatatttgaatgtatatggttctttgaagacaatattgttgctattggttttacttctatgaatgttcttgacttaaaatattgatgattttgcaccttagttgattgcacctaagttgatgtgcccagctaatattcaatatctgtcaatgtccatatagctaatgacaactctaccctatggtgattagtactcatgattgtaaattttgaaaattattttgaaatcttgctgacagtctggctttgctgctgaagttcaagctttaccttgcccacaacttttgttccacaggacctgagttcaaaatgtttcttgccagttgatctttgtcttagaaaatttcagcaaaatgttctggtggaggaaggttttttggtgtggaacaacagacataaactatggaaatgcacagaagtaaaggcatttttcagagaaccaaaggtaatatatcctgcattaaaatcactgagatacggatcagaagtcctgaatttttatgccagatcaataacttgcctattaagtaattaagattatctgagccccaatttcttccatataagatacctctgctatgattagtgagtttttcataagttatgaaaatgttgatcaagagttcgggaatgatgttaggacaacgttcctgctctctgctgatccacttttccatttaataacaagagtaatatatcactttttagcatgttaccatgtcacttaaaacttaaaaactaaaatttgtaatgatttctcattgctttcatttgaaatccaaatgtctctggtggtgtataaggtgctaggtgtcatggtttcttccacccccacgcgactgtgcttgatttctctcagttcacacaattt

SEQ ID NO: 460907 - DNA, 522 bp, Homo sapiens
gcaagtcagctcctggaaggtggaagtgttttgttctccattgcatctcctgggatttttgccataggcttttctgtactgtttgcatttctggttgtttgcttgaattacctctttgggacgtgaggaatttacactaaaacacctgtttctttacagaaaagatactagcgccagtctggcaggggccttttctagtctcaagcacgctgagcagtcctacaccttgccttctgagagagaagaggacagtcctcagcctcctgaagcctggcaagggtgccttagtgaggacatcatctgcaactcccagatggatagacgaggccatggagagaggagaacaccaacccatgagtgacaagtgcctgtcattgtcaatgatgctgcaagcaccacgatgccccttcttagcagggacccagtgggccttaccagcttcattattttctaggcatgatcgcatcctgtctcccatttttgctaaaattctatctagagaaagagctcatttttagctaa

SEQ ID NO: 460908 - DNA, 3530 bp, Homo sapiens
ataggcttggaaaaagcaccattcagaaagaagcatcatagtgttgcattgttctgagaaacaaaatggggatttgtctgactgacaaagcacataatagtacaaatgtagcattccgccgcctgtgtgagatcttggaatgttgtgttcacaacacagaaaagctttacaggagccagacaggtgaggtgaggccaggtggacattatgccaaaccgtataacagatgcccacctatagaagacagcagctacttgctctatccaaatattgcaggtgagaagacagctgcagcgatagatagcccaatggaaacaaaatcgtattataaacctagaaacaggtgcatggcagccaagcaggaccacaagggaaaatgtcaggcggtcaggaggaacaaaggaggagcaagacaaatcaaacatcccacgtataaggacaccattagccacatgttccataaaactaccactaatccacctgttccaaagcagctgaacttgcaatttcaggcctgcaaagctaaaagacggccctatccctgtctcccttgggctgactctcttttcggactcagcccgcctgcacccaggtgaaataaacagccttgttgctcacacaaagcctgtttggtggtctcttcacacaaacgcgcatgaaatttggtgccatgactcggatcggggtacctcccttgggagatcaatccccagtcctcctgctctttgctccgtgagaaagatctacctaggacctcaggtcctcagactgaccagcccaaggaacatctcaccaatttcaaatctggaccccactgaaaatcggactgttcaactcatctggcagccactcccagagcccctggaactctggcccaagcctctctgactgactccttcccagatcttctcggcttagcagctgaagactgacactgcccaatcgccttggaagccccctagaccatcacggatgccgagcttcgagtaactctcacagtggagggaacgcgcatgaaaaaaccaaacaaacaaaaaaatttcttttggtagcagaataaaaaaacaaaaaaaaggactttttcttctggactgaactatatttaaatctcaaaggatggacatctcacaaccttcctacagcaagtactgtgagaaaagatactagcgccagtctggcaggggccttttctagtctcaagcacgctgagcagtcctacaccttgccttctgagagagaagaggacagtcctcagcctcctgaagcctggcaagggtgccttagtgaggacatcatctgcaactcccagatggatagacgaggccatggagagaggagaacaccaacccatgagtgacaagtgcctgtcattgtcaatgatgctgcaagcaccacgatgccccttcttagcagggacccagtgggccttaccagcttcattattttctaggcatgatcgcatcctgtctcccatttttgctaaaattctatctagagaaagagctcatttttagctaaaaaaaaaaaaatcctgttttatctgctaaaaaatcacataaaataactattggactgtttgaaatggcgtggcctctgctctgacttattaactgtgatcttgactaagttaagcagtcactctgaccttacgttactccctcaaatttgaataaaaatagcaacttcctctacttataaattacttctaaaaattagattcttgagattcaaagataggcaatggaccacctttgtatttaaagtcttttctttaaaaagattttaaatttcagaaaaagcctttgcacttaaacagtgcttccttttctgtcactttcatgcttaaatggtcgtccaatttgacattaactttatcgagaataataagtctcaatagagcttctattatccagtgttctgtgagtaggtagcacttcagttgaaagaagattattccatttttatattttctggaacactagaggaaaatctcagacattgtcacatttcatttgcagatcaaatcaggcagctgtcatacttactaactcatgcaacagattataaaccaagccaacaataaaatgacaggaaatcaacctaaaattgtagacaatatggacataataattttgtgtccttgaacactgacattcattttttaaggtaagggattatttagtacttataactgaacaacagttttaactgtatatgaagataaaaaacactgtcctatgttctcaaactataataatgttttatgtcttataaatctctgtacaaataaatataaaaccatttgttttgatggcaaaattaaaaaaataagctgtagctatttaaacttggttgctctgaattttaataacttttaataattaaaatataaagacaaacactatttataatgttatgcttcaataagattgttttgaagtatacaaggacagagagaagccaggcagctgtggttcaaatcctagacctggtgatttcaagcaatgtgaacatttagcaaattacttgatcactgtgtgtcctagatttttttaaatctacaaaataaggataatagtgcctattgaagagagatccatataaagtatgtaaagtgctataacatatgaagcagtcaatttatatttgctacaattattatatttgaatgtatatggttctttgaagacaatattgttgctattggttttacttctatgaatgttcttgacttaaaatattgatgattttgcaccttagttgattgcacctaagttgatgtgcccagctaatattcaatatctgtcaatgtccatatagctaatgacaactctaccctatggtgattagtactcatgattgtaaattttgaaaattattttgaaatcttgctgacagtctggctttgctgctgaagttcaagctttaccttgcccacaacttttgttccacaggacctgagttcaaaatgtttcttgccagttgatctttgtcttagaaaatttcagcaaaatgttctggtggaggaaggttttttggtgtggaacaacagacataaactatggaaatgcacagaagtaaaggcatttttcagagaaccaaaggtaatatatcctgcattaaaatcactgagatacggatcagaagtcctgaatttttatgccagatcaataacttgcctattaagtaattaagattatctgagccccaatttcttccatataagatacctctgctatgattagtgagtttttcataagttatgaaaatgttgatcaagagttcgggaatgatgttaggacaacgttcctgctctctgctgatccacttttccatttaataacaagagtaatatatcactttttagcatgttaccatgtcacttaaaacttaaaaactaaaatttgtaatgatttctcattgctttcatttgaaatccaaatgtctctggtggtgtataaggtgctaggtgtcatggtttcttccacccccacgcgactgtgcttgatttctctcagttcacacaattt

SEQ ID NO: 460909 - DNA, 1279 bp, Homo sapiens
ataggcttggaaaaagcaccattcagaaagaagcatcatagtgttgcattgttctgagaaacaaaatggggatttgtctgactgacaaagcacataatagtacaaatgtagcattccgccgcctgtgtgagatcttggaatgttgtgttcacaacacagaaaagctttacaggagccagacaggtgaggtgaggccaggtggacattatgccaaaccgtataacagatgcccacctatagaagacagcagctacttgctctatccaaatattgcaggtgagaagacagctgcagcgatagatagcccaatggaaacaaaatcgtattataaacctagaaacaggtgcatggcagccaagcaggaccacaagggaaaatgtcaggcggtcaggaggaacaaaggaggagcaagacaaatcaaacatcccacgtataaggacaccattagccacatgttccataaaactaccactaatccacctgttccaaagcagctgaacttgcaatttcaggcctgcaaagctaaaagacggccctatccctgtctcccttgggctgactctcttttcggactcagcccgcctgcacccaggtgaaataaacagccttgttgctcacacaaagcctgtttggtggtctcttcacacaaacgcgcatgaaatttggtgccatgactcggatcggggtacctcccttgggagatcaatccccagtcctcctgctctttgctccgtgagaaagatctacctaggacctcaggtcctcagactgaccagcccaaggaacatctcaccaatttcaaatctggaccccactgaaaatcggactgttcaactcatctggcagccactcccagagcccctggaactctggcccaagcctctctgactgactccttcccagatcttctcggcttagcagctgaagactgacactgcccaatcgccttggaagccccctagaccatcacggatgccgagcttcgagtaactctcacagtggagggaacgcgcatgaaaaaaccaaacaaacaaaaaaatttcttttggtagcagaataaaaaaacaaaaaaaaggactttttcttctggactgaactatatttaaatctcaaaggatggacatctcacaaccttcctacagcaagtactgtgagaactcaaagggggagagaaaaagacgaaaaatatcttcaagaggagaacaaatctgatctttctctacgtctgcttagttggcgtaactttaggatgtccataagttgtagctttcctgggaaa

SEQ ID NO: 460910 - DNA, 3036 bp, Homo sapiens
cagcagtagcacctggggggctagttaaaacacagtctccaattcgctgttgtttcctttttaaattagtgagtcgtgttccattgtatgaatataccattgatttgttcacgcaacctcctgttggctccgcgaccacccacggttaaagaagcagctgctagagcaacccctcacccacccaccggaacttccctccaggccatgggacgttggtctcagccggaacttccgtccaggcagtgggaccttggcctcagccataagcatccaagccgccgtcgttgggagactggccttcccattggcagggtgcactgtccatcacagatctcagggctctcattggccatcgtatggcaggggtggagctcaccacgcttcgtccgcgtgctccccacgtgaaggcacccgccctgcgcgtgtgaaagggcgagagcagcgcgagatagggcctagcgcctcagatcttcgttggcggccatggcttcggcttctcagggcgctgacgacgacggcagtcgtaggaagccccgcctggctgcatcgttgcagatcagcccccagccccgcccctggcgaccgctacccgcccaggcccaaagtgcctgggagcccgcgcccgcgcccgcgacgtatcgcgcggagggcgggtggccccaggtctcggtgttgagggacagtgggcctggggcaggggccggagtcggggaactgggggcagcccgggcgtgggaaaacttgggggaacagatggggaaggccccgagggtccctgtgcccccagcagggctcagcctgccgctcaaagacccacctgccagccaggccgtgtccttgctcacggagtacgcggccagcctgggcatcttcctgctcttccgggaggaccagccaccaggtccctgcttccccttctcggtgagcgcggaactggatggggtggtctgccctgcgggcactgcgaatagcaagacggaggccaaacagcaggcagcgctctctgccctctgctacatccggagtcagctggagaacccagagtccccccagacctccagccggcctccactggcccccctgagcgtagagaacatcctgacccatgagcagcgctgcgcagcgttggtgagcgccggctttgacctcctgttggacgagcgctcgccatactgggcctgtaaggggactgtggctggagtcatcctggagagggagatcccgcgtgccaggggccacgtgaaggagatctacaagctggtggctctgggcaccggcagcagctgctgtgctggctggctggagttctcgggccagcagctccacgactgccatggcctggtcatcgcccgcagggccctgctgaggttcttgttccggcagctcctgctggccacacaggggggccccaagggcaaggagcagtccgtgctggccccccagccagggcccggacccccattcaccctcaagccccgcgtcttcctgcacctctacatcagcaacacccccaagggcgcggcccgtgacatctacctgccccccacctcggaaggtggcctcccgcacagcccacccatgcgcctgcaggcccatgtgctcgggcagctgaagcctgtgtgctacgtggcgccctcgctctgtgacacccacgtgggctgcctgtcagccagtgacaagctggcacgctgggccgtgctggggctgggtggtgccctgctggcccacctggtgtccccactctacagcaccagcctcatcctggctgactcatgccacgaccctccgactctgagcagggccatccacacccggccctgcctggacagtgtcctggggccatgcctgccacctccctacgtccggaccgccctgcacctgtttgcagggcccccggtggccccttccgaacccacccctgacacctgccgtggcctgagcctcaactggagcctgggggaccctggcatcgaggttgtggatgtggccaccgggcgtgtgaaggccaatgccgccctggggcctccctcccgtctctgcaaggcctcctttctccgggcctttcaccaggcggccagggctgtggggaagccctacctcctggccttgaagacctacgaggctgccaaggctgggccctaccaggaggctcgcaggcagctgtctctcctcctggaccagcagggcctgggggcttggccctcgaagccactggtgggcaaattcagaaactgaagccagcctcggcgggaccgaggtcccggagccaagctgtacccctgctgggggagtgccctatctgaggagcgttgtggggagaacatgggttgtgcggggtgaaactggggctggagggaaggaggagcctgctgtggttgggaggcggctgctgcacgtttgggcttgaataaagaagtatttctggttcctgtgtgtgtagttggctgtgtgtgtgtgtgtgtgtgtgtttatgtgttggggtggccaggggccctttgtttgcggagagagcccctcactcctcctttgggaggccctgtgttcactgggttcccacctggatcctctcactgagccactgaattgtcacccccgcccctgttcacagggctggaggcaggtttaggaggggaggtgacctcccctggttcctcctgttttccagcctgtgtgctggaggagaccacggaggccacgggttgcgggtgttgtaaagggtgggagggcaggctgcttggatgtgtgagcattttgtcctctggccgctattggggctccaaatccttgcctttctgggcccccaggatgtgtgggagggcagagaacacccttccctggtcagagctttagctgccctggccctcgagggtgctgtggggtctgggcagccccatgttgaagggcgtggggagggcatgagcagcatcagtgctttccctgggccgcccggctgttggacctgggcgaggcattggaccgctagagcctgcgtcttccaccatggagagggacagtgctcctgccctgtgtgggctc

SEQ ID NO: 460911 - DNA, 722 bp, Homo sapiens
cgcgagatagggcctagcgcctcagatcttcgttggcggccatggcttcggcttctcagggcgctgacgacgacggcagtcgtaggaagccccgcctggctgcatcgttgcagatcagcccccagccccgcccctggcgaccgctacccgcccaggcccaaagtgcctgggagcccgcgcccgcgcccgcgacgtatcgcgcggagggcgggtggccccaggtctcggtgttgagggacagtgggcctggggcaggggccggagtcggggaactgggggcagcccgggcgtgggaaaacttgggggaacagatggggaaggccccgagggtccctgtgcccccagcagggctcagcctgccgctcaaagacccacctgccagccaggccgtgtccttgctcacggagtacgcggccagcctgggcatcttcctgctcttccgggaggaccagccaccaggtgaggccgggccggggcatggctgtgccagagggcagagccacggagggctgggtcccaggacgtggggagcagggggtctggggaaggtggaccttggtccctatgctcagagacaccgccggagcaggacctggcctgagcttgggaccttggggtggaccctgctgtgagcagcgatctccaaggatcaccagccacaccagatgctcaactgtgaaagagtcatggcaggtgaacattcttcccacctgacttccagg

SEQ ID NO: 460912 - DNA, 1512 bp, Homo sapiens
cagcagtagcacctggggggctagttaaaacacagtctccaattcgctgttgtttcctttttaaattagtgagtcgtgttccattgtatgaatataccattgatttgttcacgcaacctcctgttggctccgcgaccacccacggttaaagaagcagctgctagagcaacccctcacccacccaccggaacttccctccaggccatgggacgttggtctcagccggaacttccgtccaggcagtgggaccttggcctcagccataagcatccaagccgccgtcgttgggagactggccttcccattggcagggtgcactgtccatcacagatctcagggctctcattggccatcgtatggcaggggtggagctcaccacgcttcgtccgcgtgctccccacgtgaaggcacccgccctgcgcgtgtgaaagggcgagagcagcgcgagatagggcctagcgcctcagatcttcgttggcggccatggcttcggcttctcagggcgctgacgacgacggcagtcgtaggaagccccgcctggctgcatcgttgcagatcagcccccagccccgcccctggcgaccgctacccgcccaggcccaaagtgcctgggagcccgcgcccgcgcccgcgacgtatcgcgcggagggcgggtggccccaggtctcggtgttgagggacagtgggcctggggcaggggccggagtcggggaactgggggcagcccgggcgtgggaaaacttgggggaacagatggggaaggccccgagggtccctgtgcccccagcagggctcagcctgccgctcaaagacccacctgccagccaggccgtgtccttgctcacggagtacgcggccagcctgggcatcttcctgctcttccgggaggaccagccaccaggtccctgcttccccttctcggtgagcgcggaactggatggggtggtctgccctgcgggcactgcgaatagcaagacggaggccaaacagcaggcagcgctctctgccctctgctacatccggagtcagctggagaacccagagaacatcctgacccatgagcagcgctgcgcagcgttggtgagcgccggctttgacctcctgttggacgagcgctcgccatactgggcctgtaaggggactgtggctggagtcatcctggagagggagatcccgcgtgccaggggccacgtgaaggagatctacaagctggtggctctgggcaccggcagcagctgctgtgctggctggctggagttctcgggccagcagctccacgactgccatggcctggtcatcgcccgcagggccctgctgaggttcttgttccggcagctcctgctggccacacaggggggccccaagggcaaggagcagtccgtgctggccccccagccagggcccggacccccattcaccctcaagccccgcgtcttcctgcacctctacatcagcaacacccccaagggcgcggcccgtgacatctagtatgcagggcccccggggcaggcg

SEQ ID NO: 460913 - DNA, 2671 bp, Homo sapiens
cacagagacagtaaccaccagcttcagcttttggacactaaatttaaaggtacagttgaggaactcagtaaccagatattatctgcacggagttggttgcaacaggaacaagaacggatagaaaaagagcttttacagaaaattgatcagctttccttgattgttaaggaaaacagtggagccagtgaaagggatatggagaagaagctcagccagatgtcagccaggcttgacaaaatagaagagggtcaaaagaagacttttgatggtcagagaacaaggcaagaagaggagaagatgcacgggcgaatcaccaagctggagttacagatgaaccagaacatcaaggaaatgaaagcagaagttaatgctgggtttacagccgtctatgaaagcataggatccctcaggcaagttctcgaggccaagatgaagctggacagggaccagctacagaagcaaatccagctgatgcagaagccagagacccccatgtgaagggagctgggacaaggtcctaaaagacagttttgccagtggggctaggagccggatacctctgtagccaggccatcgctgcattcaggattgttccatccatggcgtgcatgtgccaagaaatgtgtttttatgggtctaaatgtttaccttgagtcttgaaaatactcttttgttaaaagtatgaaatacagtttttaccagtttatttcacttctctaaattcaatggaaatcccccgccctggattttgaaaggcttttatcttcttcattttacgaatggaaagacgacaatttttcttcaatgcttgatgcactaatgaagactgtttactattttgaaaaatgtcatggggatttttttttaattaagaaactaatgaatcatcacaggaatgtgttgctcctcaccctaaattaagagaatgtcccagtagattagacttcaacctttgagtccaatttggattttattatcgttgtctatgcacttcttatattggttatcttcttgtaaatcttctgtcttttgtaaggggaaaggatttaacatttagaataaaccccaccatttatgtaatggaaatagtttaaaaattgctaactgccatgtggattgcaaattaaatggaaacttatttagataacgtaaggctcaatatctgcgttgaccacctagatattacaggttttaatatttaaaactatttttgaattatccacaacctgtatagtgatagccatatatttaataatggaatggtggttaacagtctatttactgcacaattaattgttcactaatcaaatagaatgtggtaatttttcagactttatgatctgtttccaaaattggcacaaagtgctagggtttatatacacttatcgtaactgtatttttgtgccttggttttatcatgtcaatgcactgtactctgtaaaagttttgcagacaaaatagaaagtatgataatccgtcagaagtatgatgtaaaactggaatcctctgtattttttaaatgttctaaaaattttatcgctgttaaggtattaatcattcagtattactaatggaatagaaattcatacttttgtatggacaacaattcaaattgatattgcatttatagcactgtaagaaactttcatcttgagcaactttgtagatgatgggtgttttattttcaatcgccatatttgatcagtcattgaaaattggccccagtgctgtttgttcatctctgtatgtaaaaactgacagtgagacacaacgttctgaactgtgagggtgtcccaggaaaaagaaaaacaggaatactttaacaattaaaaagaaaaaaatgttttttgtttgccaaggactcaggaaaataaaaagcattttctatttttaggacaaatcacaaatgaagtgtctaactggctattactgtttacccatataaaatatgctgctaaagtacatattttgctgtcaatggcttgacaattttttttttcaaatttggacatgagaggttatatagggactatattatccaacacatattttcttattttgccacaaatttccacttaacaaataaaaaaaggcgaatgctgttttgcaatcagaaagtgaatttcttttgtggtagcgtacacgtggttcatgtggttctccacgtttaagcacaaaccacagcacaggaagccacaccccctccagcatctctgtcttgtggggtctttgaggagaaggaatcagaacatcgacacctgggaagagggaggcggggaacaccagctggactctggccaaggagtgatgtaagcaggtgacacttggctgtcagctgagcttctcaggtgcttctgacattgccagccccttgagatgagccaccgcaggtgtgctcaccttggctacatgttgaaatcatccagaggagttgggaaatctactgatgccccgctgtgcctcccagaccgattaagtcagaacctctgggaggtgggtcgcaggcatcagtgcgtgcccgaggcctccgcgtgtttgggtgtgcagccgaggtggtgagctgtcgagccacagtgcagttctcttctcaccaaagctcaaatgagaatcagcttccatgttctttcctttaccagaaatttgcaataaaaagaaaaataaaattttcaca

SEQ ID NO: 460914 - DNA, 2799 bp, Homo sapiens
  misc_feature (2)..(3): n is a, c, g, or t
  misc_feature (5)..(5): n is a, c, g, or t
  misc_feature (7)..(7): n is a, c, g, or t
  misc_feature (9)..(9): n is a, c, g, or t
  misc_feature (11)..(11): n is a, c, g, or t
  misc_feature (13)..(13): n is a, c, g, or t
  misc_feature (15)..(16): n is a, c, g, or t
gnncntncncntngnngggacatggatggatctggaagccattatcctcagcaaagtaacacaggaacagaaaaccaaacaccacatgttcttacttataagtgggagctgaacaatgagaacatatttaaaggtacagttgaggaactcagtaaccagatattatctgcacggagttggttgcaacaggaacaagaacggatagaaaaagagcttttacagaaaattgatcagctttccttgattgttaaggaaaacagtggagccagtgaaagggatatggagaagaagctcagccagatgtcagccaggcttgacaaaatagaagagggtcaaaagaagacttttgatggtcagagaacaaggcaagaagaggagaagatgcacgggcgaatcaccaagctggagttacagatgaaccagaacatcaaggaaatgaaagcagaagttaatgctgggtttacagccgtctatgaaagcataggatccctcaggcaagttctcgaggccaagatgaagctggacagggaccagctacagaagcaaatccagctgatgcagaagccagagacccccatgtgaagggagctgggacaaggtcctaaaagacagttttgccagtggggctaggagccggatacctctgtagccaggccatcgctgcattcaggattgttccatccatggcgtgcatgtgccaagaaatgtgtttttatgggtctaaatgtttaccttgagtcttgaaaatactcttttgttaaaagtatgaaatacagtttttaccagtttatttcacttctctaaattcaatggaaatcccccgccctggattttgaaaggcttttatcttcttcattttacgaatggaaagacgacaatttttcttcaatgcttgatgcactaatgaagactgtttactattttgaaaaatgtcatggggatttttttttaattaagaaactaatgaatcatcacaggaatgtgttgctcctcaccctaaattaagagaatgtcccagtagattagacttcaacctttgagtccaatttggattttattatcgttgtctatgcacttcttatattggttatcttcttgtaaatcttctgtcttttgtaaggggaaaggatttaacatttagaataaaccccaccatttatgtaatggaaatagtttaaaaattgctaactgccatgtggattgcaaattaaatggaaacttatttagataacgtaaggctcaatatctgcgttgaccacctagatattacaggttttaatatttaaaactatttttgaattatccacaacctgtatagtgatagccatatatttaataatggaatggtggttaacagtctatttactgcacaattaattgttcactaatcaaatagaatgtggtaatttttcagactttatgatctgtttccaaaattggcacaaagtgctagggtttatatacacttatcgtaactgtatttttgtgccttggttttatcatgtcaatgcactgtactctgtaaaagttttgcagacaaaatagaaagtatgataatccgtcagaagtatgatgtaaaactggaatcctctgtattttttaaatgttctaaaaattttatcgctgttaaggtattaatcattcagtattactaatggaatagaaattcatacttttgtatggacaacaattcaaattgatattgcatttatagcactgtaagaaactttcatcttgagcaactttgtagatgatgggtgttttattttcaatcgccatatttgatcagtcattgaaaattggccccagtgctgtttgttcatctctgtatgtaaaaactgacagtgagacacaacgttctgaactgtgagggtgtcccaggaaaaagaaaaacaggaatactttaacaattaaaaagaaaaaaatgttttttgtttgccaaggactcaggaaaataaaaagcattttctatttttaggacaaatcacaaatgaagtgtctaactggctattactgtttacccatataaaatatgctgctaaagtacatattttgctgtcaatggcttgacaattttttttttcaaatttggacatgagaggttatatagggactatattatccaacacatattttcttattttgccacaaatttccacttaacaaataaaaaaaggcgaatgctgttttgcaatcagaaagtgaatttcttttgtggtagcgtacacgtggttcatgtggttctccacgtttaagcacaaaccacagcacaggaagccacaccccctccagcatctctgtcttgtggggtctttgaggagaaggaatcagaacatcgacacctgggaagagggaggcggggaacaccagctggactctggccaaggagtgatgtaagcaggtgacacttggctgtcagctgagcttctcaggtgcttctgacattgccagccccttgagatgagccaccgcaggtgtgctcaccttggctacatgttgaaatcatccagaggagttgggaaatctactgatgccccgctgtgcctcccagaccgattaagtcagaacctctgggaggtgggtcgcaggcatcagtgcgtgcccgaggcctccgcgtgtttgggtgtgcagccgaggtggtgagctgtcgagccacagtgcagttctcttctcaccaaagctcaaatgagaatcagcttccatgttctttcctttaccagaaatttgcaataaaaagaaaaataaaattttcacataaatgtggtgtatgatttttaaattgaaaagtctttcagtgtt

SEQ ID NO: 460915 - DNA, 1463 bp, Homo sapiens
tgctctaagaaaagaaagttttgggcctagagtcaggaaaaagccttttcaagtcaagctgagaactttaaggtggtcttggctacctcattttatgcaaagtaggcagaaaatttaaaagaaaagaaacatatttaagtacaattaagaaaattacagtgtttcagttaaagcagttcagtgctttttagaaaaggagctgaaattaaataagttgaacttcctctctttttagaagaatggatttctcggagtctgaaaaatttatggttcttctctggaagaattttattttaaagaggcggcgatgtattgctttagttgtggaaatggtcctcacatttctgtttagtgctgcgcttttggcaacacgctctgttattactataaataagaacggacctttcgattttgctgctcagcctgtcgatgaagtgcctttctacatcacagcttccttaatttctccttctcctttggaattggcttacgtgccttccagaagtactgtggttcagggtattattgaaagagtgaaaatggatttaaaccctcaaatgaaaggttagaaattaacattttctgaaaaaacatacagaattactaaatcgatttagtgaagacatacttacaaccttattaactggttcttaacctcccaagtaaaacatcgttggaatcctcatactaagtataaatattatggactttgttaaacttgaaagttaaatttatataaaatattttgttcatagagcccagaacaaatagtaatatttcaaaatgagatgaccaattattattattattctaagttgttatccagttttgtgatactgttttttctatctggttgtgcttcttgaacctggctaagccttgcccccagaggtggagtctacagaggcaggcaggcctcgagctgtggtgggctccacccagttcaaacttcccagccgctttgtttacctggtcaagcctcagcaatggcagacgcccctcctgcagcttggctgccacctcacagtttgatctcggactgctgtgctagcagtgagcaatgctccgtgggcatgggacctactgagccatgtgtgggatataatctcctggtgtgccgtttgctaagactgttggaaaagcacagtgttatggcgggagtgtcccgatattccaggttgaacctgcaccagtcatccaaagcagtgacccaacgcttatctttatctttttgctgttttatgccatcgccacaatatgcttcagctttatggttagcactttcttcagtagaggccctcaacagattggatgatgcctgcccacattggggaggaccatctgctttactgagtccactgattcaaatgcttatctcatttggcaacctcctcacagacacacccagaaataatgtttaatctgtatactccatggagagtcaagttggcacataaaatgaa

SEQ ID NO: 460916 - DNA, 875 bp, Homo sapiens
accagtatgaagtccataggagcctatgtggcattggctcactgagacaagagctagaacaagagacagatgagatcgggcgcattcagggtggtatggccgtagaccagggtggtatggccatagactcaataattgttcaacagcaatgcagaggtctgtcctctcataaagaggatggaccaagttgtgtcaacagttgttctgtggcaatattatatgtgatatgtggagctgtagagaagcctctccctgtggccactaccaccaccaacccacagcaggttttgccaggccaccaccaatgttcacttaaagccgaaaagctcttcggtcatctgaagaggtcaggtctagaaatgctttccaagagcctaggcctggacctggggaccctaagaacccacttgttgctctacccaactgtggccaagctcgtacctaagggcaacactgagttcgatgtaaagtcccacagtcactgtgttttcccctccccaggtgcacagactcctcgcaatgcaaggccactgccagggaatgctggaggggtgatgctagcaattgaagattgtctctcctaccctcttcaatgcctctttcagcaatatgaagttaaaaccagattagtgttgggtctgaagttccaaatcctgctgcctctgtgaagtctttctgctcatgctagaagcaatatcacctcttctagaattgtaaagtgccattttccataccacttataatatactgtcttgtagatgtttttctgtcgtctgtatttcatccctctaatagatgataaatttctagaggatgcctcccacagaaaaagtgctcaataaatatctgtcattggtgaaaacagattatagatg

SEQ ID NO: 460917 - DNA, 949 bp, Homo sapiens
ctcggtaaggtgctccagctgcttctatcatagcacttcctacatggactgtaacatttctttactgctccaacttctcattaaattgggggctcctcaaagccagggttggtgccttataagtttcttgcttcctggtgcccagagcagcctctggcatgagctgtttgaacactggctgagtctcacgggcctgtgtcgtgcagagtattctaaaaggcaaggggaaggtggggtgaggaattttttttatcaaggctggaagaaacatgggcttctgtattctagtcctgaattggatggggaggatggggaaggtgacatgtaccatccatgtggagccccttctcccacctcggaggatgaagagtatcttaccatcaactctacatgccaaggccagctaccctgtgaagaatgtttggaggcagattctgggaccattcccttgccacagttctgctcttggggcactgtcccagagtctttgcctccagaagagtccccagagagtgggagtgaatgggaagacctggaggagcctgtggccctggaatacggtgccctcaggtctctctcttttgggggtctgaatgtctagtgctgattcctgttttgcctgctcctacctgcccctctgctggatgtactgcagagaagagtcttggtgtcctgtcatagggcccatcttgttggactgctgtggctgagtatagaccagcatcaggaaagtctcactgttaatgcaaggagccaccagaagctgacctggtcaccaggcagggtcagaacatattgatgaggacacagaaaaagtaagggcaacagaaactgtcacactgggaggaagggaggttaaattctgggcaggtctgtaaccacccaacattctgttaaagtacttacagtgtatatttaaaaatgctgaatgttccaaaaactttcacat

SEQ ID NO: 460918 - DNA, 1784 bp, Homo sapiens
acagctgccatcccgaagggcgccggggacctggccgtggctagcgatgaccgggacaggccaagggacgcagaaccgccaaaggctgcggcggcctaggggtcataggttattgcagacttgtccccacagtgtggaggtacagaatctggcagccatccagctgcatgtaccggggcaggggaacagtgaggaggccggtgtggccaagccagccggaacaagggcagagagcatgggcggggattgtcacgaagctgccgtctccatctactgcagcatgcgcaaacggagcctctcccactgggccctggtgtctgtgctgtccttgctggcctgctgcctcatctattcactgacgggggtttatggcttcctgacttttgggacagaagtttctgctgacgtcttgatgtcctacccaggcaatgatatggtcatcattgtggcccgggtcctttttgctgtctccatcgtaactgtctaccccatcgtgctcttcctggggagccaggactggaatgcgaaccacgtgcttcatcccctgccccatgggctgcccgatggtggcagaacccctgaggatgcccatgtgtctgtgttggctgtggcctccaggtcagtgatgcaggacttctggaggaggagctgcttggggggatgggggcccagcgccctggccgacccctcagggctgtgggtccggatgccgctgaccatcctgtgggtcaccgtgacgctcgccatggcgctgtttatgcctgacctcagcgagatcgtcagcatcatcggaggcatcagttccttcttcatcttcatcttcccaggtttgtgcctcatctgtgcaatgggtgtcgagcctataggaccaagagtcaagtgctgcctggaggtctggggagtggtctctgtgctggtcggcaccttcatctttgggcagagcacggcggcagcggtctgggagatgttctgatgggcagctagtgccgggcaggaaggggccctccgggggctgaccctacgtggctgctgtatgcagccaggagaccgatgccatttcttttcctcataaagatgctggagagactgatgccttctgcctccttgggctgctcatggggctatgcgggttcgaagggtttctggtacaaagttctaggggtggccggcactccttggcttgtggctgcctcactccagtgtctgctcttgtcttcatgtgactctcccctgtgtatcctctgtgtccaaatctctctcttaaaaagatacccatcactaagtgagctcctcccacctccccactctgtgctttctgtctatgtggatttgcttattctggacgtttcatgtaagtggaatattagatgccgtctgttgtgtctgcctgccttcactcagtgtggggttttcgagtcaccgacggcccagtccttcactcctgttgatgactgaatgataaactgtttggagagactgcatttgtttacgccttcatcggctgatgagtatttggatagtttctaccttgtggctgttgtgaatagtgccgtcatgagtacatgcaccgagcatcacaccccgcaaggaggtggcagtacccaaggggcagggacctgccctgggagcagggtttcaaagctcccggcaagcacagggggctggacagtgtgggcagggaccttgctgggtgggctcccacctgtgccctggcctgtggtcttggctctgccctgttttaggagagggacccaccattctctttgtcctttgaacttttgtga

SEQ ID NO: 460919 - DNA, 2709 bp, Homo sapiens
tcacatgcatgtctttattgtaggcatgagcctgtcctctgtgacgctggccagcgccctacaggtcaggggtgaagctctgtctgaggaggaaatctggtccctcctgttcctggccgctgagcagctcctggaagacctccgcaacgattcctcggactatgtggtttgcccctggtcagccctgctttctgcagctggaagcctttctttccaaggccgtgtttctcatatagaggctgctcctttcaaggcccctgaactgctacagggacagagtgaggatgagcagcctgatgcatctcagcccctgcagctctgcgagcccctgcactccatcctgctgaccatgtgtgaagaccagcctcacaggcggtgcacgttgcagtcggttctggaagcttgtcgggttcatgagaaagaagtgtctgtctacccagcccctgctggtctccacatcagaaggctggttggcttggttctgggtaccatttctgaggtggagaaaagagttgtggaggaaagctcctctgtgcagcagaacagaagctacctgctcaggaagaggctgcgtgggacaagcagcgagagcccagcggcacaggccccggagtgtctgcatccttgcagagtttcagaaagaagcacggagacccagagctcaccagagccccattggagcaccttgacacacagtcactgcagcctccttgttaaccggtaagcagcaaggcctaaagggtgctgtgaacttgatgtgagacataggtgtgggggctatggtaccttatttctttactgattattagtaagaagcctcttgctcctccagaaaatgccaatgctattccattaacagatgaagaagccacatttaagcagatccgaagccaagataatgaggggcctggtggcagctgtgctgtcagggcatcctgtttcctctgggaaccatactcaggccgagtggcggagcaacaacatgcctcaatattgttgccattatccattgccataccatgctgcataacaagcaaccacaaaacacagtggctaaaagcaacaattatgaatttagctcatgattctgtgagttggtcatttaggctgtgctcagctgggaggtcttctagactctgctgaaagccttcctgcctttttgactgtcttcggctcggctatccagcttctcctgcggggtgaatggccattgtctgggaagctctggctctcctccaccagcaggtcagcctaggattgttctcgtgacaatggcagaactgacagagaggaactgagagagagagagagagacagagagacagagagaaagaggagagagaggagagaggacggcaaggtgcataaagccttcagaactggtcttccatcatttccacttcattctgttggccatatcaggcctaaaggccagccccatttcaaggagtaagaaatagactccatctcttgatggcaggaggctgcaaagtcggattgcaaagggtgcagatcagggagaagaactgtggacatttttgcaattgtctaacttaggatgcttgaatcagatcaaaacctagatgggctcatatcttcctggacctggaacggtgtttattttgaagtttgggtgatttatttattcacatggtgacctgttgagggctgtaacagtgtcttgtcatagttgatgtcaaatccacagctgacgccctgattggatatcgtagagtttatcttgcaatactttttcctgccatttaaaactttattttcccaatgaaaacaatttttaccccctgattccttaaacaatatattttattgtcaaaatattttgaacaacatatcaaattctaaagaagccagaactgctgcagtcccatgacctgctgggtggttgctctagacctggggtcctggcaccacaaacagagaggtaaagccatggggtggagaagtcgactgtgccttgtacctccaaccccaccccaccccagtggctgtgcagcctggcttctccaggcctcagcttcccccacttgaaaaatggatataactcccccataggtgggggagaaggtgacatgcatcagtgggtgcaccctgcccaactgagcccctgtgcgggtggtctttcatgccatggaagcccttgccattgctaagtgcttcaccccttctcaacccctggccagcgctcttccaggagcagatccccaggaccagcaggcgggccggaggctcagctctggatctgtgcactcggcagcagacagctcatggccaacaactccttctcagaggggttttctgcaaagaaggagcaaggtaagcaaaataaggctgaaggacactcctcaaggaggcttgagcagggagctgtgggtggctggcacggtggctgaaaatgggcagggtcttctaggggacaacttccctgggctgaggtttataggattggactaacataaacctgaaatttgcaacttagggcataggcattcactgagtagcctcactggggaaggctctatgggggacgctgtataagatgtagggttaaagatgctgggtcccaccctagaggaagccaccggtgcgcagggtggtggcagagcgtgctacatgattcgagaactgacaaggcagaatgtgtttggaaggggccttctgcacaggtgaaaggtgggagcatagatccag

SEQ ID NO: 460920 - DNA, 660 bp, Homo sapiens
tcacatgcatgtctttattgtaggcatgagcctgtcctctgtgacgctggccagcgccctacaggtcaggggtgaagctctgtctgaggaggaaatctggtccctcctgttcctggccgctgagcagctcctggaagacctccgcaacgattcctcggactatgtggtttgcccctggtcagccctgctttctgcagctggaagcctttctttccaaggccgtgtttctcatatagaggctgctcctttcaaggcccctgaactgctacagggacagagtgaggatgagcagcctgatgcatctcagatgcatgtctattctttaggaatgaccctctactggtcagcagggtttcatgttccgccacatcagcccctgcagctctgcgagcccctgcactccatcctgctgaccatgtgtgaagaccagcctcacaggcggtgcacgttgcagtcggttctggaagcttgtcgggttcatgagaaagaagtgtctgtctacccagcccctgctggtctccacatcagaaggctggttggcttggttctgggtaccatttctgaggtcagtagagaaccgtgcttttcaagcagtagctgctggtcatgtgtggctattaaaatttgaattagttatattatcattaactaaaataaaat

SEQ ID NO: 460921 - DNA, 1228 bp, Homo sapiens
tcacatgcatgtctttattgtaggcatgagcctgtcctctgtgacgctggccagcgccctacaggtcaggggtgaagctctgtctgaggaggaaatctggtccctcctgttcctggccgctgagcagctcctggaagacctccgcaacgattcctcggactatgtggtttgcccctggtcagccctgctttctgcagctggaagcctttctttccaaggccgtgtttctcatatagaggctgctcctttcaaggcccctgaactgctacagggacagagtgaggatgagcagcctgatgcatctcagcccctgcagctctgcgagcccctgcactccatcctgctgaccatgtgtgaagaccagcctcacaggcggtgcacgttgcagtcggttctggaagcttgtcgggttcatgagaaagaagtgtctgtctacccagcccctgctggtctccacatcagaaggctggttggcttggttctgggtaccatttctgaggtggagaaaagagttgtggaggaaagctcctctgtgcagcagaacagaagctacctgctcaggaagaggctgcgtgggacaagcagcgagagcccagcggcacaggccccggagtgtctgcatccttgcagagtttcagaaagaagcacggagacccagagctcaccagagccccattggagcaccttgacacacagtcactgcagcctccttgttaaccgcgctcttccaggagcagatccccaggaccagcaggcgggccggaggctcagctctggatctgtgcactcggcagcagacagctcatggccaacaactccttctcagaggggttttctgcaaagaaggagcaaggtaagcaaaataaggctgaaggacactcctcaaggaggcttgagcagggagctgtgggtggctggcacggtggctgaaaatgggcagggtcttctaggggacaacttccctgggctgaggtttataggattggactaacataaacctgaaatttgcaacttagggcataggcattcactgagtagcctcactggggaaggctctatgggggacgctgtataagatgtagggttaaagatgctgggtcccaccctagaggaagccaccggtgcgcagggtggtggcagagcgtgctacatgattcgagaactgacaaggcagaatgtgtttggaaggggccttctgcacaggtgaaaggtgggagcatagatccag

SEQ ID NO: 460922 - DNA, 2326 bp, Homo sapiens
gctctttgcaataaatcttgctgctgctaactctttgggtccacactgcctttatgagctgtaacactcaccgcgaaggtctgcaacttcactcctgaagccagcgagaccacgaacccaccagaaggaagaaactcagaacacatctgaacatcagaaggaacaagcgctggacccaccacctttaagaactgtaacactccccacgagagtccacagcttcattcttgaagtcagtgagaccaagaacccaccaattccggacgctttttggcgacccagatgggactatcgcctatcaccaagtcgtgagaccattgcctatcactgagtggtgagactgtcacctatcgccaagcaaatcgaggccatcaagctacagatggtcttacaaatggaaccccaaatgagttcaactaacaacttctaccgaggacacctggactgacctgctggcccttccactggcctaaagagttcccctctggaggacactacaactgcagggccccttcatcacccctatccagcaggaagtagctagagcagtcatcggccaaattcccaacagcagttggagtgtccagtttagaggggggattgagaggtgacaatgtgctagcagccctcgctcactctcagtgcctcctcagcctcggcgtccactctggccatgctcaaggagcccttcagcccaccactgcactgtgggggcccctctttgggctggctgaggccagagccggctccctctgtttgtggggaggtgtggagggagaggcatgggcaggaactggggccagcacgagttccgggtgggcgtgggctcagctgtggagggtgcaccgggtcccccagcactgttggcccacctgtgccatgctcaaattcttgccgggcctcagccgcctccctgcggggcagggcttgggacctgcagcccgccatgccctaaccccccctgctccacggagcctggtcccatcgactacacaatggcaaaggagtgtgggcacgcagcatgggatggtcgggcaactcctcacgtggccctggagcgggatccactaggcgaagccagctgggctcctgagtcagcttcactcctgaagccagcgagaccacgaacccaccagaaggaagaaactccgaacaagtccgaacatcagaaggaacaaactctggacccaccacctttaagaactgtaatactcaccacgagggtccgcggcttcattcttgaagtcagtgagaccaagaacccaccaattccggacacaataggaagcaagatccctcttggtggttgtatattgcctggtctacacgtgctgcgtggaactgggctgatttcattgtatcaatatgccactattgatgtatccatcctccggctgagaggcattgggtttgtttccggttgggttctaagcagatgcttagagggagtttgggatgcagtgtgcttgctggggaccaacacctgtgaaaagaagggagaggaagcaggcttgggaagacggagaaggatccacacggaaggtaattttcaagtgggtgggcccgctctccagctcttcctgccccagctccctggcctcccttgctgtccagggtacgaggctagcggcgcgccgcggtccccgctcccttgggggacagcgagcaaggcgtatggaaaggaggaggagaaagagggggaaggggaagagcaagggaggggaagggggttcgcggctgcctggcgctcagcaagtgcaggaacggaggcaccgcagggcaggcggccaggggctcggaggctctgcctctttgagttccagaaaagtcaaccgggacagggcggtggagagacgcgcagtcttcgcggggcgggctcgggcacactggccctccaggatccgcaacattttccaacttggaaaacgtcctcttttcccattgcagaaaaaatacgctaggagagaaaactagattcctaacttcaaaacgttttagaacagagtgtgtctcttaaaactcatatggcggatgacgccaaaacagtctgtcttttgtttccagcagtttccagttggaaaattcctttgggaatttctttgcatctcaggcacaaacttcaacaacagcctcaagtagcactgtctgcattgccggattctgatttctctgacctctaacagaagttttctattttactttcgaaggtaactgaaaggggttgatttaatctacaaagctctattctcctgatgaaaatttcttaagagatctccggtttcccttgcgtttatttcatgggaattaagatgctgtgttttgatac

SEQ ID NO: 460923 - DNA, 640 bp, Homo sapiens
aagagggctttcctccttgaaggaagggtgttgggtgaactaacactattttctcctgccctttcccccaatctcaatccctttctctccaaacattcttccttgagcaccccactctggcactcaaaaagccatgggaatgggaaagaagtggctggaagtaaacagcctgcttactcacagcaactgaaaattttgtttcgacgattctggttccaggggcaggagctgaagattaatgcctggagtctgccccattctgagagcagcagcctggctcctggtggctccagcagcagccttcatatctgtttttttcttatgaagcttcttctggttggaaacttgtcaaatttcatcaggcttcttcaatgtctttaaagcaaaatgtaagaaaacggatgattgagttgacctgaattttgggattgttaagaaagctggattagaaggtcaaagggattgggacacgagaccactcagcgattaaactgaaaaggaaagaagtcaagccaaaaaacggctaataaactgaaagaacagggaggggtttggggactgaaagtctagggggagatggtgacagtggcagatgtggtggacagagtagtttccagtccaaaggttcagagatggagca

SEQ ID NO: 460924 - DNA, 2206 bp, Homo sapiens
taaagactttcagggaaagggaagagcagttaagtggcgcagatgggaacccactgcagtcactctgcaaaactggagtgcgatgcatgacggagagtcagcgttcacccagtgctagtttccaaaaggcagccactactgaactttcatgtggcaagggtgcgacacgttgctctcatgagccagatctaggttctcagtggctcctgcaggaagtcgtaagtggatgcaagaagtcccaagctggcagtctgccaggtgattccagtagggacattctacaaaatatccgactggtactcccgaaattgactgttcaggtcactgaaagcaaggaaagcctgataaactgccacggccacgaggagtctaaggacacatccaatttccattcgcatccaaaatggaatccgagacagaaagaggaccttagccttcatatctgtttttttcttatgaagcttcttctggttggaaacttgtcaaatttcatcagatggctggaactctccgtgtctccttttctttctgtcatggctggcaagagctcatgggccatgagctgcatctttataaacatgaacagattagcaggtattcccaaatgggacaaatgctaccttattgcagacagtttctagtatagtcccacattctttgagaaagtaggtggagaccccatcagcaccaggccactggcagcaaatggttgtagccaggagccagaatagagcaagtccagcctgagcctgtggtcggcagtggagaagagagggtcgcagacctgaggcaaagggcagcctgaacaatcaagaaccagagcagccctggcacccgacacccaggagagtgggctacaggaagaggatctgagaccagagcccacagagtctgcagaaactagaggcacaaggcacgaggaatcacaaagcaaacttaagtgccgacatcaaagaaggcattctcaccctgtttcctgcttctgggtttctccacattcctatagccttacagacagtaagcccagtgtggtgggaacagggaattgaagtggaaagcacaggccaggggatctgatgggtctcttagatcccctgggagggcatgacaacatagagaaagaagagtcctttaaaagcattcaacataacgtagtttgcccaggcagttcacgctgactgaaacctcctctgtcttctgaactcgggcatgcctatctcatctcttcttttgaagcagaatgctttaaatttttatttttatcctgtgaacttcaatatgcgacctccttctgtgacagagcttctcttttggtcccccatgagtggatatcaccttgtactcccctgcacccctaagctcacgttcttcatcttctctttgaccctcagcatgttatcccttgacccattcttcagttttcatgtctatcatctgcaaaatcttttctgcctcatagtacttaggagatcagacatacgcacgctggagacaggaacctcccaatatcaaattagccacttgggccatcttgtctggcacgttgcataaatgttgtatggaagacaggtcctcctcccaatttcgtttttcactggccacatgatgttagacaagtctctttctctctttgagcctctcctgtctgatccaatgggttgtaagaatcagatgaaataacagaggggagaggattacacattttaaagcactatgcaaatgtaaggtgttgttataataaaatatggatcatggcttatgttggggaagctacaagccttcccactagcccacactgctgctgcagtatgcacttatctggatcacccatgagatcaacttgcaaacaggaactggcttatgaagccatgcttgctctgagaaacataatggtcatctcactgccagtggaatgtaatatttgatgtcatgacacccttcctgtccaacttggcattggcagttggtttgacttggtggtgagaaatacaacaaaacgatgagaaattttccttctggagcacttcttaagggagcttggttgctttattggaaattcgtacttcttagctttcatgaaatgtccctttggtacattagtgagaaggttcaaggcaaaataaacacatttcatcttgaccatatttggaactcacaatataaaggagtcaaaagattattctacaaaacactttagcatttcctt

SEQ ID NO: 460925 - DNA, 2316 bp, Homo sapiens
taaagactttcagggaaagggaagagcagttaagtggcgcagatgggaacccactgcagtcactctgcaaaactggagtgcgatgcatgacggagagtcagcgttcacccagtgctagtttccaaaaggcagccactactgaactttcatgtggcaagggtgcgacacgttgctctcatgagccagatctaggttctcagtggctcctgcaggaagtcgtaagtggatgcaagaagtcccaagctggcagtctgccaggtgattccagtagggacattctacaaaatatccgactggtactcccgaaattgactgttcaggtcactgaaagcaaggaaagcctgataaactgccacggccacgaggagtctaaggacacatccaatttccattcgcatccaaaatggaatccgagacagaaagaggaccttagccttcatatctgtttttttcttatgaagcttcttctggttggaaacttgtcaaatttcatcaggaatacagagatttcgcatgatttcttaatgggattcagctgcctacgctgcagtgctttcagctgtatttgagaatgcactgtgtttctgccttgttttacgtttgcagatggctggaactctccgtgtctccttttctttctgtcatggctggcaagagctcatgggccatgagctgcatctttataaacatgaacagattagcaggtattcccaaatgggacaaatgctaccttattgcagacagtttctagtatagtcccacattctttgagaaagtaggtggagaccccatcagcaccaggccactggcagcaaatggttgtagccaggagccagaatagagcaagtccagcctgagcctgtggtcggcagtggagaagagagggtcgcagacctgaggcaaagggcagcctgaacaatcaagaaccagagcagccctggcacccgacacccaggagagtgggctacaggaagaggatctgagaccagagcccacagagtctgcagaaactagaggcacaaggcacgaggaatcacaaagcaaacttaagtgccgacatcaaagaaggcattctcaccctgtttcctgcttctgggtttctccacattcctatagccttacagacagtaagcccagtgtggtgggaacagggaattgaagtggaaagcacaggccaggggatctgatgggtctcttagatcccctgggagggcatgacaacatagagaaagaagagtcctttaaaagcattcaacataacgtagtttgcccaggcagttcacgctgactgaaacctcctctgtcttctgaactcgggcatgcctatctcatctcttcttttgaagcagaatgctttaaatttttatttttatcctgtgaacttcaatatgcgacctccttctgtgacagagcttctcttttggtcccccatgagtggatatcaccttgtactcccctgcacccctaagctcacgttcttcatcttctctttgaccctcagcatgttatcccttgacccattcttcagttttcatgtctatcatctgcaaaatcttttctgcctcatagtacttaggagatcagacatacgcacgctggagacaggaacctcccaatatcaaattagccacttgggccatcttgtctggcacgttgcataaatgttgtatggaagacaggtcctcctcccaatttcgtttttcactggccacatgatgttagacaagtctctttctctctttgagcctctcctgtctgatccaatgggttgtaagaatcagatgaaataacagaggggagaggattacacattttaaagcactatgcaaatgtaaggtgttgttataataaaatatggatcatggcttatgttggggaagctacaagccttcccactagcccacactgctgctgcagtatgcacttatctggatcacccatgagatcaacttgcaaacaggaactggcttatgaagccatgcttgctctgagaaacataatggtcatctcactgccagtggaatgtaatatttgatgtcatgacacccttcctgtccaacttggcattggcagttggtttgacttggtggtgagaaatacaacaaaacgatgagaaattttccttctggagcacttcttaagggagcttggttgctttattggaaattcgtacttcttagctttcatgaaatgtccctttggtacattagtgagaaggttcaaggcaaaataaacacatttcatcttgaccatatttggaactcacaatataaaggagtcaaaagattattctacaaaacactttagcatttcctt

SEQ ID NO: 460926 - DNA, 822 bp, Homo sapiens
taaagactttcagggaaagggaagagcagttaagtggcgcagatgggaacccactgcagtcactctgcaaaactggagtgcgatgcatgacggagagtcagcgttcacccagtgctagtttccaaaaggcagccactactgaactttcatgtggcaagggtgcgacacgttgctctcatgagccagatctaggttctcagtggctcctgcaggaagtcgtaagtggatgcaagaagtcccaagctggcagtctgccaggtgattccagtagggacattctacaaaatatccgactggtactcccgaaattgactgttcaggtcactgaaagcaaggaaagcctgataaactgccacggccacgaggagtctaaggacacatccaatttccattcgcatccaaaatggaatccgagacagaaagaggaccttagccttcatatctgtttttttcttatgaagcttcttctggttggaaacttgtcaaatttcatcagctttatgaaaacccaaccacagcaaacatacaggctggcacaaggtttgctctaaagaggaagagatctaggtggggctgaagatgtatcacttccctttggagagtgccctgccacaggcagggacaatctttcatctctcatagaggaaaacataagggaggaggcgccttccagtaaatatcctcagttgagttttcatattatatataatatattcaaggagacaaccacccaatttccctccctggattccaagccttgagatataactaatatttaagttttgcattgcagagtgccctgataataaagaacaaattcct

SEQ ID NO: 460927 - DNA, 453 bp, Homo sapiens
gtttccctgcacaagctctcttctcttgtctgctgccatgtaagacgtgactttcaccttccaccatcattgtgaggcctccccagccacatagaactgagatactcccaaagtcccatccagttatatcatcaggttgaaattccaggatctcttggtgatgggtagttatctccaagtgtggctcctggggtcagatcacctacagtctaagagaaggttctttttctccgccaatggtgatagatttggcaccaaaaaaagaagagaagaaacatgacagtcattgtttccacagtggactttctccatactttctgagttatcagttacttttgatcaacagaagtaccgctaaagacacatcccaaaaaaagattatcaggagaaacttgatttccttaatctttaaggagcacttctacactaaaaaaaaaaaaatactaatagagt

SEQ ID NO: 460928 - DNA, 861 bp, Homo sapiens
ggctcggcatcagaggaagaccgtggaaagagagggagaccgtggggagaggcagaggcagaggcagaggcaggggcaggggcaggggcagggggcaggggcaggggcagggggcaggggcaggggcagaggcagagcttgagtgcttttatgaagaataaaaatgaatgactgggcggccaacttagtttgtctttttgtcctgagtaaacacctcaacacatgggagctcaacaaaatgagaatttggaagaggtacgaacgcgaaaatgaaagtgagaaaattacaacaggtgcctcagaaatacaaaagattataagaaaccctcatgaaaaattttatgccaacaaacaagataacctaaaggaaacagataaattcctggaaaaatacaaaccaccaagattgggtctttgtgaggttattaattggcctaatttcaatactgttgtgtttcaaggaatagagaggcccgaggagagggtgagagatgggaaaatgggtggagatactcccaaagtcccatccagttatatcatcaggttgaaattccaggatctcttggtgatgggtagttatctccaagtgtggctcctggggtcagatcacctacagtctaagagaaggttctttttctccgccaatggtgatagatttggcaccaaaaaaagaagagaagaaacatgacagtcattgtttccacagtggactttctccatactttctgagttatcagttacttttgatcaacagaagtaccgctaaagacacatcccaaaaaaagattatcaggagaaacttgatttccttaatctttaaggagcacttctacactaaaaaaaaaaaaatactaatagagt

SEQ ID NO: 460929 - DNA, 1018 bp, Homo sapiens
cagtaagtgggagttaaccagatggaaaatgggcagcagcaattttggacagagcagcaggtggaaagtcaaggggccatgagaaagcaggatgcttgtgggaactgctggagacggatggtggattcggtggtgcctgttccaggaacctttagtgtgaaggatcctccagataaagagacatcatcttctcctccaaacagaaatgtcatgactgtgcttgagggatactttcaagatgacacaaaaccaggtttttggagtgctttgaagatggagaatggcttattaacactagtcacattggcagatgtttttcataacatcaaccagttgaataagcctctgcacagccctggagaaaatgttttcaccaaaaatgtcaagagtttttggatttaaaagaaaactaaagttttggaaaaaaccatgaggcaaaagaaatccttgagatgtttccattgttgcttgggcctggggccatcatgtgagaacagaggagaagcctggtttgagtgagtttttcctgaagcaaaagggaagagcttaatttcaaaaggaatatcttgaaagacgcatcaactcaccattagaaaacatgaaacgacagattatatcctaagattgtgtgaacctcttacctggaaacccgtacaattgctttatctaccaatcctaaactattatatcttgatctttactcaatcctaattacacacccacattgaaagacctatcttaattcagacttcaaaatcttacaaacgtccaagtccctcctttgaaatgctactaagactgcagtaagaatacatagcatgcagtgactgagaggaagagagatactaacacttgaagtaatccagtctatcaataggagatggactgctttgatttaaagcgatttacaaaaggatttggatacctcatctctcctgtttcgccaaggtcttgactcatcgctgcaggttgtataattagtctcattaatctagcaaatgatggcaaaatgcttggt

SEQ ID NO: 460930 - DNA, 998 bp, Homo sapiens
cagtaagtgggagttaaccagatggaaaatgggcagcagcaattttggacagagcagcaggtggaaagtcaaggggccatgagaaagcaggatgcttgtgggaactgctggagacggatggtggattcggtggtgcctgttccaggaacctttagtgtgaaggatcctccagataaagagacatcatcttctcctccaaacagaaatgtcatgactgtgcttgagggatactttcaagatgacacaaaaccaggtttttggagtgctttgaagatggagaatggcttattaacactagtcacattggcagatgtttttcataacatcaaccagttgaataagcctctgcacagccctggagaaaatgttttcaccaaaaatgtcaagagtttttggatttaaaagaaaactaaagttttggaaaaaaccatgaggcaaaagaaatccttgagatgtttccattgttgcttgggcctggggccatcatgtgagaacagaggagaagcctggtttgagtgagtttttcctgaagcaaaagggaagagcttaatttcaaaaggaatatcttgaaagacgcatcaactcaccattagaaaacatgaaacgacagattatatcctaagattgtgtgaacctcttacctggaaacccgtacaattgctttatctaccaatcctaaactattatatcttgatctttactcaatcctaattacacacccacattgaaagacctatcttaattcagacttcaaaatcttacaaacgtccaagtccctcctttgaaatgctactaagactgcagtaagaatacatagcatgcagtgactgagaggaagagagatactaacacttgaagtaatccagtctatcaataggagatggactgctttgatttaaagcgatttacaaaaggatttggatacctcatctctcctgtttcgccaaggtcttgactcatcgctgcagatgactaaatcccattgagctaaatctcct

SEQ ID NO: 460931 - DNA, 1754 bp, Homo sapiens
gatactcaagaaataagacccatcttcatgttgggtctccacgttgcctccagaagagtgattcagtctggcatctctccacaatataaggccacatgcttcccaactggatggtcaagacattggggtcacagggtcctctttctcctctactctttacatcttgccatagcccctaataaatctaattcctctaagcaccactctgctctcccctctgaatgcctactgctccgggtgtcctctgtgtaccctagtctctccctagcccacctctctgtgcccaagagacagagcacaaggatcccaccaacacctcctgtgccttctaagctctgggttccctttctactgggtcaaagggtggcaccagctgcagttattcctctgccaaaggccagggttctgaatggccatcctctccgggttgtagtgaccgccctctcctgtccctctgcaagcccaagagggtagggcacttcctttggtggtggtctttcaccttactcatgcttttgtaaatagtcctgctcctcaatttccccatgctatgagcatggaaagagagatgaagctatactacccaagaaacaaaaagggacctacttcacagtaattaaagaaaccctcatgtatccaggaaagggctatggagatgctcataaaggattctcattcctattgtaagccagagagaatgcaatccaatgcaatgtttcgatcatggagtctttattggacacaggctggcatgagttgatggcacctgaaaatcagcaagctacaaatgctcctgggaggaacagcatcttcagtctctaaaccttggtgcagctgagtttattagaggttttccagaccttaacaagagcctgtgacagtactaagaccctggggatggtgcgaaggagtctggaaccaggaggctgctgcgttttacaggatactggagcccagttctcaatcaaacgctagagctcagaaagacatgcctctcagatctgtctacctttaagcatttttttaattaataactggatattgaccattaaaaccatcacaggtataggagtttgttgactaaaatttgtattatagatacaactgaaatgtttacaaatctttataagaaaatcattactacttgggtcagaagcaatgcaagtcaagcttaggtctatggtttttgctcctgatcagtaatatgtagatggcatgtgttctcttaccctctctaaatctggaaagatgcatttcatagtacctctaatctcaaaaattttaactttcacttttaattgttgaaaatgtcattctgaaatccaacaatgaatgagtgaatgtgtatatattcatcatatacttgtacacacacacacaaataaaacctgtatctcacggcccacatatcttgcttaagctgctctttcaggaagatttatgacactctgcttcacaaagaaagtttaaaagagagaaagaaaacgaaatgaaacagtgactgttccctagtgcaattactctgtcaaatactcccctagggaaaggaatttgctcttattgtgaaataaattaatatagaaaccagactcctgcagtaacttttctttatccccaggcagtattttcccactactgctctcaaaattcacttttggcgatacacatatgggaggttggaaatagctagaaattatatgtttgaatttaaatatattcccatttccataaatgttagcagctccccaaattat

SEQ ID NO: 460932 - DNA, 684 bp, Homo sapiens
  misc_feature (9)..(10): n is a, c, g, or t
  misc_feature (12)..(12): n is a, c, g, or t
  misc_feature (14)..(15): n is a, c, g, or t
tgccttggnntntnnaacataatacctctaacttcttgaatattggaggcagggtagcagtcagagaattcaactttccaaagtcagctttttgcaaaggtagaatgtgggacagacaccacggtgagtttgctgccggtggaagagatccaagttaccccaagttacccgcggcatatctgtacggggtgggcttcccgcatgcacagtgcttccctcacccttgggaactgagcacgcgcagtgtgtttaggaagttgtgcgcatgcccatctgaggctttcttcattgtgtctggtggagtgtacccggaagaccatactttgccactgttgtctcttaatgtgcacgctcaggaagtttcttctccctgggaatgtactgttgacccttgaacaacacaggtttaaactgtgaaggtccacttatacatgaattttatcccatctttgccaccccaagacagcaagaccaaccccttctctccctccttctcagcctactcaacatgaagacaacaaagatgaatgatccacttccattgtatgatgttcctcttccacttaatggatcataagtatattttctctttcttatgattttcttaataacatgttgttttctctggcttactttattgtaagaatgcagcatataatacatgtaacatacaaaatatgtgtc

SEQ ID NO: 460933 - DNA, 1816 bp, Homo sapiens
tggactcgccctcagaccctccataacggaattcaggcctactgacaccttgatttaagcccagtgaaacctgtgtcaggcttctgacctacagaaccataaggcgttaaatgctgtcctcgtgctgagacatccagattcactgctcccctgacctccagacctgcgggaagttcacctcccatctgcctacaccctctgctctcagtgagggcggcagcggcagaacaaaggagactggcacacgtgaaaccctcgcgtaaggcgggcatgacactcacagactgatgagcacacctgatgggccagaagggcatggtgtggagcagcgggggctgcagtgagaggagcagtggccagacacacctgttggggtgcagaaaaccaccaggtgcacgaggcactcctccactgcagggctgcggccactcggctgcctgtgtgctctgcctgtgggcatcaggctgaggccttttgtctctcctggggaacttctgcatttatcagtgcccgaaggctgggactgtctggggcggggcaagaaggacttgctgggatccccgccagtgggaggtcggcgtggttgttctgcatccgcatctgtgcctgccaccctgtgcacttgtcctgctgtgttcttgactccctgaggtggggggagtgtccatcctatttatctggcatgtgggaaccccagctcagtgccactagctttatgcctcagggttctctccaggtggacccacccaccaggtattggagattaatgaatgcatgggagaagcctgatgtagacacatggtctgtgtcacagacagagaagctgacgctccgtgagctttcagtggcccagggtcaccacgctgggaaatggcacagccaggatttgaactcagctgttgtggattctgtgcgccagtcagctgctgcctttatggtgtctcccttgcctctgggacaaagggagcaggaagcagctccttcacctagcctggtctcctctcctccagcagcagtgctccaaatgccctcccacctccttgcatggctgactccctctcatttaaagcctcagctcaaatgtacattacagaatccttccctgggtgagagccttcgtcaaggagctgcgccctcccacccaattagtcttacacgactttctctatagaacttatcctgattggaaagcagcttgtttgtctgcatacgtgtttactgcctgtctctgtgaaaggaatgatcttacctaagatccttgtccccgggtgcctgctgaacaatcgcctggtgcctgccagaatatctgtaggaagacagccggtaacactagagttgctgtgtgtgtactccagagaaagaggatgcagtgcctcgggccggtccccaacttgcataaggctccctgcgggtaacatctaccttggcctgtcatcacgagcccacatgctctgttttctgagaagaaagatgtgatcctgtggtgaaaggagaaagctggcccgagcaggacacggcccagatgagtctcccattacctactctcgcatccctgcagggaccacggcagccacactgcatagctgtaccagggcacctagaaacctggtgagtccctctcctccttggggtgtgctggcgaacaatgaaggcccctgaacaaaaataccaggcacctgttggtcctcagagcctccaggtgctccacatgatggcccttctggccccttgcccaagccaggagccagtgaagtgaagtggcccacatgtagaggaagccaccccaacacccccaccagtcccagcacaaggattt

SEQ ID NO: 460934 - DNA, 2349 bp, Homo sapiens
gaattacccggaaccccagagctcaccctctctgaaggagagcaggtgcctcctgagagcagggcttctctaccttggggcactatgaacattctgagtggggcgccctgaacgagtgcccagatgcttgtgaggcccagatcttggggtgtgcagccaggaagggctctgctagctttcccacctccctcctgacctcttctgcccctcactggacccagcccgttggcttcaggatgggccccacgggacatgctttcatggaacctgaggaaagaatgcacttacaacagcgccgggagcacagaggcttcccactaccctttccgagaagcacgtctattttctctaatttattcagtgccgctgtgcgtgtgtggcctctcaggtaaagagtgatttcagctaacatgcaccatgcctgccacctacctgtactggagatttcagactgatgcctcccttggccctactggcctcctgacctatgagtttatctgggagaagaatgttctaggcagagggaatattcagtgcaaatatcctggggtggaaatgtgcctgtcttggtccaagaacagtaaagaagccagtgtggccttagcagggtggggagtgatgattgatgatggtgatgatgatgatgatgatgatgatgatgatgatgatggtgacggtaaagatgaaaaagaagagaaaatcataaagatggcaaccattactattgttctttctcactccgctgagcactcacaatgtatcagacacagcattcagggtgcttccccattcattatcccagctaatccttgcagcaacctttatgagagcccagttctgggcatccacgcctttaaccgctaagccatgctgtctcaatgtagccaccccagcagccttggcccagtgggccggtaaggctggcttgttgagaaagggacactggtatagggcatacccttggtgtcaatggggtgagtttgagagatgggaccgttgaggactgaggaatgtgaaaggcaagactttttagcagaagctgcctctaaggagaggcctccttcatcaccctgctcagactgcactccacccttggcattccacactcccttggtactgcaagacaaggcaatgataaccactcgatttcaactgaaatcacttgttttttcccccttcccaactgggctctcccctgagacccaggtgttaatgaaatcaaacaaatgaaaatgggtaaattattgcaaagctatgaacacctccacagggccacgcctcactagtttccaataccacctcattctggaggctgccggaggagctgaagcaattttgtcccatggatgaatgggttagctttcctgttaacttctgtaattgactcattttcaggtattaaaatgtccagcctagtttctatcaaatccagtcttgcagccttttccagtcttcttccttcctcttgtctcagcttgacttgagctggaatcctggaggaggggaggttggggaactgggactgtctggcatcttcctccctccttgccctcttatctgctgctgtgggtgttctgtcccctgtgtgtgagccctgaggataccctacaactaacaggcatgatgccatcaagacatcttgagcctggctacctcccgtggcctgtattttgtccacaggaaactcgcgcagtctcactacagcaaattgaggtggtatggggtgcctgctgctgcctctctcttcacctttccacagagggctgccccagcctgactcccacttccagagtttctccagtacttcctggaatatttctcaaactgctgtacttgagtctttagcacagggtctgattccagggggaacccagcctaagacatgtgtccttaagctcccaagtacacactcccaggatggttcttatctcatctcatcctatcctagttgagggtggaatggggctcccagattccacagctcagcaagccaccagccatgggtatcaggctggtccctgaagccaatctcttgagcaacctcctatgcttggtggctgctgtgccttccatgccttgtccctttctgtacctcttcctgagtcacagtgctctctgcccagggtgacaactctcaaagctgactatctttttacttccccatatttctctcaaacatttactcctctccttatatagattggagtgggtgatggggatactcttaggtcttagtgggtgacctgttaggccacctcttaagaagtctgagggtgtgtgtcctgcagctcctctatagaatatggggcacttatcacttatcttatgacaaatttagctcagggactt

SEQ ID NO: 460935 - DNA, 1624 bp, Homo sapiens
aattttacgttatagtacattttactacagtaaaaaatgttttaaaaaagaaatcattactctcttgctaagatcttgtttcatcttaacacacacgagatgccttgtcttcatttcgtggacaggcaaggccgaattccgtttcacagatagaggactgagatctggaggcagagggcaggaattaaaaacaagacaaacaagagccttatacaggcagtgtctttctgagtctgatccctgttgtcttgagagctgcggtgagggaaagtcgtcttcagagccctcagggtcaaagcagtttgttacccttgagatagacaaagctcctaacctctccagctttttgccgacagctcgattctgatgggcactgaccttttccgaccctgttttcaggagccgactcctggcaggttggttgtaggggccctcttgagtgcttcacacacagcagtcctgttgggcttggattccagcctcaaattccgcgatttggccggcatcctaatccccgagtgactcttgccaaccactctctgtggggcctgtgtgcttcctcctgggttctggggcgctggcggcgtccgcttcaccgggaacgggagccccagcctcccgaggccttcctgcctggctctgggaatggccactgtccagaaagccccgcggccgtccatgctcgctcgctcagtcaggcccttgtggggatattgcagaacgagtccgagttactatccctttaaatacaggcgtttcggcctagctgccgccggtccaatccgcagcgcttccgtgccccactttcccgcgtcagcctggctccggcctccaccagggggtgctagtgagatcccagccagcctcagagctgagcgtccagggccttcaaatgtccccatccttgaaaaggcaactccagtggcatcttctgcggggagaccagaagcagcatctgacgaggagacagcactggcggcaattgcatcattgtgcaaacaatatagagtgtacttacccaaacctaaacagcacagcctactacacacccaggctgtaggctgtgcttctagactacaaacctgtacagtgtggtactgaacactgtaggcaactgtaacacaatggtgtacctaattcctctgcctagaaagtgtgctggaattactgcctggcttctgatgaatagggcgtattgagagtgatgctttgtgagttctgaggctaggtcatagaaaggattgaacttattcctgaatgttgctcttggatcacttgcttttttgggaaccaccagccatgtcatgaggacactcaagcaaccctgcagagaagcacatgtgtggagaggcacttcttggaaaggaggccaacttgccagaaccaactaatttgtcatgtgagtgagtcattttggaagcagatcctctaccctcagtcaggccttccgatgatttcagcccccagcctttgagtctgccccaaacaccatgagtagagacaagcccttcccactgtgtccaccctggctgaattccagaccgttaaaaaaacaagagaaaataaattattattagtgttttgagtcactaagttttggactaatttgttatgcagcaatagc

SEQ ID NO: 460936 - DNA, 491 bp, Homo sapiens
  misc_feature (17)..(17): n is a, c, g, or t
cgtttacggacaactgnttgggaaacacactcttggaggaccaacaaagctgatctagataaagtaccagcactcaagagcagaaaattgaagcaaaaataagcaggagtgggtgactattctacaccctggaaaactgcaacaggactgctgttcccaaccaagactgttatgacccaaagtaacagagctgagtggctccatgcagaagtctgtgttcaacatctgtcatgctggagatcattaatgttcaattgcttcctattgtcttcatgtcattcaacttcatttcattgtcattgcttcagctgggggattaatcaactatttatgagaagacaggacttggagtcagggcggtcacaatggggttatagtctgagcaatggtggggaaagcaagtcacggttaaaagactactagtttgtgacagtttgttgacattttaataaacatatttgagaataaaagcatgggcctcgttggcctca

SEQ ID NO: 460937 - DNA, 921 bp, Homo sapiens
ggagctacaattcaagcaccgcctccggcgtcctgccccacctttaatctcaattggctcctcagccttcaactatgaaatctacttctcctccccacacccctacacccaccttaggccataaaactttattggctggccaggaaaagagccagggaggagagatctcatggtggacaagggaccccattacccaagctgatgggaactttgggaacctaaggaggagggcccatgggggaaggggtgttgcaggaaggtccaaagaagaagaatcagaagacccgggtgtctggacacttagaataacttgtttagccaagctgctgaaattgcacaaggaaacaaaaaaggctaaaccaactaaaataaacagaaaaccacttcccacggggcagggagccgacatcagtgtctggcctgggcaagtgaagcctctgggctttaactctgagctgactcaggctggtctgaaattcctgtgctgaaatgatggtgtgagccactgcacccagcctgttttttaagaagtcattctgcattcaaaatgtgcagctagctcccgttccctacaggactgctgttcccaaccaagactgttatgacccaaagtaacagagctgagtggctccatgcagaagtctgtgttcaacatctgtcatgctggagatcattaatgttcaattgcttcctattgtcttcatgtcattcaacttcatttcattgtcattgcttcagctgggggattaatcaactatttatgagaagacaggacttggagtcagggcggtcacaatggggttatagtctgagcaatggtggggaaagcaagtcacggttaaaagactactagtttgtgacagtttgttgacattttaataaacatatttgagaataaaagcatgggcctcgttggcctca

SEQ ID NO: 460938 - DNA, 771 bp, Homo sapiens
  misc_feature (29)..(29): n is a, c, g, or t
aacttaggctaggtacgaggctgggtgtngaatcggccgaggggaaccgccatcttccagtaattcgccaaaatgacgaacacaaagggaaagaggagaggcacccgatatatgttctctaggccttttagaaaacatggagttgttcctttggccacatatatgcgaatctataagaaaggtgatattgtagacatcaagggaatgggtactgttcaaaaaggaatgccccacaagtgttaccatggcaaaactggaagagtctacaatgttacccagcatgctgttggcattgttgtaaacaaacaagttaagggcaagattcttgccaagagaattaatgtgcgtattgagcacattaagcactctaagagccgagatagcttcctgaaacgtgtgaaggaaaatgatcagaaaaagaaagaagccaaagagaaaggtacctgggttcaactaaagcgccagcctgctccacccagagaagcacactttgtgagaaccaatgggaaggagcctgagctgctggaacctattccctatgaattcatggcataataggtgttaaaaaaaaaaataaaggacctctgggctacaaaaaaaaaaaaaaaaaactcgagtttttttttttttttttttttttttcaaatttaaaatatcttttttcttctctttaaatcatttcgccattctccagggtatatcctacggggaagggtaggggaaccatggccagccctggctcctactgccatcctcccaaccgaagttagc

SEQ ID NO: 460939 - DNA, 598 bp, Homo sapiens
  misc_feature (29)..(29): n is a, c, g, or t
aacttaggctaggtacgaggctgggtgtngaatcggccgaggggaaccgccatcttccagtaattcgccaaaatgacgaacacaaagggaaagaggagaggcacccgatatatgttctctaggccttttagaaaacatggagttgttcctttggccacatatatgcgaatctataagaaaggtgatattgtagacatcaagggaatgggtactgttcaaaaaggaatgccccacaagtgttaccatggcaaaactggaagagtctacaatgttacccagcatgctgttggcattgttgtaaacaaacaagttaagggcaagattcttgccaagagaattaatgtgcgtattgagcacattaagcactctaagagccgagatagcttcctgaaacgtgtgaaggaaaatgatcagaaaaagaaagaagccaaagagaaaggtacctgggttcaactaaagcgccagcctgctccacccagagaagcacactttgtgagaaccaatgggaaggagcctgagctgctggaacctattccctatgaattcatggcataataggtgttaaaaaaaaaaataaaggacctctgggctacaaaaa

SEQ ID NO: 460940 - DNA, 815 bp, Homo sapiens
gacgacggcgtcctcttgatcgcccttgaaggcccctttccgggctgtctgacacgatgcaagtgtcagcttgtgttggccggttgcctttctttcgcaagaggggaaaatatcctcacagactttctgtgttctcagagacgatcttcttccctagaaagaagtcgcttacggttggcgtttccctcaggcagcgccgtgggcagcccacaggcccttgtaaggcgcgcgccgcggccccgcctctttcctttcggccggaaccgccatcttccagtaattcgccaaaatgacgaacacaaagggaaagaggagaggcacccgatatatgttctctaggccttttagaaaacatggagttgttcctttggccacatatatgcgaatctataagaaaggtgatattgtagacatcaagggaatgggtactgttcaaaaaggaatgccccacaagtgttaccatggcaaaactggaagagtctacaatgttacccagcatgctgttggcattgttgtaaacaaacaagttaagggcaagattcttgccaagagaattaatgtgcgtattgagcacattaagcactctaagagccgagatagcttcctgaaacgtgtgaaggaaaatgatcagaaaaagaaagaagccaaagagaaaggtacctgggttcaactaaagcgccagcctgctccacccagagaagcacactttgtgagaaccaatgggaaggagcctgagctgctggaacctattccctatgaattcatggcataataggtgttaaaaaaaaaaataaaggacctctgggctacaaaaa

SEQ ID NO: 460941 - DNA, 645 bp, Homo sapiens
gcggctaggtagcgaggccgggtggtcgcgccatcttccagtaattcgccaaaatgacgaacacaaagggaaagaggagaggcacccgatatatgttctctaggccttttagaaaacatggagttgttcctttggccacatatatgcgaatctataagaaaggtgatattgtagacatcaagggaatgggtactgttcaaaaaggaatgccccacaagtgttaccatggcaaaactggaagagtctacaatgttacccagcatgctgttggcattgttgtaaacaaacaagttaagggcaagattcttgccaagagaattaatgtgcgtattgagcacattaagcactctaagagccgagatagcttcctgaaacgtgtgaaggaaaatgatcagaaaaagaaagaagccaaagagaaaggtacctgggttcaactaaagcgccagcctgctccacccagagaagcacactttgtgagaaccaatgggaaggagcctgagctgctggaacctattccctatgaattcatggcataataggtgttaaaaaaaaaaataaaggacctctgggctacaaaaatgtttctcttcattgagtagaagtgtggtgtcctctcccccaaagaaatatttaaagcaaattttg

SEQ ID NO: 460942 - DNA, 168 bp, Homo sapiens
gtggagtctgtagacttcgaccatggacggcatgctggtttggcccgggacgcacgttttgctaagatcgctgatggagggagcctgagctgctggaacctattccctatgaattcatggcataataggtgttaaaaaaaaaaataaaggacctctgggctacaaaaa

SEQ ID NO: 460943 - DNA, 974 bp, Homo sapiens
gacgacggcgtcctcttgatcgcccttgaaggcccctttccgggctgtctgacacgatgcaagtgtcagcttgtgttggccggttgcctttctttcgcaagaggggaaaatatcctcacagactttctgtgttctcagagacgatcttcttccctagaaagaagtcgcttacggttggcgtttccctcaggcagcgccgtgggcagcccacaggcccttgtaaggcgcgcgccgcggccccgcctctttcctttcggccggaaccgccatcttccagtaattcgccaaaatgacgaacacaaagggaaagaggagaggcacccgatatatgttctctaggccttttagaaaacatggagttgttcctttggccacatatatgcgaatctataagaaaggtgatattgtagacatcaagggaatgggtactgttcaaaaaggaatgccccacaagtgttaccatggcaaaactggaagagtctacaatgttacccagcatgctgttggcattgttgtaaacaaacaagttaagggcaagattcttgccaagagaattaatgtgcgtattgagcacattaagcactctaagagccgagatagcttcctgaaacgtgtgaaggaaaatgatcagaaaaagaaagaagccaaagagaaaggtacctgggttcaactaaagcgccagcctgctccacccagagaagcacactttgtgagaaccaatgggaaggagcctgagctgctggaacctattccctatgaattcatggcataataggtgttaaaaaaaaaaataaaggacctctgggctacaaaaacaaaaagaaagcttatgcttggggcgcaattgaagctcataggccaatcggcctataggagtcatatacattcccgggcggcttattacacgcgtactggagaaccggtggtacacattaatacgtagacatcacctgatcacaggtaatcaaagcaaa

SEQ ID NO: 460944 - DNA, 1196 bp, Homo sapiens
  misc_feature (816)..(816): n is a, c, g, or t
  misc_feature (819)..(819): n is a, c, g, or t
gacgacggcgtcctcttgatcgcccttgaaggcccctttccgggctgtctgacacgatgcaagtgtcagcttgtgttggccggttgcctttctttcgcaagaggggaaaatatcctcacagactttctgtgttctcagagacgatcttcttccctagaaagaagtcgcttacggttggcgtttccctcaggcagcgccgtgggcagcccacaggcccttgtaaggcgcgcgccgcggccccgcctctttcctttcggccggaaccgccatcttccagtaattcgccaaaatgacgaacacaaagggaaagaggagaggcacccgatatatgttctctaggccttttagaaaacatggagttgttcctttggccacatatatgcgaatctataagaaaggtgatattgtagacatcaagggaatgggtactgttcaaaaaggaatgccccacaagtgttaccatggcaaaactggaagagtctacaatgttacccagcatgctgttggcattgttgtaaacaaacaagttaagggcaagattcttgccaagagaattaatgtgcgtattgagcacattaagcactctaagagccgagatagcttcctgaaacgtgtgaaggaaaatgatcagaaaaagaaagaagccaaagagaaaggtacctgggttcaactaaagcgccagcctgctccacccagagaagcacactttgtgagaaccaatgggaaggagcctgagctgctggaacctattccctatgaattcatggcataataggtgttaaaaaaaaaaataaaggacctctgggctacaaaaanaanaaaaaaaaaaaaaaaaaaaaaaaaaaaaaaaaaaaaaaaaaaaaaaaaaaacaaaaaaacaaaaaaaaaaaaaaagaaaaaaaaaaaaaaaacacaagaaacaaaaacgacaacacaaaaacacaaaacacaaaaaaaagggaggaggtggcgcataacgactctcgacttcctaggtgacggagcaagcacagtcatgcaaccacgaggtcctttgatggacgactaacggtagcaagacagatgtgcacgtgtttatttagaaacgcaggtgagtccccggacgtctattatctgtcgcagtctcgtgatgatcaactacgcgtagccgaggcgcatacctcgtgctagcagcgactcgcttgttatggggtaga

SEQ ID NO: 460945 - DNA, 881 bp, Homo sapiens
gacgacggcgtcctcttgatcgcccttgaaggcccctttccgggctgtctgacacgatgcaagtgtcagcttgtgttggccggttgcctttctttcgcaagaggggaaaatatcctcacagactttctgtgttctcagagacgatcttcttccctagaaagaagtcgcttacggttggcgtttccctcaggcagcgccgtgggcagcccacaggcccttgtaaggcgcgcgccgcggccccgcctctttcctttcggccggaaccgccatcttccagtaattcgccaaaatgacgaacacaaagggaaagaggagaggcacccgatatatgttctctaggccttttagaaaacatggagttgttcctttggccacatatatgcgaatctataagaaaggtgatattgtagacatcaagggaatgggtactgttcaaaaaggaatgccccacaagtgttaccatggcaaaactggaagagtctacaatgttacccagcatgctgttggcattgttgtaaacaaacaagttaagggcaagattcttgccaagagaattaatgtgcgtattgagcacattaagcactctaagagccgagatagcttcctgaaacgtgtgaaggaaaatgatcagaaaaagaaagaagccaaagagaaaggtacctgggttcaactaaagcgccagcctgctccacccagagaagcacactttgtgagaaccaatgggaaggagcctgagctgctggaacctattccctatgaattcatggcataataggtgttaaaaaaaaaaataaaggacctctgggctacaaaaatgtttctcttcattgagtagaagtgtggtgtcctctcccccaaagaaatatttaaagcaaattttg

SEQ ID NO: 460946 - DNA, 929 bp, Homo sapiens
gacgacggcgtcctcttgatcgcccttgaaggcccctttccgggctgtctgacacgatgcaagtgtcagcttgtgttggccggttgcctttctttcgcaagaggggaaaatatcctcacagactttctgtgttctcagagacgatcttcttccctagaaagaagtcgcttacggttggcgtttccctcaggcagcgccgtgggcagcccacaggcccttgtaaggcgcgcgccgcggccccgcctctttcctttcggccggaaccgccatcttccaggtagggcctacgcgtggctcccgggcgctacgtgttcgacagacttgaaccgcgaccttgtggcctcagaggtcgttcattgggaccgtggggagactctctaacctgtttgagtaattcgccaaaatgacgaacacaaagggaaagaggagaggcacccgatatatgttctctaggccttttagaaaacatggagttgttcctttggccacatatatgcgaatctataagaaaggtgatattgtagacatcaagggaatgggtactgttcaaaaaggaatgccccacaagtgttaccatggcaaaactggaagagtctacaatgttacccagcatgctgttggcattgttgtaaacaaacaagttaagggcaagattcttgccaagagaattaatgtgcgtattgagcacattaagcactctaagagccgagatagcttcctgaaacgtgtgaaggaaaatgatcagaaaaagaaagaagccaaagagaaaggtacctgggttcaactaaagcgccagcctgctccacccagagaagcacactttgtgagaaccaatgggaaggagcctgagctgctggaacctattccctatgaattcatggcataataggtgttaaaaaaaaaaataaaggacctctgggctacaaaaa

SEQ ID NO: 460947 - DNA, 5156 bp, Homo sapiens
gacgacggcgtcctcttgatcgcccttgaaggcccctttccgggctgtctgacacgatgcaagtgtcagcttgtgttggccggttgcctttctttcgcaagaggggaaaatatcctcacagactttctgtgttctcagagacgatcttcttccctagaaagaagtcgcttacggttggcgtttccctcaggcagcgccgtgggcagcccacaggcccttgtaaggcgcgcgccgcggccccgcctctttcctttcggccggaaccgccatcttccagtaattcgccaaaatgacgaacacaaagggaaagaggagaggcacccgatatatgttctctaggccttttagaaaacatggagttgttcctttggccacatatatgcgaatctataagaaaggtgatattgtagacatcaagggaatgggtactgttcaaaaaggaatgccccacaagtgttaccatggcaaaactggaagagtctacaatgttacccagcatgctgttggcattgttgtaaacaaacaagttaagtaagtagtgttgtagttctttgtggctaaccagtattccctcatatacccccttttcactttgccagttggacttatgtctttattggtcattcaagtggggcaaaggaaatatccttttaaaactcaggcaaactgggtgtttgtctgtatcctgtcagaggaaacaaattgaaatagatttactggaaagtcttacacagttagttactaagcggtttgtttgttttgtttcgagacggagtcttgctctgtcgccctggctggagtgcagtggtgggatctctgctctctgcaagctccacctcctgggttcacgccattctcctgcctcagcctctggggtagctaggactacaggcgcccaccaccatgcccagctaaattttttgtattcttagtagagacagggtttcactgtgtcagccaggatggtctcaatctcctgacctcgtgatctgcctgcctcggcctcccaaagtgctgggattacaggcatgagccaccgcgcctggcccagcagtttttatagaataaaaagagaagtttagtaaacttttaaattttattagcagtctggttttagattactagagtttaagagaccatcatctcatcaaagagagttaaaagtagggatgttctctgcaaggcctcttctgatatgattaattgattgtaaattaagtaatcaaggcatactttgttgatttgtcatatctgggtaaaaggtttatggtttatttaataaatgaaactgcaaaatcagttttctacatttctgttatatttttgttaaagcacttcgtattgagcacattaagcactctaagagccgagatagcttcctgaaacgtgtgaaggaaaatgatcagaaaaagaaagaagccaaagagaaaggtacctgggttcaactaaagcgccaggtaagaatttggtgtatatttcattggttctgagagcactttaaggttgagatttaacacatcacataattattttattccctttttttttcctttaatagcctgctccacccagagaagcacactttgtgagaaccaatgggaaggagcctgagctgctggaacctattccctatgaattcatggcataataggtgttaaaaaaaaaaataaaggacctctgggctacaaaaagtctagtgactccggctggctgctgcggggcgaggagactcgcagaatgcctgactagaggccactcgcgcgctctggacggtggccgtatctccagggtctgagccccggagccgcagtcctgccgcagagcgcctggagccgcgagcagctagcagcccggcgaagcgcacagcctcggcgatagtcagctccgcggcctctgctcccgcccctcccggccgctccgggaaggggcggagacgaggaggagctgggacggccgccgcgctcccgggcgcaccaagccctttaaaagccgcgggccttgacagttctgcaggcagccgccgcggtcccggacctctagtcccgcactcccagctggcgagccggctccgggtgcggcgaggcccagccctctcggattgcgcgccggaccccgggacgcgctccatgcggccgctcagcatgtccgggcactttctgctcgcacccatccccgagtcctcctcggactacctactgcccaaggacatcaaactggcggtgctgggcgccggccgcgtgggcaagagcgcaatgatcgtgcgcttcctgaccaagagattcattggagactatgaaccgaatacaggcaagctgtattcacggctggtctatgtcgagggggaccagctctccctgcagatccaggatactcccgggggcgtccagatccaagacagcctcccccaggtcgtcgattccctgtccaaatgcgtgcagtgggccgagggttttctgctggtctattccatcacagactatgacagctacttgtccatccgacccctttatcagcacatccggaaggtccaccctgactctaaagcccctgtcatcatcgtgggcaacaagggggaccttttgcatgcccggcaggtgcagacacaggacggtattcagctagccaatgagctgggcagcctgttccttgaaatttccactagcgaaaactacgaagatgtctgtgatgtgtttcagcatctctgcaaagaagtgagcaagatgcacggcctcagtggggaaagaagaagagcctccatcatccctcggccccgctctcccaacatgcaggacctgaagagacgcttcaagcaggctctgtctcccaaagtcaaagccccctctgcactggggtgaactatctcagacagatgcctctcctttttaatacgcatttgtagctatttgttactccattagaaggagtccccctcgagggcagtagctgcattttatgatcctgtcttccaatcttctagttcagtgcttccccatagagtggcgcgagtcactgtccccggcaataatataacttttaaaatggaaaatctagtttgttaagactctacttttctcaatccaaggaatagttacacatacacacacacacgcacacaatatatgtacatatatgtatatatatcacatatatgatatatgtatatacgtatatatatcacatatatgatatatgtatatacgtatatatatcacatatatgatatatgtatatacgtatatatatcacatatatgatatatgtatatacgtatatatatcacatatatgatatatgtatatacgtatatatatcacatatatgatatatgtatatacgtatatatatcacatatatgatatatgtatatacgtatatatatcacatatatgatatatgtatatacgtatatatatcacatatatgatatatgtatatacgtatatatatcacatatatgatatatgtatatacgtatatatatcacatatatgatatatgtatatacgtatatatatcatatatatgatatatgtatatacgtatatatatcatatatatgatatatgtatatatatcatatatgtgtatatatattatatatatacatacatatatatgtctagaaaccattgctatgcttactaaatgacactacatagggctggcagagcatcatcattgtccataaccagtatctgttgatcttgtgccagatgtttagcacattttctacttcattactgctcaaactctaatctttgaataatgactcaatttctctcttgcaaggggcacgcagtccctgctgcaaaggagttgcctcttctttaaaactggcgcatcatcagttggttaggttccctttgggtagtcccttcaggaaactcttggttttctttctggtttctgtgtcagggctccttgtcataaggaggtgggatagaattgggaggggaaagtctccattgcctgctgcttgggacccaggccatgagtcttgtaattgcatccgaccaatctgactccacatttatgtaacaaagttttttaaagtatattttggatgccaatccttaatcagaaatgtgttttgtagttattttctctcagtctgtggcttgtcttctcattcttctgatgttgtctttcacagagcagaagtttttaattttaatgaagttgggcttatcaattatttcctttataggttttgcctttggtgttacatctaaaaagtcatcgccaaacccaaggtcatctagattttcttctatattatcttctaggatatttatatcctagaagttttatagctttgtgctttacattttaggtctatgatctattttgagttaatttttgtgagtggcataaggtctgtgtctagattcatttttctgcatgtggatgtccagttgttccagcactgtttgttgaaaagactatctttgctgtgttgtctttcctttatttctttgtcaaagatcagttcgctgtatttatgtgagcatatttctaggctctctattctgttccattgatctatgcctgttcttcccccaataccacactatcctgattactgtagctttattaaatcttgaagtcaagtagtgtcagacctctggctttgtttttctccttcaatatcatgttggctattctggggcttttgcctctccatataaactttggaatcagtttgttgatatttataaaataactctctggaattttgactgttattgcactgagtgtaataagtatgcatttttgttgagtctttacctagtgatggaatttctggactgcagagtatgcatatgttcagcttcaattcagtttatattcagtttttcaaaatggttttgcaaatgtacaccctgccagaagcattgtgagtgttcttgtagctctgcgtcctcacaatatttggtgtttttccttttggctgctttggcatgatatgatcattatagtttgcatttccttggtgactaataaagttgagcaattaatcatatatgtgtatatgtgtatatatatatgtgtacatctatgtatatgtgtatatatatatctgtatgtgtatatgtatatacatatatgcatatattttaaagttgaatctcactctgtcacccaagttaaagtgt

SEQ ID NO: 460948 - DNA, 5094 bp, Homo sapiens
tggaaaggaacgccttagtgcaaagtttaattattgatgaagattactattactatgattaaaaaccctcctagtgaaagctgtgttcttctgtgacctggatttaaatgtatcttggcactcgagcttaatgatgactgttttttttgattgcttgaagcaatgtgaaaaacacatttcaccggctctgaaagctcttgagttgccatttgaaagaaatcttagaatactttacagttacttaaagtcagaattttaaaggaaggggaaatgctggtatataacattggtttctttaatagggaatgggtactgttcaaaaaggaatgccccacaagtgttaccatggcaaaactggaagagtctacaatgttacccagcatgctgttggcattgttgtaaacaaacaagttaagtaagtagtgttgtagttctttgtggctaaccagtattccctcatatacccccttttcactttgccagttggacttatgtctttattggtcattcaagtggggcaaaggaaatatccttttaaaactcaggcaaactgggtgtttgtctgtatcctgtcagaggaaacaaattgaaatagatttactggaaagtcttacacagttagttactaagcggtttgtttgttttgtttcgagacggagtcttgctctgtcgccctggctggagtgcagtggtgggatctctgctctctgcaagctccacctcctgggttcacgccattctcctgcctcagcctctggggtagctaggactacaggcgcccaccaccatgcccagctaaattttttgtattcttagtagagacagggtttcactgtgtcagccaggatggtctcaatctcctgacctcgtgatctgcctgcctcggcctcccaaagtgctgggattacaggcatgagccaccgcgcctggcccagcagtttttatagaataaaaagagaagtttagtaaacttttaaattttattagcagtctggttttagattactagagtttaagagaccatcatctcatcaaagagagttaaaagtagggatgttctctgcaaggcctcttctgatatgattaattgattgtaaattaagtaatcaaggcatactttgttgatttgtcatatctgggtaaaaggtttatggtttatttaataaatgaaactgcaaaatcagttttctacatttctgttatatttttgttaaagcacttaaaagaatttctgctctgtccaggggcaagattcttgccaagagaattaatgtgcgtattgagcacattaagcactctaagagccgagatagcttcctgaaacgtgtgaaggaaaatgatcagaaaaagaaagaagccaaagagaaaggtacctgggttcaactaaagcgccaggtaagaatttggtgtatatttcattggttctgagagcactttaaggttgagatttaacacatcacataattattttattccctttttttttcctttaatagcctgctccacccagagaagcacactttgtgagaaccaatgggaaggagcctgagctgctggaacctattccctatgaattcatggcataataggtgttaaaaaaaaaaataaaggacctctgggctacaaaaagtctagtgactccggctggctgctgcggggcgaggagactcgcagaatgcctgactagaggccactcgcgcgctctggacggtggccgtatctccagggtctgagccccggagccgcagtcctgccgcagagcgcctggagccgcgagcagctagcagcccggcgaagcgcacagcctcggcgatagtcagctccgcggcctctgctcccgcccctcccggccgctccgggaaggggcggagacgaggaggagctgggacggccgccgcgctcccgggcgcaccaagccctttaaaagccgcgggccttgacagttctgcaggcagccgccgcggtcccggacctctagtcccgcactcccagctggcgagccggctccgggtgcggcgaggcccagccctctcggattgcgcgccggaccccgggacgcgctccatgcggccgctcagcatgtccgggcactttctgctcgcacccatccccgagtcctcctcggactacctactgcccaaggacatcaaactggcggtgctgggcgccggccgcgtgggcaagagcgcaatgatcgtgcgcttcctgaccaagagattcattggagactatgaaccgaatacaggcaagctgtattcacggctggtctatgtcgagggggaccagctctccctgcagatccaggatactcccgggggcgtccagatccaagacagcctcccccaggtcgtcgattccctgtccaaatgcgtgcagtgggccgagggttttctgctggtctattccatcacagactatgacagctacttgtccatccgacccctttatcagcacatccggaaggtccaccctgactctaaagcccctgtcatcatcgtgggcaacaagggggaccttttgcatgcccggcaggtgcagacacaggacggtattcagctagccaatgagctgggcagcctgttccttgaaatttccactagcgaaaactacgaagatgtctgtgatgtgtttcagcatctctgcaaagaagtgagcaagatgcacggcctcagtggggaaagaagaagagcctccatcatccctcggccccgctctcccaacatgcaggacctgaagagacgcttcaagcaggctctgtctcccaaagtcaaagccccctctgcactggggtgaactatctcagacagatgcctctcctttttaatacgcatttgtagctatttgttactccattagaaggagtccccctcgagggcagtagctgcattttatgatcctgtcttccaatcttctagttcagtgcttccccatagagtggcgcgagtcactgtccccggcaataatataacttttaaaatggaaaatctagtttgttaagactctacttttctcaatccaaggaatagttacacatacacacacacacgcacacaatatatgtacatatatgtatatatatcacatatatgatatatgtatatacgtatatatatcacatatatgatatatgtatatacgtatatatatcacatatatgatatatgtatatacgtatatatatcacatatatgatatatgtatatacgtatatatatcacatatatgatatatgtatatacgtatatatatcacatatatgatatatgtatatacgtatatatatcacatatatgatatatgtatatacgtatatatatcacatatatgatatatgtatatacgtatatatatcacatatatgatatatgtatatacgtatatatatcacatatatgatatatgtatatacgtatatatatcacatatatgatatatgtatatacgtatatatatcatatatatgatatatgtatatacgtatatatatcatatatatgatatatgtatatatatcatatatgtgtatatatattatatatatacatacatatatatgtctagaaaccattgctatgcttactaaatgacactacatagggctggcagagcatcatcattgtccataaccagtatctgttgatcttgtgccagatgtttagcacattttctacttcattactgctcaaactctaatctttgaataatgactcaatttctctcttgcaaggggcacgcagtccctgctgcaaaggagttgcctcttctttaaaactggcgcatcatcagttggttaggttccctttgggtagtcccttcaggaaactcttggttttctttctggtttctgtgtcagggctccttgtcataaggaggtgggatagaattgggaggggaaagtctccattgcctgctgcttgggacccaggccatgagtcttgtaattgcatccgaccaatctgactccacatttatgtaacaaagttttttaaagtatattttggatgccaatccttaatcagaaatgtgttttgtagttattttctctcagtctgtggcttgtcttctcattcttctgatgttgtctttcacagagcagaagtttttaattttaatgaagttgggcttatcaattatttcctttataggttttgcctttggtgttacatctaaaaagtcatcgccaaacccaaggtcatctagattttcttctatattatcttctaggatatttatatcctagaagttttatagctttgtgctttacattttaggtctatgatctattttgagttaatttttgtgagtggcataaggtctgtgtctagattcatttttctgcatgtggatgtccagttgttccagcactgtttgttgaaaagactatctttgctgtgttgtctttcctttatttctttgtcaaagatcagttcgctgtatttatgtgagcatatttctaggctctctattctgttccattgatctatgcctgttcttcccccaataccacactatcctgattactgtagctttattaaatcttgaagtcaagtagtgtcagacctctggctttgtttttctccttcaatatcatgttggctattctggggcttttgcctctccatataaactttggaatcagtttgttgatatttataaaataactctctggaattttgactgttattgcactgagtgtaataagtatgcatttttgttgagtctttacctagtgatggaatttctggactgcagagtatgcatatgttcagcttcaattcagtttatattcagtttttcaaaatggttttgcaaatgtacaccctgccagaagcattgtgagtgttcttgtagctctgcgtcctcacaatatttggtgtttttccttttggctgctttggcatgatatgatcattatagtttgcatttccttggtgactaataaagttgagcaattaatcatatatgtgtatatgtgtatatatatatgtgtacatctatgtatatgtgtatatatatatctgtatgtgtatatgtatatacatatatgcatatattttaaagttgaatctcactctgtcacccaagttaaagtgt

SEQ ID NO: 460949 - DNA, 1745 bp, Homo sapiens
gacgacggcgtcctcttgatcgcccttgaaggcccctttccgggctgtctgacacgatgcaagtgtcagcttgtgttggccggttgcctttctttcgcaagaggggaaaatatcctcacagactttctgtgttctcagagacgatcttcttccctagaaagaagtcgcttacggttggcgtttccctcaggcagcgccgtgggcagcccacaggcccttgtaaggcgcgcgccgcggccccgcctctttcctttcggccggaaccgccatcttccagtaattcgccaaaatgacgaacacaaagggaaagaggagaggcacccgatatatgttctctaggccttttagaaaacatggagttgttcctttggccacatatatgcgaatctataagaaaggtgatattgtagacatcaagggaatgggtactgttcaaaaaggaatgccccacaagtgttaccatggcaaaactggaagagtctacaatgttacccagcatgctgttggcattgttgtaaacaaacaagttaagtaagtagtgttgtagttctttgtggctaaccagtattccctcatatacccccttttcactttgccagttggacttatgtctttattggtcattcaagtggggcaaaggaaatatccttttaaaactcaggcaaactgggtgtttgtctgtatcctgtcagaggaaacaaattgaaatagatttactggaaagtcttacacagttagttactaagcggtttgtttgttttgtttcgagacggagtcttgctctgtcgccctggctggagtgcagtggtgggatctctgctctctgcaagctccacctcctgggttcacgccattctcctgcctcagcctctggggtagctaggactacaggcgcccaccaccatgcccagctaaattttttgtattcttagtagagacagggtttcactgtgtcagccaggatggtctcaatctcctgacctcgtgatctgcctgcctcggcctcccaaagtgctgggattacaggcatgagccaccgcgcctggcccagcagtttttatagaataaaaagagaagtttagtaaacttttaaattttattagcagtctggttttagattactagagtttaagagaccatcatctcatcaaagagagttaaaagtagggatgttctctgcaaggcctcttctgatatgattaattgattgtaaattaagtaatcaaggcatactttgttgatttgtcatatctgggtaaaaggtttatggtttatttaataaatgaaactgcaaaatcagttttctacatttctgttatatttttgttaaagcacttaaaagaatttctgctctgtccaggggcaagattcttgccaagagaattaatgtgcgtattgagcacattaagcactctaagagccgagatagcttcctgaaacgtgtgaaggaaaatgatcagaaaaagaaagaagccaaagagaaaggtacctgggttcaactaaagcgccaggtaagaatttggtgtatatttcattggttctgagagcactttaaggttgagatttaacacatcacataattattttattccctttttttttcctttaatagcctgctccacccagagaagcacactttgtgagaaccaatgggaaggagcctgagctgctggaacctattccctatgaattcatggcataataggtgttaaaaaaaaaaataaaggacctctgggctacaaaaa

SEQ ID NO: 460950 - DNA, 4265 bp, Homo sapiens
tggaaaggaacgccttagtgcaaagtttaattattgatgaagattactattactatgattaaaaaccctcctagtgaaagctgtgttcttctgtgacctggatttaaatgtatcttggcactcgagcttaatgatgactgttttttttgattgcttgaagcaatgtgaaaaacacatttcaccggctctgaaagctcttgagttgccatttgaaagaaatcttagaatactttacagttacttaaagtcagaattttaaaggaaggggaaatgctggtatataacattggtttctttaatagggaatgggtactgttcaaaaaggaatgccccacaagtgttaccatggcaaaactggaagagtctacaatgttacccagcatgctgttggcattgttgtaaacaaacaagttaagggcaagattcttgccaagagaattaatgtgcgtattgagcacattaagcactctaagagccgagatagcttcctgaaacgtgtgaaggaaaatgatcagaaaaagaaagaagccaaagagaaaggtacctgggttcaactaaagcgccaggtaagaatttggtgtatatttcattggttctgagagcactttaaggttgagatttaacacatcacataattattttattccctttttttttcctttaatagcctgctccacccagagaagcacactttgtgagaaccaatgggaaggagcctgagctgctggaacctattccctatgaattcatggcataataggtgttaaaaaaaaaaataaaggacctctgggctacaaaaagtctagtgactccggctggctgctgcggggcgaggagactcgcagaatgcctgactagaggccactcgcgcgctctggacggtggccgtatctccagggtctgagccccggagccgcagtcctgccgcagagcgcctggagccgcgagcagctagcagcccggcgaagcgcacagcctcggcgatagtcagctccgcggcctctgctcccgcccctcccggccgctccgggaaggggcggagacgaggaggagctgggacggccgccgcgctcccgggcgcaccaagccctttaaaagccgcgggccttgacagttctgcaggcagccgccgcggtcccggacctctagtcccgcactcccagctggcgagccggctccgggtgcggcgaggcccagccctctcggattgcgcgccggaccccgggacgcgctccatgcggccgctcagcatgtccgggcactttctgctcgcacccatccccgagtcctcctcggactacctactgcccaaggacatcaaactggcggtgctgggcgccggccgcgtgggcaagagcgcaatgatcgtgcgcttcctgaccaagagattcattggagactatgaaccgaatacaggcaagctgtattcacggctggtctatgtcgagggggaccagctctccctgcagatccaggatactcccgggggcgtccagatccaagacagcctcccccaggtcgtcgattccctgtccaaatgcgtgcagtgggccgagggttttctgctggtctattccatcacagactatgacagctacttgtccatccgacccctttatcagcacatccggaaggtccaccctgactctaaagcccctgtcatcatcgtgggcaacaagggggaccttttgcatgcccggcaggtgcagacacaggacggtattcagctagccaatgagctgggcagcctgttccttgaaatttccactagcgaaaactacgaagatgtctgtgatgtgtttcagcatctctgcaaagaagtgagcaagatgcacggcctcagtggggaaagaagaagagcctccatcatccctcggccccgctctcccaacatgcaggacctgaagagacgcttcaagcaggctctgtctcccaaagtcaaagccccctctgcactggggtgaactatctcagacagatgcctctcctttttaatacgcatttgtagctatttgttactccattagaaggagtccccctcgagggcagtagctgcattttatgatcctgtcttccaatcttctagttcagtgcttccccatagagtggcgcgagtcactgtccccggcaataatataacttttaaaatggaaaatctagtttgttaagactctacttttctcaatccaaggaatagttacacatacacacacacacgcacacaatatatgtacatatatgtatatatatcacatatatgatatatgtatatacgtatatatatcacatatatgatatatgtatatacgtatatatatcacatatatgatatatgtatatacgtatatatatcacatatatgatatatgtatatacgtatatatatcacatatatgatatatgtatatacgtatatatatcacatatatgatatatgtatatacgtatatatatcacatatatgatatatgtatatacgtatatatatcacatatatgatatatgtatatacgtatatatatcacatatatgatatatgtatatacgtatatatatcacatatatgatatatgtatatacgtatatatatcacatatatgatatatgtatatacgtatatatatcatatatatgatatatgtatatacgtatatatatcatatatatgatatatgtatatatatcatatatgtgtatatatattatatatatacatacatatatatgtctagaaaccattgctatgcttactaaatgacactacatagggctggcagagcatcatcattgtccataaccagtatctgttgatcttgtgccagatgtttagcacattttctacttcattactgctcaaactctaatctttgaataatgactcaatttctctcttgcaaggggcacgcagtccctgctgcaaaggagttgcctcttctttaaaactggcgcatcatcagttggttaggttccctttgggtagtcccttcaggaaactcttggttttctttctggtttctgtgtcagggctccttgtcataaggaggtgggatagaattgggaggggaaagtctccattgcctgctgcttgggacccaggccatgagtcttgtaattgcatccgaccaatctgactccacatttatgtaacaaagttttttaaagtatattttggatgccaatccttaatcagaaatgtgttttgtagttattttctctcagtctgtggcttgtcttctcattcttctgatgttgtctttcacagagcagaagtttttaattttaatgaagttgggcttatcaattatttcctttataggttttgcctttggtgttacatctaaaaagtcatcgccaaacccaaggtcatctagattttcttctatattatcttctaggatatttatatcctagaagttttatagctttgtgctttacattttaggtctatgatctattttgagttaatttttgtgagtggcataaggtctgtgtctagattcatttttctgcatgtggatgtccagttgttccagcactgtttgttgaaaagactatctttgctgtgttgtctttcctttatttctttgtcaaagatcagttcgctgtatttatgtgagcatatttctaggctctctattctgttccattgatctatgcctgttcttcccccaataccacactatcctgattactgtagctttattaaatcttgaagtcaagtagtgtcagacctctggctttgtttttctccttcaatatcatgttggctattctggggcttttgcctctccatataaactttggaatcagtttgttgatatttataaaataactctctggaattttgactgttattgcactgagtgtaataagtatgcatttttgttgagtctttacctagtgatggaatttctggactgcagagtatgcatatgttcagcttcaattcagtttatattcagtttttcaaaatggttttgcaaatgtacaccctgccagaagcattgtgagtgttcttgtagctctgcgtcctcacaatatttggtgtttttccttttggctgctttggcatgatatgatcattatagtttgcatttccttggtgactaataaagttgagcaattaatcatatatgtgtatatgtgtatatatatatgtgtacatctatgtatatgtgtatatatatatctgtatgtgtatatgtatatacatatatgcatatattttaaagttgaatctcactctgtcacccaagttaaagtgt

SEQ ID NO: 460951 - DNA, 770 bp, Homo sapiens
gtagggcctacgcgtggctcccgggcgctacgtgttcgacagacttgaaccgcgaccttgtggcctcagaggtcgttcattgggaccgtggggagactctctaacctgtttgaggtccattggcatgggcgggttaaaccatgttctgccagacggggagcagcgtgcgccgggtcgggcctgggccgtgggctgagaaccggactgcgatgttgcggccctgcggggggacatttgcgagaaagacgagactgagtcgcttggggtgaggcgactcgagttaatctttaaaagacttcgttttatgttcccgtggctgcatctccggtactgtgggtggcccctctcacataggctgtgtgggggccgcgtggcctgatgcctttctaactcctttcagtgtggcttttttattccaaatcttgcgatgatgttgggtgaggacttaaggggtagtaggaatgggtttaaagtcaggcgtcggctttaatcttctgtgaagcctacaggtgtgaaaacccgggctctcggtcggagagtgggtcccggagtcgtcctgggtgatgaaccctcactgcccttagttaatgcataagacgatttccgactgtttttaaaattttgaccccacatggtgatcggacgaagggaaagtgttttgaggttgcaacaccaatatttgcaccaagaggagatactgttttgcgaattctagggcagcatgctttgagtgaagggaaacatttagccatagttcatcattttgtcta

SEQ ID NO: 460952 - DNA, 5210 bp, Homo sapiens
gacgacggcgtcctcttgatcgcccttgaaggcccctttccgggctgtctgacacgatgcaagtgtcagcttgtgttggccggttgcctttctttcgcaagaggggaaaatatcctcacagactttctgtgttctcagagacgatcttcttccctagaaagaagtcgcttacggttggcgtttccctcaggcagcgccgtgggcagcccacaggcccttgtaaggcgcgcgccgcggccccgcctctttcctttcggccggaaccgccatcttccagtaattcgccaaaatgacgaacacaaagggaaagaggagaggcacccgatatatgttctctaggccttttagaaaacatggagttgttcctttggccacatatatgcgaatctataagaaaggtgatattgtagacatcaagggaatgggtactgttcaaaaaggaatgccccacaagtgttaccatggcaaaactggaagagtctacaatgttacccagcatgctgttggcattgttgtaaacaaacaagttaagtaagtagtgttgtagttctttgtggctaaccagtattccctcatatacccccttttcactttgccagttggacttatgtctttattggtcattcaagtggggcaaaggaaatatccttttaaaactcaggcaaactgggtgtttgtctgtatcctgtcagaggaaacaaattgaaatagatttactggaaagtcttacacagttagttactaagcggtttgtttgttttgtttcgagacggagtcttgctctgtcgccctggctggagtgcagtggtgggatctctgctctctgcaagctccacctcctgggttcacgccattctcctgcctcagcctctggggtagctaggactacaggcgcccaccaccatgcccagctaaattttttgtattcttagtagagacagggtttcactgtgtcagccaggatggtctcaatctcctgacctcgtgatctgcctgcctcggcctcccaaagtgctgggattacaggcatgagccaccgcgcctggcccagcagtttttatagaataaaaagagaagtttagtaaacttttaaattttattagcagtctggttttagattactagagtttaagagaccatcatctcatcaaagagagttaaaagtagggatgttctctgcaaggcctcttctgatatgattaattgattgtaaattaagtaatcaaggcatactttgttgatttgtcatatctgggtaaaaggtttatggtttatttaataaatgaaactgcaaaatcagttttctacatttctgttatatttttgttaaagcacttaaaagaatttctgctctgtccaggggcaagattcttgccaagagaattaatgtgcgtattgagcacattaagcactctaagagccgagatagcttcctgaaacgtgtgaaggaaaatgatcagaaaaagaaagaagccaaagagaaaggtacctgggttcaactaaagcgccaggtaagaatttggtgtatatttcattggttctgagagcactttaaggttgagatttaacacatcacataattattttattccctttttttttcctttaatagcctgctccacccagagaagcacactttgtgagaaccaatgggaaggagcctgagctgctggaacctattccctatgaattcatggcataataggtgttaaaaaaaaaaataaaggacctctgggctacaaaaagtctagtgactccggctggctgctgcggggcgaggagactcgcagaatgcctgactagaggccactcgcgcgctctggacggtggccgtatctccagggtctgagccccggagccgcagtcctgccgcagagcgcctggagccgcgagcagctagcagcccggcgaagcgcacagcctcggcgatagtcagctccgcggcctctgctcccgcccctcccggccgctccgggaaggggcggagacgaggaggagctgggacggccgccgcgctcccgggcgcaccaagccctttaaaagccgcgggccttgacagttctgcaggcagccgccgcggtcccggacctctagtcccgcactcccagctggcgagccggctccgggtgcggcgaggcccagccctctcggattgcgcgccggaccccgggacgcgctccatgcggccgctcagcatgtccgggcactttctgctcgcacccatccccgagtcctcctcggactacctactgcccaaggacatcaaactggcggtgctgggcgccggccgcgtgggcaagagcgcaatgatcgtgcgcttcctgaccaagagattcattggagactatgaaccgaatacaggcaagctgtattcacggctggtctatgtcgagggggaccagctctccctgcagatccaggatactcccgggggcgtccagatccaagacagcctcccccaggtcgtcgattccctgtccaaatgcgtgcagtgggccgagggttttctgctggtctattccatcacagactatgacagctacttgtccatccgacccctttatcagcacatccggaaggtccaccctgactctaaagcccctgtcatcatcgtgggcaacaagggggaccttttgcatgcccggcaggtgcagacacaggacggtattcagctagccaatgagctgggcagcctgttccttgaaatttccactagcgaaaactacgaagatgtctgtgatgtgtttcagcatctctgcaaagaagtgagcaagatgcacggcctcagtggggaaagaagaagagcctccatcatccctcggccccgctctcccaacatgcaggacctgaagagacgcttcaagcaggctctgtctcccaaagtcaaagccccctctgcactggggtgaactatctcagacagatgcctctcctttttaatacgcatttgtagctatttgttactccattagaaggagtccccctcgagggcagtagctgcattttatgatcctgtcttccaatcttctagttcagtgcttccccatagagtggcgcgagtcactgtccccggcaataatataacttttaaaatggaaaatctagtttgttaagactctacttttctcaatccaaggaatagttacacatacacacacacacgcacacaatatatgtacatatatgtatatatatcacatatatgatatatgtatatacgtatatatatcacatatatgatatatgtatatacgtatatatatcacatatatgatatatgtatatacgtatatatatcacatatatgatatatgtatatacgtatatatatcacatatatgatatatgtatatacgtatatatatcacatatatgatatatgtatatacgtatatatatcacatatatgatatatgtatatacgtatatatatcacatatatgatatatgtatatacgtatatatatcacatatatgatatatgtatatacgtatatatatcacatatatgatatatgtatatacgtatatatatcacatatatgatatatgtatatacgtatatatatcatatatatgatatatgtatatacgtatatatatcatatatatgatatatgtatatatatcatatatgtgtatatatattatatatatacatacatatatatgtctagaaaccattgctatgcttactaaatgacactacatagggctggcagagcatcatcattgtccataaccagtatctgttgatcttgtgccagatgtttagcacattttctacttcattactgctcaaactctaatctttgaataatgactcaatttctctcttgcaaggggcacgcagtccctgctgcaaaggagttgcctcttctttaaaactggcgcatcatcagttggttaggttccctttgggtagtcccttcaggaaactcttggttttctttctggtttctgtgtcagggctccttgtcataaggaggtgggatagaattgggaggggaaagtctccattgcctgctgcttgggacccaggccatgagtcttgtaattgcatccgaccaatctgactccacatttatgtaacaaagttttttaaagtatattttggatgccaatccttaatcagaaatgtgttttgtagttattttctctcagtctgtggcttgtcttctcattcttctgatgttgtctttcacagagcagaagtttttaattttaatgaagttgggcttatcaattatttcctttataggttttgcctttggtgttacatctaaaaagtcatcgccaaacccaaggtcatctagattttcttctatattatcttctaggatatttatatcctagaagttttatagctttgtgctttacattttaggtctatgatctattttgagttaatttttgtgagtggcataaggtctgtgtctagattcatttttctgcatgtggatgtccagttgttccagcactgtttgttgaaaagactatctttgctgtgttgtctttcctttatttctttgtcaaagatcagttcgctgtatttatgtgagcatatttctaggctctctattctgttccattgatctatgcctgttcttcccccaataccacactatcctgattactgtagctttattaaatcttgaagtcaagtagtgtcagacctctggctttgtttttctccttcaatatcatgttggctattctggggcttttgcctctccatataaactttggaatcagtttgttgatatttataaaataactctctggaattttgactgttattgcactgagtgtaataagtatgcatttttgttgagtctttacctagtgatggaatttctggactgcagagtatgcatatgttcagcttcaattcagtttatattcagtttttcaaaatggttttgcaaatgtacaccctgccagaagcattgtgagtgttcttgtagctctgcgtcctcacaatatttggtgtttttccttttggctgctttggcatgatatgatcattatagtttgcatttccttggtgactaataaagttgagcaattaatcatatatgtgtatatgtgtatatatatatgtgtacatctatgtatatgtgtatatatatatctgtatgtgtatatgtatatacatatatgcatatattttaaagttgaatctcactctgtcacccaagttaaagtgt

SEQ ID NO: 460953 - DNA, 579 bp, Homo sapiens
gcggctaggtagcgaggccgggtggtcgcgccatcttccagtaattcgccaaaatgacgaacacaaagggaaagaggagaggcacccgatatatgttctctaggccttttagaaaacatggagttgttcctttggccacatatatgcgaatctataagaaaggtgatattgtagacatcaagggaatgggtactgttcaaaaaggaatgccccacaagtgttaccatggcaaaactggaagagtctacaatgttacccagcatgctgttggcattgttgtaaacaaacaagttaagggcaagattcttgccaagagaattaatgtgcgtattgagcacattaagcactctaagagccgagatagcttcctgaaacgtgtgaaggaaaatgatcagaaaaagaaagaagccaaagagaaaggtacctgggttcaactaaagcgccagcctgctccacccagagaagcacactttgtgagaaccaatgggaaggagcctgagctgctggaacctattccctatgaattcatggcataataggtgttaaaaaaaaaaataaaggacctctgggctacaaaaa

SEQ ID NO: 460954 - DNA, 381 bp, Homo sapiens
gacgacggcgtcctcttgatcgcccttgaaggcccctttccgggctgtctgacacgatgcaagtgtcagcttgtgttggccggttgcctttctttcgcaagaggggaaaatatcctcacagactttctgtgttctcagagacgatcttcttccctagaaagaagtcgcttacggttggcgtttccctcaggcagcgccgtgggcagcccacaggcccttgtaaggcgcgcgccgcggccccgcctctttcctttcggccggaaccgccatcttccagtaattcgccaaaatgacgaacacaaagggaaagaggagaggcacccgatatatgttctctaggccttttagaaaacatgtagacatcaagggaatgggtactgt

SEQ ID NO: 460955 - DNA, 1418 bp, Homo sapiens
  misc_feature (831)..(831): n is a, c, g, or t
gacgacggcgtcctcttgatcgcccttgaaggcccctttccgggctgtctgacacgatgcaagtgtcagcttgtgttggccggttgcctttctttcgcaagaggggaaaatatcctcacagactttctgtgttctcagagacgatcttcttccctagaaagaagtcgcttacggttggcgtttccctcaggcagcgccgtgggcagcccacaggcccttgtaaggcgcgcgccgcggccccgcctctttcctttcggccggaaccgccatcttccagtaattcgccaaaatgacgaacacaaagggaaagaggagaggcacccgatatatgttctctaggccttttagaaaacatggagttgttcctttggccacatatatgcgaatctataagaaaggtgatattgtagacatcaagggaatgggtactgttcaaaaaggaatgccccacaagtgttaccatggcaaaactggaagagtctacaatgttacccagcatgctgttggcattgttgtaaacaaacaagttaagggcaagattcttgccaagagaattaatgtgcgtattgagcacattaagcactctaagagccgagatagcttcctgaaacgtgtgaaggaaaatgatcagaaaaagaaagaagccaaagagaaaggtacctgggttcaactaaagcgccagcctgctccacccagagaagcacactttgtgagaaccaatgggaaggagcctgagctgctggaacctattccctatgaattcatggcataataggtgttaaaaaaaaaaataaaggacctctgggctacaaaaacacaaaaacacacacnacacacacatacacaacaactaatcaaataacaacacataaccaacacacagcgtccatacttaataactcacactcgatgcctcccacacataaacatgattacaacaccactttatatcaaaaagacacaccctattaactattaatactaccgcacacgctgcgcgggctctatacaagaaagctcacaacgagaaagccgactcacagtgacctatgctgtaggataccccccacatggcgcgggaccactagcaggaaaaatatcagacgattacgcccacaggtaatacataactggtgagtgtaggtgaagaaggaagagagaagatctactgttagtgatcctgctagtctagaggagtagagaattcagaagggcagtagtagtgcgtcgcgagcgcggcgatgagtgtcgacgggtgatgtttgtcgcctactggctggtgggtgtctggcgtgtcagtggtgagtgcgttgagtggcgcactagtgcggagtagtcatggcggtgggtgggtaggagacggggcgggcggaaggtgtggtgtgaagcgacgtgggcagcgtacagaggtgggttgg

SEQ ID NO: 460956 - DNA, 1080 bp, Homo sapiens
gacgacggcgtcctcttgatcgcccttgaaggcccctttccgggctgtctgacacgatgcaagtgtcagcttgtgttggccggttgcctttctttcgcaagaggggaaaatatcctcacagactttctgtgttctcagagacgatcttcttccctagaaagaagtcgcttacggttggcgtttccctcaggcagcgccgtgggcagcccacaggcccttgtaaggcgcgcgccgcggccccgcctctttcctttcggccggaaccgccatcttccaggtagggcctacgcgtggctcccgggcgctacgtgttcgacagacttgaaccgcgaccttgtggcctcagaggtcgttcattgggaccgtggggagactctctaacctgtttgaggtccattggcatgggcgggttaaaccatgttctgccagacggggagcagcgtgcgccgggtcgggcctgggccgtgggctgagaaccggactgcgatgttgcggccctgcggggggacatttgcgagaaagacgagactgagtcgcttgggtaattcgccaaaatgacgaacacaaagggaaagaggagaggcacccgatatatgttctctaggccttttagaaaacatggagttgttcctttggccacatatatgcgaatctataagaaaggtgatattgtagacatcaagggaatgggtactgttcaaaaaggaatgccccacaagtgttaccatggcaaaactggaagagtctacaatgttacccagcatgctgttggcattgttgtaaacaaacaagttaagggcaagattcttgccaagagaattaatgtgcgtattgagcacattaagcactctaagagccgagatagcttcctgaaacgtgtgaaggaaaatgatcagaaaaagaaagaagccaaagagaaaggtacctgggttcaactaaagcgccagcctgctccacccagagaagcacactttgtgagaaccaatgggaaggagcctgagctgctggaacctattccctatgaattcatggcataataggtgttaaaaaaaaaaataaaggacctctgggctacaaaaa

SEQ ID NO: 460957 - DNA, 886 bp, Homo sapiens
gacgacggcgtcctcttgatcgcccttgaaggcccctttccgggctgtctgacacgatgcaagtgtcagcttgtgttggccggttgcctttctttcgcaagaggggaaaatatcctcacagactttctgtgttctcagagacgatcttcttccctagaaagaagtcgcttacggttggcgtttccctcaggcagcgccgtgggcagcccacaggcccttgtaaggcgcgcgccgcggccccgcctctttcctttcggccggaaccgccatcttccaggtagggcctacgcgtggctcccgggcgctacgtgttcgacagacttgaaccgcgaccttgtggcctcagagtaattcgccaaaatgacgaacacaaagggaaagaggagaggcacccgatatatgttctctaggccttttagaaaacatggagttgttcctttggccacatatatgcgaatctataagaaaggtgatattgtagacatcaagggaatgggtactgttcaaaaaggaatgccccacaagtgttaccatggcaaaactggaagagtctacaatgttacccagcatgctgttggcattgttgtaaacaaacaagttaagggcaagattcttgccaagagaattaatgtgcgtattgagcacattaagcactctaagagccgagatagcttcctgaaacgtgtgaaggaaaatgatcagaaaaagaaagaagccaaagagaaaggtacctgggttcaactaaagcgccagcctgctccacccagagaagcacactttgtgagaaccaatgggaaggagcctgagctgctggaacctattccctatgaattcatggcataataggtgttaaaaaaaaaaataaaggacctctgggctacaaaaa

SEQ ID NO: 460958 - DNA, 916 bp, Homo sapiens
gacgacggcgtcctcttgatcgcccttgaaggcccctttccgggctgtctgacacgatgcaagtgtcagcttgtgttggccggttgcctttctttcgcaagaggggaaaatatcctcacagactttctgtgttctcagagacgatcttcttccctagaaagaagtcgcttacggttggcgtttccctcaggcagcgccgtgggcagcccacaggcccttgtaaggcgcgcgccgcggccccgcctctttcctttcggccggaaccgccatcttccagtaattcgccaaaatgacgaacacaaagggaaagaggagaggcacccgatatatgttctctaggccttttagaaaacatggagttgttcctttggccacatatatgcgaatctataagaaaggtgatattgtagacatcaagggaatgggtactgttcaaaaaggaatgccccacaagtgttaccatggcaaaactggaagagtctacaatgttacccagcatgctgttggcattgttgtaaacaaacaagttaagggcaagattcttgccaagagaattaatgtgcgtattgagcacattaagcactctaagagccgagatagcttcctgaaacgtgtgaaggaaaatgatcagaaaaagaaagaagccaaagagaaaggtacctgggttcaactaaagcgccaggtaagaatttggtgtatatttcattggttctgagagcactttaaggttgagatttaacacatcacataattattttattccctttttttttcctttaatagcctgctccacccagagaagcacactttgtgagaaccaatgggaaggagcctgagctgctggaacctattccctatgaattcatggcataataggtgttaaaaaaaaaaataaaggacctctgggctacaaaaa

SEQ ID NO: 460959 - DNA, 1644 bp, Homo sapiens
gacgacggcgtcctcttgatcgcccttgaaggcccctttccgggctgtctgacacgatgcaagtgtcagcttgtgttggccggttgcctttctttcgcaagaggggaaaatatcctcacagactttctgtgttctcagagacgatcttcttccctagaaagaagtcgcttacggttggcgtttccctcaggcagcgccgtgggcagcccacaggcccttgtaaggcgcgcgccgcggccccgcctctttcctttcggccggaaccgccatcttccagtaattcgccaaaatgacgaacacaaagggaaagaggagaggcacccgatatatgttctctaggccttttagaaaacatggagttgttcctttggccacatatatgcgaatctataagaaaggtgatattgtagacatcaagggaatgggtactgttcaaaaaggaatgccccacaagtgttaccatggcaaaactggaagagtctacaatgttacccagcatgctgttggcattgttgtaaacaaacaagttaagtaagtagtgttgtagttctttgtggctaaccagtattccctcatatacccccttttcactttgccagttggacttatgtctttattggtcattcaagtggggcaaaggaaatatccttttaaaactcaggcaaactgggtgtttgtctgtatcctgtcagaggaaacaaattgaaatagatttactggaaagtcttacacagttagttactaagcggtttgtttgttttgtttcgagacggagtcttgctctgtcgccctggctggagtgcagtggtgggatctctgctctctgcaagctccacctcctgggttcacgccattctcctgcctcagcctctggggtagctaggactacaggcgcccaccaccatgcccagctaaattttttgtattcttagtagagacagggtttcactgtgtcagccaggatggtctcaatctcctgacctcgtgatctgcctgcctcggcctcccaaagtgctgggattacaggcatgagccaccgcgcctggcccagcagtttttatagaataaaaagagaagtttagtaaacttttaaattttattagcagtctggttttagattactagagtttaagagaccatcatctcatcaaagagagttaaaagtagggatgttctctgcaaggcctcttctgatatgattaattgattgtaaattaagtaatcaaggcatactttgttgatttgtcatatctgggtaaaaggtttatggtttatttaataaatgaaactgcaaaatcagttttctacatttctgttatatttttgttaaagcacttaaaagaatttctgctctgtccaggggcaagattcttgccaagagaattaatgtgcgtattgagcacattaagcactctaagagccgagatagcttcctgaaacgtgtgaaggaaaatgatcagaaaaagaaagaagccaaagagaaaggtacctgggttcaactaaagcgccagcctgctccacccagagaagcacactttgtgagaaccaatgggaaggagcctgagctgctggaacctattccctatgaattcatggcataataggtgttaaaaaaaaaaataaaggacctctgggctacaaaaa

SEQ ID NO: 460960 - DNA, 1683 bp, Homo sapiens
  misc_feature (1096)..(1096): n is a, c, g, or t
gacgacggcgtcctcttgatcgcccttgaaggcccctttccgggctgtctgacacgatgcaagtgtcagcttgtgttggccggttgcctttctttcgcaagaggggaaaatatcctcacagactttctgtgttctcagagacgatcttcttccctagaaagaagtcgcttacggttggcgtttccctcaggcagcgccgtgggcagcccacaggcccttgtaaggcgcgcgccgcggccccgcctctttcctttcggccggaaccgccatcttccaggtagggcctacgcgtggctcccgggcgctacgtgttcgacagacttgaaccgcgaccttgtggcctcagaggtcgttcattgggaccgtggggagactctctaacctgtttgaggtccattggcatgggcgggttaaaccatgttctgccagacggggagcagcgtgcgccgggtcgggcctgggccgtgggctgagaaccggactgcgatgttgcggccctgcggggggacatttgcgagaaagacgagactgagtcgcttgggtaattcgccaaaatgacgaacacaaagggaaagaggagaggcacccgatatatgttctctaggccttttagaaaacatggagttgttcctttggccacatatatgcgaatctataagaaaggtgatattgtagacatcaagggaatgggtactgttcaaaaaggaatgccccacaagtgttaccatggcaaaactggaagagtctacaatgttacccagcatgctgttggcattgttgtaaacaaacaagttaagggcaagattcttgccaagagaattaatgtgcgtattgagcacattaagcactctaagagccgagatagcttcctgaaacgtgtgaaggaaaatgatcagaaaaagaaagaagccaaagagaaaggtacctgggttcaactaaagcgccagcctgctccacccagagaagcacactttgtgagaaccaatgggaaggagcctgagctgctggaacctattccctatgaattcatggcataataggtgttaaaaaaaaaaataaaggacctctgggctacaaaaacacaaaaacacacacnacacacacatacacaacaactaatcaaataacaacacataaccaacacacagcgtccatacttaataactcacactcgatgcctcccacacataaacatgattacaacaccactttatatcaaaaagacacaccctattaactattaatactaccgcacacgctgcgcgggctctatacaagaaagctcacaacgagaaagccgactcacagtgacctatgctgtaggataccccccacatggcgcgggaccactagcaggaaaaatatcagacgattacgcccacaggtaatacataactggtgagtgtaggtgaagaaggaagagagaagatctactgttagtgatcctgctagtctagaggagtagagaattcagaagggcagtagtagtgcgtcgcgagcgcggcgatgagtgtcgacgggtgatgtttgtcgcctactggctggtgggtgtctggcgtgtcagtggtgagtgcgttgagtggcgcactagtgcggagtagtcatggcggtgggtgggtaggagacggggcgggcggaaggtgtggtgtgaagcgacgtgggcagcgtacagaggtgggttgg

SEQ ID NO: 460961 - DNA, 1637 bp, Homo sapiens
gatactacaaaagatcagtgaacagccagtaggaagagatgaatagggcaaggtatgggggaaggggcacaccaccatcccagtgtcaccagtagagtcatgattgcaagctgtccaggttcttggcgttttgaacaaagaattggacaaaactccaagcaaagaaagaatgaagcaacaaaagaacaaaagcagggatttattgaaaacaaaagtacactccacagtgtgggagctgccctagcagcactcccccccgacccccgctgctttaccgaatcttcttgggtccaaataccccctagaactttcccattggccattccatgctcacctcatgtaaatgaagaggtggcttgcaattggtctgattggttgccagacccacccccacatcagacagatcctccaaaagaagctcagtttgctcctagggagtttgatcaaccagggaagattgtctcttatcactggagaggagagtgagtacctatgaggcattttacttggtgttaggaggaatgcaaagatgactaaatgtaatttctgcccacaaaagcctggtggaagaaatcagttttatatacaaataattatgacttatagaactgaactataaagttactgttagtatctagggtatgatatatccagactgaaagctttctgtattgaatttacataaaataaatttgaattcaacatctggaaggaaattttacctggattgttcttaggcccatattcatctgctatgaaaagcaaggtatgaactttgttagattcatcaagagagacttttattaaccaacttttcttggctacctgtactacagaaacatggaataacccatataatatgcatacgacaaaatattgaagcaaactttattaaaccaaactttcagcagttatttaggaaaagttcttgtgcatggaaatgcagggatctccagaaggtatgaagttagaaataatctttctttctataacatttaattaatgggctgtattttctggttgtttttaaaattattttcccctcttcagtgcagcctttgttattgcatacattatggaaacatttggaatgaagtacagaaaacaactgctgatggtttcctgtgtgtgtcttcttttccccacctaaaatgcatcacatttagtctccctattcttggttcatatgtcatctcctcaggaagacatgatgattaatgcactcttcctttaacccctagtcatttggagttcccatagaagcacagcacttcatctgaaacttaatcacagtatctgggtttagcctgagggctaggatattttatctcattcaattgtattgatactatatttttatctttatgaattttatagtgaaacattcttcaattagaatatgccctctgaattaacattattattaccatgatataacagtcctgtagggcataagtttaaggtcatgccattgttaggcaaaaaacacagcagaccctctgctggtttaactgttccctaaagttttcctccattgagagtctaatttcttgattataacttttggggatacagagatagctttgattctatgtgggagatttctgtactagcagatgctggtatgaagaatagat

SEQ ID NO: 460962 - DNA, 1676 bp, Homo sapiens
agcggagagtcacctaagtcctcattggaagaccaggccatgcaaccagaggggttgaaatgtaggatggaggaatccaatgcagagaggggcacagccgaacccttcccgaggctccacaacttgtacagcacccctcgctgcgcgcagcaggccgccctgccccggctgagccgcaggatggcgagccagcactcctatccactgaaccgcttctcctccgtgcctttagaccccatggagcgccccatgtcccaggccgacctggagctggactacaacccgccgcgggtgcagctcagcgacgagatgttcgtgttccaggacgggcgctgggtaaatgagaactgccgcctgcagtctccctacttctccccatccgcctccttccaccacaagctgcaccacaagaggctggccaaggagtgcatgctgcaggaggagaacaagtctctgcgggaggagaacaaggccctgcgcgaggagaaccggatgctcagcaaggagaacaagatcctacaggtcttctgggaggagcacaaggcctcgctgggccgagaggagagccgggccccctcgccactgctgcacaaagacagcgcgtccctggaggtggtgaagaaggaccacgtcgccctgcaggtgccccgtggcaaggaggacagcaccctgcagctcctccgggaggagaatcgcgcgctgcagcagctgctggagcagaaacaggcctactgggcgcaggcagaggacacggccgcccctgccgaggaaagcaagcccgccccctcaccccacgaggagccctgcagccccgggctgctgcaggaccagggctccggcctctcctcccgcttcgaggagcccaaagggcctccggcccggcaggaggactccaaggagctgcgcgccctgcggaagatggtcagcaacatgtccgggccctccggggaggaggaggccaaggtgggcccgggcctgcccgacggctgccagcccctgcagctgctgagagagatgaggcaggcgctgcaggccctgctcaaggagaaccggctcctgcaggaggagaacaggaccctgcaggtgctacgggcagagcacaggggcttccaggaggagaacaaggccctgtgggagaacaacaagctgaagctgcagcagaagctggtcattgacaccgtgaccgaggtcaccgcgcgcatggaaatgctcatcgaggagctctacgccttcatgccggccaggagccaggaccccaagaagcctagcagggtctgaggcctcggccttgcaccgggacgccgagtttgggacaccgaacactgggcaaaagagaatcccctgccttcctttgtcgtcctcgccttccccagccagttcgtacctattgaaaagcagcgttagcagccttcctaaactcagagttttaataaaggtgtgaggaggctggggccagttgacaccagcatgctgcctttttctttctttctttctttctttcttttaataaaagatagacaatattttagagcagttttgggttcacagctaaactgagcagaaagtacagggagttcccatagactcccgtcccacaaatgcataatctcccgcattatcaccatccctccagagaggtctatgggggaagagatcaccctaagccagggcttttc

SEQ ID NO: 460963 - DNA, 957 bp, Homo sapiens
agcagggtagtaagaagtagagaccggatctggaaagagtaatacaaaatatctggcacatacaaatgaaagatttcacatctgtttttgtttgtttgtttgtttttgagatggagtcttgctctgtcgcccaggttgcagtgcagtggtgcgatctcagctcactgcaatcgccacttcccaggttcaagggattctcctgcctcagcttcccgagccaccttgcccagctaatttttgtatttttagtagagacagggtttcaccatgttggccagactggtttcaaacttctgacctcaggtgatccaccctcttcagcttcccaaagtgctgggattacaggtgccaaacttaaaatatgtaagaggcagctttatgctaaacttgacaaaagaaagcctcagagtgggaaagtcaacctaagagagaaaccgtttattttgtgggtaatgctgagtgcccatttgagtggagacctaaaaaccagactctgagcagtagcatgaaccaaatgttgtcctagacctgaagtttggccatatcccattgtaagcattgacatcaccacctacctctcagagacagttaacaggcctgaggtatgatgagaaaagagagcaaccagacacaacaactaaccagcattccttcctgataatagaccactgaccttggagtggctctggccagtctacaaaggatgcacactgagtaccttagtgtcctctgcttcaccttttgacatcagagggcagaaaactccacccatgcctccaggcttccatgaagaggcatgaagctcagtttccgctttcataaatatttatgactcctcctgtagctattaaataatgtatatttgaccactcagttcagcataaattcttattccttttgcccctcccttgaagtgcctctttctgacttctattcagagactgtttcccagtctgt

SEQ ID NO: 460964 - DNA, 2237 bp, Homo sapiens
tcagaagctgtcggactgtgagcgccttcgaactttggaggcttggctcgggatggaggtttttttagcatggggaccagggaggactacggtgctcgggactgggctgcggcctcctcgcggccccgagtgccctgtgaaatcagctcaggccgcgtccctctagcctgcactttccctctgttcacgctgcttccctccagggcccggcctccaagtgaaggggggcggagggcggtcacctgccagaaggtctggggcgccaaggtgtgtcccgggactcttggctccgtccaggttccaggccccgccccccagcttatccctagccggggctccccaccgtgggaacggggaccagctggccggaagcgccaaactgcgtccctgtccgagccctggggatcaatcaagccgaggagttaattatgtaatgagggggcagggggtcgaggctaatgaagcctcccggggtggggagggaggggaggaggggaccgtacccaggtatccgaccccctctcggaccccttcgaggccccaggggtctccaccccagcccaactccagggccccaaagaggggaggggctgtgatcctggatctggaaggggctgagctgtgagctataaagggggcatctcgcagcaccgggggccctaagcagcgagacctgaggccagacggaactacaacatgtaccatccacgagaattgtacccgtccctgggggccggctaccgcctggggcccgcccaacctggggccgactccagcttcccacccgccctagcggagggctaccgctaccccgaactggacacccctaaactggattgcttcctctccgggatggaggctgctccccgcaccctggccgcgcacccacctctgccccttctgccccctgccatgggcactgagccggccccatcagctccagaggccctccattccctcccgggggtcagcctgagcctggagaaccgggagctatggaaggagttcagctctgtgggaacagaaatgatcatcaccaaagctgggaggcgcatgttccctgcctgccgagtgtcagtcactggcctggaccccgaggcccgctacttgtttcttctggatgtgattccggtggatggggctcgctaccgctggcagggccggcgctgggagcccagcggcaaggcagagccccgcctgcctgaccgtgtctacattcaccccgactctcctgccactggtgcacattggatgcggcagcctgtgtctttccatcgtgtcaagctcaccaacagcacgctggacccccacggccacctgatcctgcactccatgcacaagtaccaaccccgcatacacctagttcgggcagcccagctctgcagccagcactgggggggcatggcctccttccgcttccccgagaccacattcatctccgtgacagcctaccagaacccacagatcacacaactgaagattgcagccaatccctttgccaaaggcttccgggagaacggcagaaactgtaagaggtgggagttgttcattcatttgttcatgcattcaacaaatgtttattaatcactcactgtgtgccaggcaccgtgctggacatcagaaatgcagtggtaagtgaaaacattcattcactgactcagcaaatacttatatagtacctgctatgtgccagggacagttccaggcactggagataaaacaaacaaagcaaaccaaagccccggccctcatgcagctgatttctagtggggagagtagacaagcagacaagagaaataaataaaatgtcatctgttaggaagccattctaaagagaagagagaccaggtgtggtggctcacgcatgtaatcccagcactctgggaggctgaggcgggcagatcacctgaggccaggagttcgagaccagcctgccaacatggtgaaaccctgtctctgctaaaaatacaaaaattagccaggcatggtggcaaacgcctgtaatcccaactacttgggaggctgaggcaggagaatctcttgaacccaggaggtggaggttgcagtgagtcgagatcatgccattgcattccagcctaggcaacacgagcaaaacttcctctcaaaaaaaaaaaaaaaaagaaagaaaagaaaactctgtctcaaaaaaaaaaaaaaaaagaaaaaaaagaaaaaggagaagagaaataaaccaggaaaagataggaaggactggg

SEQ ID NO: 460965 - DNA, 370 bp, Homo sapiens
gcctcccggggtggggagggaggggaggaggggaccgtacccaggtatccgaccccctctcggaccccttcgaggccccaggggtctccaccccagcccaactccagggccccaaagaggggaggggctgtgatcctggatctggaaggggctgagctgtgagctataaagggggcatctcgcagcaccgggggccctaagcagcgagacctgaggccagacggaactacaacatgtaccatccacgagaattgtacccgtccctgggggccggctaccgcctggggcccgcccaacctggggccgactccagcttcccacccgccctagcggagggctaccgctaccccggtgagcgttgggaccagct

SEQ ID NO: 460966 - DNA, 1753 bp, Homo sapiens
caaagtctacatcttggcactttattagggggacagagcagcaccctcactgcagccaccaccaccgcagcaccacaccgtcatcggggaactgatggaggagccctctaggattctgatacagcatggaggagacccccagtgggaagggcaaaaggagggcgatgagcttcctaggagcccagaagacaaggtccaggacctcaggcccctgcagcagccctggactctccaaactccagccctgctggagacagtgtcttcccagtctgtgtctgagccttctctcccgcccctccctccctccctcccacacccacagaaagctggtctctagcaggtgctagcgccggaggtggaggcggctgcagagagagagaagcccaggagggaggggcacagccctggctgaacccacaggattggtcaatctgcatcctctcagccagcacctgactaaagattcctcaaagcgacagtgacctcagcctctgctctgagctctgttggtcccagccaggagagcccgagtcatgaggtgggcacccagtgggcagggtgggcagcaggggccctcttggaggcagcagtgagttgggaagaggaggccgggccccacagcgggcatgatggacaagttccggatgatcttccagttcctgcagtccaaccaggagtccttcatgaatggcatctgtggcatcatggccctggccagtgcccagatgtactcggccttcgacttcaactgcccctgcctgccgggctacaatgcagcctacagcgcgggcatcctgctggcgccacccctggtgctctttctgcttggcctggtcatgaacaacaacgtgtccatgctggccgaagagtggaagcggccgctgggccgccgggccaaggaccccgctgtgttgcgctacatgttctgctccatggcccagcgcgccctcatcgcgcctgtcgtctgggtggccgtcacgctactcgacggcaaatgcttcctctgtgccttctgcactgccgtgcccgtgagcgcactgggcaacggcagcctggcacccggccttcctgcccccgagctcgcccgcctgctggcccgggtgccctgccctgagatctacgatggcgactggctgttggcccgagaggtggccgtgcgttacctccgctgcatctcccaggcgctgggctggtccttcgtgctgctgaccactctgctggcattcgtggtgcgctctgtgcggccctgcttcacgcaggccgccttcctcaagagcaagtactggtcccactatatcgacatcgagcgcaagctcttcgacgagacgtgcacggagcacgccaaagcctttgccaaggtctgcatccagcagttcttcgaggccatgaaccatgacctggagctgggtcacacccacgggacactggccacggcccctgcttccgcagctgcccccacgacccccgatggtgcggaggaggaaagggagaagctgcgtggcatcacggatcaaggcaccatgaacaggctgctcacgagctggcacaaatgcaaaccgcctctgcggctgggccaggaggagccaccgctgatgggcaacggctgggctgggggtgggccccggcctccgcgcgtctcatgaagtgggagccctctgatttgggcaagcgtgtcgtaggtggactgcatgtttatttagcacaaaccaagcacaaaagtcctcctgtagaggggtctttgaaaaaccacctt

SEQ ID NO: 460967 - DNA, 4492 bp, Homo sapiens
gcgctgtccctgatgaatccaagctgtcagcttctgtcagcttggctgggaagtcatgctgaccgtaaggggaatggtgcagcctgagttgggggctgagtgggaatgggcctggtgtggggtgggggaggtggggctctggtgccctgcagggtctcccttggagcacctggagcccaagaagctgtccctcacctttgcaatcccagggactcgccccctgatcatgatgaaggtggacccaaacccgctgaggggcctgaaggagcaaagacaggccatgctagccccagggcctccgttccctgttacccagcccccacccccagaagtacagaggaacctggtgccggccgccgtcaacccctatgtgatgatctttctacccgccctctttcgtgtcttggtgctggctgctgtctttggccagctaaaagaatatcagcaaaggaagagccctggtattccagcaggagcaaagacaaaaaagaaaaaaactgacagtagccctgagacaaccacttccggtggtggccactcacctggggatattcaggacattctgaaggtgcgggtgtccaaccttaaccactccaatgggagccagtaccaagaactagcagtagccctggagtcaagctcagtgacaatcagtcaactcaatgaaaacatagaatcattggcaaagaaaacaaacaatgaaatacacaaagcacaaatggagcggttagagacaatcaacatcctcacattggaaaaggcagacttgaagaccaccctttaccatactaaacgtgctgcccgacacttcgaagaagagtccaaggatctggctggccgcctgcaatactccttacagcgtattcaagaattggagcgggctctctgtgctgtgtctacacagcagcaggaagaggacagggggcactgcctgagctccccagatcaaaacttctcactcttcaccatccagtcctcgagctgcagagaagcggtcctccaccggcggttacagcagaccataaaggagcgggcgctgctgaacgcacacgtgacacaggtgacagagtcactaaaacaagtccagctagagcgagacgaatatgctaaacacataaaaggagagagggcccggtggcaggagaggatgtggaaaatgtcggtggaggctcgaacattgaaggaagagaagaagcgtgacatacatcggatacaggagctggagaggagcttgtccgaactcaaaaaccagatggctaagcccccatccctggcgcccccagcagtgacctctgtggtggaacagctacaagatgaggccaaacacctgaggcaggaggtggaaggtctggagggaaagctccaatcccaggtggaaaacaatcaggccttgagtctccttagcaaggaacaaaagcagagactccaggagcaggaggagatgctccgagagcaggaggtgcagagagtgcgggagcaggagagactgtgtgaacaaaacgagaggcttcgggagcagcagaagacgctacaggagcagggtgagaggctgcgaaagcaggagcagaggctacgcaaacaggaggagaggctgcgaaaggaggaggagaggctgcaaaagcaggaaaagaggctgtgggaccaggaggagaggctgtggaagaaggaggagaggctacaaaagcaggaggagaggctcgcgctctcccagaaccacaagctcgacaagcagctggccgagccacagtgcagcttcgaggatctgaacaacgagaaaaagagcgcactgcagttggagcagcaagtaaaggagctgcaggagaagctagacgaggtgaaggagatgcagtacgtggccacctatcagcagctgacctctgagaaggaggcgctgcacaggcagttactgctgcagacccagctcgtggaccagctgcagcagcaggaagcttggggcaaagcggagcacctagaagctgccagccagcagaaccaacagctagagacccagctaagcctcgtggctctcccgggagaaggagatggaggacaacatctggacagtgaggaggaggaggcgcctcggcccacgccaaacatcccagaggacctggagagccgggaggccacggagccagaggcagaggccccagccccagggagtgggggtgagtttgtgtgtggggagagctaccgggccctgaaggaggccatggtgaagctgaaagggagagagtccttcaccgtatatgaaagccagggggcagtgccaaacacgcggcaccaggagatggaggatgtcatcaggctggcccagaaggaggaggagatgaaggtgaagctgctggagctgcaagagttggtgttgccccttgtgggcaaccatgaggggcatggcaaattcctcatcgctgcccagaaccctgctgatgagcccactccaggggccccagccccccaggaacttggggctgccggtgagcaggatgccacattagttactctgacgtaggaatttacttcttttctttgaatggaaaacactttaaaaataataacaaccattattataaaccaatatatgtgagagtacttagttgaaacaaaaaggagttttagtagacagtattatactacacatgaaaatcaaggcgaagtttatgcaacttaaaatgtttacaagctgcagtgcaatctaatgtttgcgaatgtccaagtattatgagaaaaagtgtctatacaatgacagacttacgtttcctcacaaagttcttcacaaagagtgaaatatgtttttatacctctcagtttcagttagaggcatattttgtgccatatttatgttaatgtgcctatacgtgatgagtgaattatttcagtcatacattgcctaaatcataactttaagatgcttgggaaagaatcaacagctaaaagttcatgaagttctaatgtctgtgttccaaaatacgtcacagtattaggatgcagggagagatgtgtgtgcgctccctggggtgggcatttctagttactagaccatctccatttttagcatttggcatcctcatgatacttttatacatatgacgttaataggagagcaataatacgattttacagatggaataacagatgtgcctgcattcagtgaaagagtgcaaatattaagtccttgtgacttcaactgactcttccaaattgtatgaatttatcaatgtattagataaactcagttccagaattataaagaaaaactgttagaccaacgaatgtggctaattaacagtaggacgatttctagcccgagggtttaaaatggacttcaagtcctgttcttgccttttattttctgaacttgccacttttgcattctttgagttcagtttaaagacagtttgagtccaatttagaccctcgggctagaaatcataccactgttaattagccaccttatttggtctaacagtttttctttataattctgaaactgggtttacctaatacattgataaattatttcaaaggtatttttatagttcaaatcacttcacttttaccctgataaatataaatgactaggaatgatcttcagctagcctttagcacctgcaaccaatcggacaataatgtgttcatcaggtacctgtggattaaatcacacaccggcatatttaagctgaatgtcagtctggaaaatgaatgtactatattaactgaaataccactctttgtgtaggtattctgtcatatatttaagaaaaattaaatagcatgtaaatcatataacaacaacttaagtctttcttcaaagtgcatgtggtcctttgcaatacctcattcagccaagtatttgttctcttcctcattcagtttaaggcagctttcaatttgcttagaaggcaacattagaagggtagagtttaatcagaaacatagaattttaaagtgtgggttcaactgaataaatttgaatttctgtaggaagtaaagaattaaaaatctatttaaagattgcaatatataatcatttttaaagtatttgtttaacctgatgggttttccagaaatgaaaacaagtcagttctaaaaccaaagctgatatttagaaaatgtgaaaatgtaaatcagccctatccataatatagtttctctaaaactttatcttaaagagtcattttaaaagaatataactattcataagtgtaactgctatcttaatgttttgaaataagttaaaacactttaaaatatgaatactgtagtttgaaagaaagaaactgggggaaggaaaagtagagaaagaaatgccaattccaatgcaaggctttatttgccaagttttcttagaatgacttttaccagtttatgaattcttgtaaacagaatgtataatagaaatactgaaacactgttgcctaaagtggcattgttgactgctactgtgatgctactgtaatgtaataaattattaaatggttgcaaagtgctg

SEQ ID NO: 460968 - DNA, 1492 bp, Homo sapiens
gctggtgctgctgtgagggttgcctgctgacagctcacaactgccctcccctctccagaaaattgtccttggctgataagacctaactgacccagttatgcaccatgacctgcatccagaggacagatcacagccaccaactgaccgattctatccaaaaggccagcctggagagccctcccactgtctactactcaacaggatattcttcaaggaaaatgaaccccacactaggcctggccatttttctggctgttctcctcacggtgaaaggtcttctaaagccgagcttctcaccaaggaattataaagctttgagcgaggtccaaggatggaagcaaaggatggcagccaaggagcttgcaaggcagaacatggacttaggctttaagctgctcaagaagctggccttttacaaccctggcaggaacatcttcctatcccccttgagcatctctacagctttctccatgctgtgcctgggtgcccaggacagcaccctggacgagatcaagcaggggttcaacttcagaaagatgccagaaaaagatcttcatgagggcttccattacatcatccacgagctgacccagaagacccaggacctcaaactgagcattgggaacacgctgttcattgaccagaggctgcagccacagcgtaagtttttggaagatgccaagaacttttacagtgccgaaaccatccttaccaactttcagaatttggaaatggctcagaagcagatcaatgactttatcagtcaaaaaacccatgggaaaattaacaacctgatcgagaatatagaccccggcactgtgatgcttcttgcaaattatattttctttcgagccaggtggaaacatgagtttgatccaaatgtaactaaagaggaagatttctttctggagaaaaacagttcagtcaaggtgcccatgatgttccgtagtggcatataccaagttggctatgacgataagctctcttgcaccatcctggaaataccctaccagaaaaatatcacagccatcttcatccttcctgatgagggcaagctgaagcacttggagaagggattgcaggtggacactttctccagatggaaaacattactgtcacgcagggtcgtagacgtgtctgtacccagactccacatgacgggcaccttcgacctgaagaagactctctcctacataggtgtctccaaaatctttgaggaacatggtgatctcaccaagatcgcccctcatcgcagcctgaaagtgggcgaggctgtgcacaaggctgagctgaagatggatgagaggggtacggaaggggccgctggcaccggagcacagactctgcccatggagacaccactcgtcgtcaagatagacaaaccctatctgctgctgatttacagcgagaaaataccttccgtgctcttcctgggaaagattgttaaccctattggaaaataaaggagaattcctgcttgccacagaccccg

SEQ ID NO: 460969 - DNA, 1356 bp, Homo sapiens
cagaagtgtgctgataaattagcttagtcctgattggtaatcatggccgatttcacgctgccgataagagaaaggtttggggacttccagattgcttcagtttacacaattctaattttctggccggtatcagaccatttttctttcatttggcagagaagagagaagggtatgagttgccaggtagtggatgcagatggaagcgctggctcgcaccagaagctgacactgaaggtttattttaatgtagcacaaatcagagcgaacgacgtgaaaagagttctgtttctcctggaaggatgccacttgtttctactccaggggaaatgtcttccaagctctttaccaaatctgcaagctgaaccaactcaactgtggctgccttgcccacctgaagacctcaggatccaccagcagcccaagacacctcggaagctgtttcaaggacaagcgtcgcctgcacacgtcagcacaaatgggaacatgatgagtgatgctgcctggagttaaaggaggccaggagcaccagaagctggaggaggccggggtggattctcgcctggaggcttcagtgggagcacgagctcccgacacttcggttccatctcttgtttaaaggcacccagtttctcatcatttgttacagcaccatggaaaacccacacacaagtgaagccccgacccacctcccaagtgcccatctgagcacccctcgtggactctgagcagggggttgccatcaccaactccaagtcttgcagcccctcttcccttcagtctggctgccaccttcttcattgccctggaaaaaaataatgaagtttcaccatttaaagggtttcagtgcagcttgctatgggaacactggagagtaacacaaatggccaattgtcctaatagccaccatggattggatggatgctaacaacaggctcacagttctccttctgttgcctccttttatccacatgagaatcaaacaaaaccacggtcagtgaccaaggccctgcttagaactttctgaaggttgcagctggccttctacctggagttttgacttcctttccgagaaaggaacttgaatggcaatcacaagaaagttgagaacttctctttcatattttaagcattcatttttttttatatttattttaatttacaaatactaattgtatatatgtataaggtaagatatgatagtttgatatggctaccttgtaataaaatgagcctcattaccaagtctggcacttcacatgtgtatttttttgtttggtaaaacattgaaaatctatccttttagcaattttgaaatgtacaatgcatttttaaaaattatagtcatcattctgtgca

SEQ ID NO: 460970 - DNA, 1497 bp, Homo sapiens
cagaagtgtgctgataaattagcttagtcctgattggtaatcatggccgatttcacgctgccgataagagaaaggtttggggacttccagattgcttcagtttacacaattctaattttctggccggtatcagaccatttttctttcatttggcagagaagagagaagggtatgagttgccaggtagtggatgcagatggaagcgctggctcgcaccagaagctgacactgaaggtttattttaatgtagcacaaatcagagcgaacgacgtgaaaagagttctgtttctcctggaaggatgccacttgtttctactccaggggaaatgtcttccaagctctttaccaaatctgcaagctgaaccaactcaactgtggctgccttgcccacctgaagacctcaggatccaccagcagcccaagacacctcggaagctgtttcaaggacaagcgtcgcctgcacacgtcagcacaaatgggaacatgatgagtgatgctgcctggagttaaaggaggccaggagcaccagaagctggaggaggccggggtggattctcgcctggaggcttcagtgggagcacgagctcccgacacttcggttccatctcttgtttaaaggcacccagtttctcatcatttgttacagcaccatggaaaacccacacacaagtgaagccccgacccacctcccaagtgcccatctgagcacccctcgtggactctgagcagggggttgccatcaccaactccaagtcttgcagcccctcttcccttcagtctggctgccaccttcttcattgccctggaaaaaaataatgaagtttcaccatttaaagggtttcagtgcagcttgctatgggaacactggagagtaacacaaatggccaattgtcctaatagccaccatggattggatggatgctaacaacaggctcacagttctccttctgttgcctccttttatccacatgagaatcaaacaagtaggtgctgctggtattactgtatttttctcattttaaagatcaggatggggagggttgaggaggttaaggaagttgttagaagttacactgaagttaagaaaggaaaaaggacttagaaacttattcttacaactgcagaaccacggtcagtgaccaaggccctgcttagaactttctgaaggttgcagctggccttctacctggagttttgacttcctttccgagaaaggaacttgaatggcaatcacaagaaagttgagaacttctctttcatattttaagcattcatttttttttatatttattttaatttacaaatactaattgtatatatgtataaggtaagatatgatagtttgatatggctaccttgtaataaaatgagcctcattaccaagtctggcacttcacatgtgtatttttttgtttggtaaaacattgaaaatctatccttttagcaattttgaaatgtacaatgcatttttaaaaattatagtcatcattctgtgca

SEQ ID NO: 460971 - DNA, 1219 bp, Homo sapiens
ctcccccaccaccttcggggaggcgttggctcgagacctccagaagtttcccaccggagacctaggctgcgcattgctccgctaggttgatgagcttttgctgggacaccccacagcagtcgggtgcgccaagggaagggattgccctacgctgacacctggaggactgtgggtataagttgtccaagaaaaaagctcagatctgccgacagcaggaaaacgttactgctaatgtcacagggcgtgtagaccctgttataaaattcctaatatcccagcgggagttcactactaattgcacaatgcgtgtagaccctttgatattattcgtattgtcctgaagagatgttactactgacgtcccaatgcagcctttttcgacccacactgcaaaaggaatggaacagataagaaggtattgagattagaacgtgctgccgtgcggccgccgcaggacacttttcatatccctgtttctcggactgtagatgaaggggttcatcatgggggtgaccactgcgtacatcactgaggccactgcagtctttctcggggaagatgacacatctgaactgaggagtatgtctgtcttccatgcctccaaaaatggcaaagagagacatctgagtcaggcagcctgcataggagatgactctgctgtgagattggatgtccacagtcatcttggggactgtggtggaggtgaaactgatgtcaggcaaggacaggttggagaggaagaagtacatgggggtgtggaggtgggagtcagggctgatggccaggatgatgagcaggttccccagcgccatgaccaggcacgtggacaggaacagcccagaaagccaggaacaggggcaagggagagatgcatcccgaatgatcctgtgccaattctttctggaatctttgatgtgatctccgctgccctttccatacttgacacagtgattgtggcacccactggtctagctgtggtctacaaggaacccccaaagggaagggcacagtgagcaggggcatcggcctgagtgacaaggattggagggggcagaagtgaggatatgaaatatttgtcattctgtgcctggcttatttcatttaatatacagacctgcaatctcatccattttgtctgcagcggagaggattttcttcctttttaggctgaataatacttcattgtgtgtgtataccacagttactcaattgaaacaaa

SEQ ID NO: 460972 - DNA, 2334 bp, Homo sapiens
cagtcctccgcgagccgacactggaggcagcagcagcggcggctgcagcggccccgactcgaagcaccgcactctccccgcgccgcccgccccgacggcatggcccgcggccggcgctccgggcgcccccaaccccgctgagagccgccgcggccccggacccgcgcaagggcccccgagccgccgggatgagccgcgccgagtggtgatcgccgctcgggaatgcgggcgtgaagggtccgagttgccgcccagcggggaggagaccccaggacgccggaaatcaccatcccaaagctgcaagaaggggggagaaagcattcttcattcagttgtgtgccttgtgggggatttttaaaaagtcgtttttttttttaaagaaacatttccgtgctactgtctgtcatcgtctctggggaaatcagccagaaccaccggaacgtaactgaaaccagacaagagaggcaggagcccaggcagtacctgcagcgtccgggcaccagagccaccttggaacaggaacgcgtctccggccgcggggctgcggctccgccaaactttggggcgggcggggcgggctggggcgcccagggggctctgtagaccgagggcggccccctaaccatgatgtttcgcgaccaggtcggggtgctggcgggctggtttaagggctggaacgagtgcgagcagactgttgcgctgctgtcgctgctcaagcgcgtgagccagacccaggcccgcttcctccagctctgcctggagcactcgctggccgactgcgccgagctgcacgtcctcgaacgcgaggccaacagccccggtaagtgtgcggcggccgccgccgccgtcccgcctgcccaacccccgctcctccctccgcttctctgcctcgggccaggccgaggccagtccctgccagccgcgccgggacctggacggcgtggccccgaggccctcggaatccaccccctccgggtgtccccccactaccgccccccacctacttacctccgccggccgctttgggattttgcccactgtgaactccgtcagccctttccgtgtggtagctacggtagcatgaatgattgatttttctctcatgcagtttcctgggaaataacaacacatgatagatgcccgggactgcccttcagaagccaagcttggataaggctgtgagagcagtttggaaatctgtgaccaagggcagtggtctttctcaggctctgagaaaagacattggtcgacaaagctatggccagcagatctgggatcagaatctgactctcctcactgttattcagtccttgaacagagcagatatgtttgtgcgaggacaaagaagatgcctcaaagacaaagaagaagatgcctcgtcgtcccctgagctcccacacggcatctgcacatcaccagctcagcatttagcacactggattgacactgccatgttagcaacagcaataacaagaatgagcatattccctctttcccccaccagtggccttcacagcttgacagagcgcttcattctgctgaatgagcaacactcaggacaccagtggccttccgagtgggcagaaattccttgggcagctccagatcccagcaaaccacttaatcagcctttacataaaaatcgtagcctagagaaggcatttgaggaaactcttccttatgctagccttttcccctccattgtggcctctggaatcaaaggtgggaggactgaggccgaagactgctctgtgtcccttcctggggctgcatgtgaagtgacaggcgctttgcccggacggtctaggtggtgctgcttggagactccgccggccttcatgagcatcactgccatgtcacagaggggtctgcaccaaggaagggaattgaataatggcatggatgaagaatatttactgcagcagtataactctgcatcagatgaaattgctgatgctctgaaagtcaagcatgagactattggggaagcagctatggaaataggccttcagccttcagctgattgggtaaggcccacccacattatggatggcaccctgctttactcaggccactgatataaatgttaatctcatcccaaaacacccatataaaaacgttcagaataacatatggccaaatatctgggcacctcatagctcagtaaagttgacacataaaactaacaatcacacagcactaacaaatgatgctgtcctcctctgcctctgctaattagtttgaagatgaagaacattctcagggtcttcattttcctataggttttgtggctcaagtctgttattgagctcattccttttcatgtgaaggtat

SEQ ID NO: 460973 - DNA, 2522 bp, Homo sapiens
cgaagtccagggcaacatagcacagcttctctgtgatgtcacgcacgatttcccgctcggccatggtggtgaacctatagccacgctcggtgaggatcttcatgaggtagtcagtcagttcccggccagccaggtctaggcgcagggtggcatgggggagggcattcccctcatagatgggcacagtgtgggtgaccccgtcaccagagtccatcacaatgccagtagtacggccagaggtgtacaaggacagcacggcttggatggccacgtacatggctggggatggggtgctcctcgggagccacacgcagctcattgtagaaggtgtggtgccagatcttctccatgtcgtcccagttggtgatgatgccgtgctccatggggtacttcagggtcaggatgcctctcttgctctgggcctcattgcccacataggactccatctgacgcatgccccccatcatgttctggtgcctggggcaccccacgatggaagggaagacagcccggggggcatcgtcacctgcaaagccggccttgcacatgccagagccgttgtcaatgacgagcacggcagtatcatcatccatgctggctctgatgtttcattacgtctagttccagtcttagcatgacaatttcttcctgcaacgtactattttcatgcaagaggtctttttctttcttataactaagagaaagctaaaaaggggattttaagtaaaaaactgaagtaatggaaacagtaagctagaagaatatctggggaaaaagcattccagacacggggaactgctaagtgcagaggtgtgactggagtttttaagcactagagatagatcagtgataacattagaaactcattggagcacgaaccctgttgtgaactgcctatccgaaggatctaggttgtgtgcttcgtatgagaatctaatgccagatgatctatcattgtctcactttgcccccagataagaccatctagttgcagaaaaataagctcagagcttccactgattctacattatggatatgtgccgccgaagcaagcacaaagccctacttttacacatgcctagtgatgcttcatggacaaggcttggctctgttgagtccaactaacctacctgagattctgagatttctcttcaatggcttcctgtgagctagagtttgaaaatatcttaaaatcttgagctagagatggaagtagcttggacgattttcattatcatgtaaatcgggtcactcaaggggccaaccacagctgggagccactgctcaggggaaggttcatatgggactttctactgcccaaggttctatacaggatataaaggtgcctcacagtatagatctggtagcaaagaagaagaaacaaacactgatctctttctgccacccctctgaccctttggaactcctctgaccctttaggacaagcctacctaatatctgctagagaaaagaccaacaacggcctcaaaggatctcttaccatgaaggtctcagctaattcttggctaagatgtgggttccacattaggttctgaatatggggggaagggtcaatttgctcattttgtgtgtggataaagtcaggatgcccaggggccagagcagggggctgctgctttgggaacaatggctgagcatataaccataggtatgggaacaaaaaacatcaaagtcactgtatcaattgccatgaagacttgagggacctgaatctaccgattcatcttaaggcagcaggaccagtttgagtggcaacaatgcagcagcagaatcaatggaaacaacagaatgattgcaatgtccttttttttctcctccttctgacttgataaaagggaccgtcttccttggatttagtgaacccctttggttcctgaaaaattcaaggagtatctaggacatagtccccagaagacagtacaagactttctgataaactggacatttcaagacccaaataactaatcagaaaaatcaaagatgtgatactattttttatcccatgcataggtgctacacttggatcaaatgaacaatgttgggatctctatggataaaggtcttaaaagtcctgagataaagaatcctgcacccactggtacttctaacttgtcttgttttttgtctgatttctggctgatgcaggggactaactcactgccacgcgaaaactacctgaactgaactatgacatctcacctgatatgtaagatgtaactgttataattattttaaacctcaatttagcattaactagccttttaatgtaaacacttacacattatgatgactagaaacagcatactctctggccgtctgtccagatagatcttgagaagatacatcaatgttttgctcaagtagaaggctgactatacttgccgatccacaacatacagcaagtatgagagcagttctaaaatgacagagataggaacagtaataaagttattttaaaagctaatttgatatactttaccaatttaacatcttgcctgtcc

SEQ ID NO: 460974 - DNA, 2116 bp, Homo sapiens
cgaagtccagggcaacatagcacagcttctctgtgatgtcacgcacgatttcccgctcggccatggtggtgaacctatagccacgctcggtgaggatcttcatgaggtagtcagtcagttcccggccagccaggtctaggcgcagggtggcatgggggagggcattcccctcatagatgggcacagtgtgggtgaccccgtcaccagagtccatcacaatgccagtagtacggccagaggtgtacaaggacagcacggcttggatggccacgtacatggctggggatggggtgctcctcgggagccacacgcagctcattgtagaaggtgtggtgccagatcttctccatgtcgtcccagttggtgatgatgccgtgctccatggggtacttcagggtcaggatgcctctcttgctctgggcctcattgcccacataggactccatctgacgcatgccccccatcatgttctggtgcctggggcaccccacgatggaagggaagacagcccggggggcatcgtcacctgcaaagccggccttgcacatgccagagccgttgtcaatgacgagcacggcagtatcatcatccatgctggctctgatgtttcattacgtctagttccagtcttagcatgacaatttcttcctgcaacgtactattttcatgcaagaggtctttttctttcttataactaagagaaagctaaaaaggggattttaagtaaaaaactgaagtaatggaaacagtaagctagaagaatatctggggaaaaagcattccagacacggggaactgctaagtgcagaggtgtgactggagtttttaagcactagagatagatcagtgataacattagaaactcattggagcacgaaccctgttgtgaactgcctatccgaaggatctaggttgtgtgcttcgtatgagaatctaatgccagatgatctatcattgtctcactttgcccccagataagaccatctagttgcagaaaaataagctcagagcttccactgattctacattatggatatgtgccgccgaagcaagcacaaagccctacttttacacatgcctagtgatgcttcatggacaaggcttggctctgttgagtccaactaacctacctgagattctgagatttctcttcaatggcttcctgtgagctagagtttgaaaatatcttaaaatcttgagctagagatggaagtagcttggacgattttcattatcatgtaaatcgggtcactcaaggggccaaccacagctgggagccactgctcaggggaaggttcatatgggactttctactgcccaaggttctatacaggatataaaggtgcctcacagtatagatctggtagcaaagaagaagaaacaaacactgatctctttctgccacccctctgaccctttggaactcctctgaccctttaggacaagcctacctaatatctgctagagaaaagaccaacaacggcctcaaaggatctcttaccatgaaggtctcagctaattcttggctaagatgtgggttccacattaggttctgaatatggggggaagggtcaatttgctcattttgtgtgtggataaagtcaggatgcccaggggccagagcagggggctgctgctttgggaacaatggctgagcatataaccataggtatgggaacaaaaaacatcaaagtcactgtatcaattgccatgaagacttgagggacctgaatctaccgattcatcttaaggcagcaggaccagtttgagtggcaacaatgcagcagcagaatcaatggaaacaacagaatgattgcaatgtccttttttttctcctccttctgacttgataaaagggaccgtcttccttggatttagtgaacccctttggttcctgaaaaattcaaggagtatctaggacatagtccccagaagacagtacaagactttctgataaactggacatttcaagacccaaataactaatcagaaaaatcaaagatgtgatactattttttatcccatgcataggtgctacacttggatcaaatgaacaatgttgggatctctatggataaaggtcttaaaagtcctgagataaagaatcctgcaccca

SEQ ID NO: 460975 - DNA, 1365 bp, Homo sapiens
cagccatctgaggtactttcaaagcattggtgtgcaggccccctgcactgatcctgagtggccacctagaccagggtgtccagaggctcgactatagggttccttcttctccaccatggcacttcaggctcccttggcacttctcttttgggaaaataaattgcttctggattagacatctttctgttgctgttgcttgagacagggtctcactctgtcacccaggctggagtgcaatggcacaatcatgattcactgcagcctcgacttactggactcaagtgatcttcccgccgcagcccccgaggtagctgggactacagggtcttactctgtcacccaggctggagtgcagtggcataatcttggctcactgcagccccaacatccccggctcaagcaatcctcccgcctcagcctcctaagtagctgggaccacagaaacccaaactgcagaacatgttcagtgaagcaaccagagctaaatcatttgaaatgcattagccagtactcgccgcaaattaatttaacaccagtcacatgtgtctgggtgattttcccctgaaaggtggcgtgagttgattggaccccaggaggaacgctgcgctgaatggctcaagatttactactaaccacacactgcacagagaaggctgcgtgttaccaaggcctccatggaattagggggaactgccaacaaaccagtgcagagcctgcaaatgtcagatagaaggaggatgagacatgatttggatatttttccaagaaggaaagactcagttcatttagaagagtttccttaaggataaaggaagtatccagaacctactctaagaaagggaaatggcttcatgctttcctctcccattcccatacctgcaggaaaatcagatttcctcatggtcctgctgacctgtgagcccctttgggctgctgatggacctgtgctcccaccctggctcaaaaagcaaagaaaagggagtggctatcagaaaatggaagaagagagtaaagaagacagtgctggcttgagagaagcagtggcttcagaacagtgcagcagagagaactcgagaggaattcagccagggtggtcagagaggagtttggctgctggacagcccactccaagggaagatcatcttcctactccatctcccctccttccagctccctatccatcctgccgagagccacctccaccgtgcattaaaacctcgcattcatccttcaagcctgtgtgtgacccgatgcttccgggacgctgggcaagagctcaggatacagaaagctgtcacactggccctctgcccttgagaaaaggcagagggtccattgagctgtttaacacttaaagccatctgc

SEQ ID NO: 460976 - DNA, 775 bp, Homo sapiens
atcccagttctttcatgttacaaaattcacaaaatggctgtgtgtacatgaattttggtggaaacagtgaagaaactgagcttcatgctgacattgacacagatggtctggaagacatcctgggaattgtctggaaaggaggcattggacctctagctgtgatgagatataggaataaggagtggtgggctaagtgtgcatctagtatgcaaaatagagagaacagtaagtgtgatgagaataagaagataagaattgaaagagaatcgaaaggcagtgacttcatcacggtaagacattgtttaatcccttgttcatgtgctacctacagagatcccagaccaccacccatgatcccaggctggaggaagcagcaggctagcggaattcaggaccaatgagccaggaaagaggacccaatgcagagctcacatcccaccctccttcccccatgacaaagcactggcaaaccctgccaaagaagaagcttggctgcaaagcagtctggaactggacccgggatagattcaccaggagctcaccaccacagggaatgctgcactttgactggacagaatgcatcctccatgcccacagagcatgtgcccaggatgaatctcactgtatcccagttcctcatgcttggccccaaacctctttttcacagtaataaagaaaacacactttacaaaaaggcagttcatctatgaacatattggctaggataacacatcttagagctaaatgtgtcactgtaaatggactcattttatat

SEQ ID NO: 460977 - DNA, 4127 bp, Homo sapiens
  misc_feature (1)..(1): n is a, c, g, or t
  misc_feature (5)..(5): n is a, c, g, or t
ntccngcaggtggagctgaagagccaagagtctcagagtctgcagcagcagcaagactagtacctgggtcacctgcagcagtacatggccacctatcagcagctgacctctgagaaggaggcgctgcacaggcagttactgctgcagacccagttcgtggaccagctgcagcagcaggaagcttggggcaaagcggagcacctagaagctgccagccaccagaaccaacagctagagacccagctaagcctcgtggctctccctggagaaggagatggaggacaacatctggacagtgaggaggaggaggcgcctcggcccacgccaaacatcccagaggacctggagagccgggaggccacggagccagaggcagaggccccagccccagggactgggggtgagtttgtgtgtggggagagctaccgggccctgaaggaggccatggtgaagctgaaagggagagagtccttcaccgtatatgaaagccagggggcagtgccaaacacgcggcaccaggagatggaggatgtcatcaggctggcccagaaggaggaggagatgaagcacccctcccttcaggtgaagctgctggagctgcaagagttggtgttgccccttgtgggcaaccatgaggggcatggcaaattcctcatcgctgcccagaaccctgctgatgagcccactccaggggccccagccccccaggaacttggggctgccggtgagcaggatgttttttatgaagtgagcctggacaacaacgtggagcctgcaccaggagcggccagggagggttctccccatgacaaccccactgtacagcagatcgtgcagctgtctcctgtcatgcaggacacctaggagcacccaggcttgcccagcaaaccctgcgtgccattcttctaccaggcagccgagaacagggagataaacatcatcatcttctaagagctggtcaagaaatttaaaacaacaacaacaacaaaaagttacggggttcatctcctacacaattcatttactccatttgaatgctagagccactcacatttatttgtgtttctaatttaccgtttaaatttatttgtaaaaagttaagggagagttggtctttccctgatgttctttctggcatcctttagcatttttatttttaatttgataattgtaggtcattagtatgcatatcgagtttgcccttaggtggtgggaattcaaacacacaaagacccactaatttgcacaaaactattctggctggtttggaacaggctgccatgcttttttaatgttattgcagcatgtatattcattccagaattcagataaaatgtgcttatgttctgctattacgtttgatcgaatcctaaccacagtgagctcttcattagctcaatatgtggtttgccctcaattgagcactgtttattactttgtaatatgccactgtgagtactgacatttagagttgtttaaaggccaagaactggaaacagccttttccctattttctgtgtattggggatgggagtaataacattttggggagctttttaaatctcacagaagaggaaagtggcctgctctggcaggtgtgtgcaggatagagtgtgtttcatttgttctggtgccaagaatgagcgctgtactatggtagttcccttaggatttgtatgtgctctgggctcatgaagatattgcatcatgagctgcagcagttgtaccctttcttgatgacctaaaaagggattatttctgaggaatgaaaggctcccatcattgactgtggatgtggaaaaccttttctagcttagagcatttatatctacaatacattttaaagtcagagttcatgttacctgttttaatcacgagtatatgtcccagtacacaaaagggcactggttggcattcttcttaaggtatttagtgaagatcataagaaatcctttaagagtttaaatgtccctggaagaggcatacaggctctagtcaagaatgaattcgagtgaaggaaagctgtgtgacacctggccttcctctatgttcatggagcttctttgaggctagaagattgattttatcatctagacctctctggctaatacctattcttcagccacattagttactctgacataggaatttacttcttttctttgaatggaaaacactttaaaaataataacaaccattattataaaccaatatatgtgagagtacttagttgaaacaaaaaggagttttagtagacagtattatactacacatgaaaatcaaggcgaagtttatgcaacttaaaatgtttacaagctgcagtgcaatctaatgtttgtgaatgtccaagtattatgagaaaaagtgtctatacaatgacagacttatgtttcctcacaaagttcttcacaaagagtgaaatatgtttttatacctctcagtttcagttagaggcatattttgtgccatatttatgttaatgtgcctatacgtgatgagtgaattatttcagtcatacattgcctaaatcataactttaagatgcttgggaaagaatcaacagctaaaagttcatgaagttctaatgtctgtgttccaaaatacgtcacagtattaggatgcagggagagatgtgtgtgcgctccctggggtgggcatttctagttactagaccatctccatttttagcatttggcatcctcatgatacttttatacatatgacattaataggagagcaataatacgattttacagatggaataacagatgtgcctgcattcagtgaaagagtgcaaatattaagtccttgtgacttcaactgactcttccaaattgtatgaatttatcaatgtattagataaactcagttccagaattataaagaaaaactgttagaccaacgaatgtggctaattaacagtaggacgatttctagcccgagggtttaaaatggacttcaagtcctgttcttgccttttattttctgaacttgccacttttgcattctttgagttcagtttaaagacagtttgagtccaatttagaccctcgggctagaaatcataccactgttaattagccaccttatttggtctaacagtttttctttataattctgaaactgggtttacctaatacattgataaattatttcaaaggtatttttatagttcaaatcacttcacttttaccctgataaatataaatgactaggaatgatcttcagctagcctttagcacctgcaaccaatctgacaataatgtgttcatcaggtacctgtggattaaatcacacaccggcatatttaagctgaatgtcagtctggaaaatgaatgtactatattaactgaaataccactctttgtgtaggtattctgtcatatatttaagaaaaattaaatagcatgtaaatcatatgacaacaacttaagtctttcttcaaagtgcatgtggtcctttgcaatacctcattcagccaagtatttgttctcttcctcattcagtttaaggcagctttcaatttgcttagaaggcaacattagaagggtagagtttaatcagaaacatagaattttaaagtgtgggttcaactgaataaatttgaatttctgtaggaagtaaagaattaaaaatctatttaaagattgcaatatataatcatttttaaagtatttgtttaacctgatgggttttccagaaatgaaaacaagtcagttctaaaaccaaagctgatatttagaaaatgtgaaaatataaatcagccctatccataatatagtttctctaaaactttatcttaaagagtcattttaaaagaatataactattcaaaaatgtaactgctatcttaatgttttgaaataagttaaaacactttaaaatatgaatactgtagtttgaaagaaagaaactgggggaaggaaaagtagagaaagaaatgccaattccaatgcaaggctttatttgccaagttttcttagaatgacttttaccagtttatgaattcttgtaaacagaatgtataatagaaatactgaaacactgttgcctaaagtggcattgttgactgctactgtgatgctactgtaatgtaataaattattaaattgttgcaaagtgctgtt

SEQ ID NO: 460978 - DNA, 666 bp, Homo sapiens
ggtgcatagacatgatttgtgattatttatgtctttttgatgaaatgactccttatcattatgaaatgacatttttcatcccagatctgcctcccagcatctctcgaatcagcccatgcctctccttcaccgttgccgctgcaccagttcaagccaccttgactcttgctgggaaaacacagcagcccctcacctggtcccacgtggctgagcatctcctccaattgacagctgaatctcatcaggctgccattccacccagatcccttctgtggggcccactacatgtagtaaattacagtgccagagaagatggcaagatgcagagaggaggagtcacgcctgaagccacacagctgacatcagagccaaagcatgagcctcagtctctctgacccagagctaccacccttgctgccttgggaagaaggaagccccctcctattctatccttgagctgccttggcaaggaggggccccttgctgccgccatcctcacaggacaccatccacatgaggggatgaatctcagttgcactcagttgttgcccccctcgaacctcccttgagcctcaggagaaaccaccctgattcagaggtccagagaagacctgactagcccaaggtaattccgtccccttgccagagtggcttgggcagggacac

SEQ ID NO: 460979 - DNA, 1065 bp, Homo sapiens
agtcacaggcctcatccagctcccatgcaaactgaagggccagtctcactcccaccatgccccaccctaacagccccaagtctgtttccaggcagaggacaagaggggcttgaaaacttgcccaaggctatccgtctcccagctgcgaaagaaaagggctttagttctccctctgcctgtgaagtctgcaggcctggtttgcaccctcctcttagttttgaccaggagacttctcactttgttataaattgtcatgaagttcaggagagaattttttctccctgtggagttttatcccctgctcctctggccaccctcctgaaggatccctgcagtgctaggcaggaatggggtgcttggggacccagcgagctcccagggtgtttctgctgcttcctctcccctgtatttctcttggctctctaatttgactcagttccagtgaataagtctcatgagatctgatggtttttataaaggggagtttccctgcacaagctcttttctcttgtctgtcaccatgtgagacatggctttcaccttccatcatgattgtgaggcctccccagccacatagaattgtgtcatgagagccacccttcccaaagtagcacttgtgagcagaggtgatcagagggctttctgaagagtgaggagtgacttcagagggccaaaaagaagaaaagggagtgagacagtcgttaagactcctaatcccggcttatttttactgcttctcaacacagcattgcaagtggctgatttgatggatgtggcacgtgaccaagttctggctaatgagatgtctgaaacttaaagtggaagagatgtatcatctccttttccttgctccatcctgctacctgaaaaatggatgtggtgacaagccctggaaaaccacaaggatgagaacagcactggagagatggtgcagcgcatgatgcaattgcctaggtatctgatggctgagtagaatttctctcctccgacttttacatgggaaggaaataaaactctattttgtttgaaactctgttattttaggtcaatgttttaagtagctgt

SEQ ID NO: 460980 - DNA, 1310 bp, Homo sapiens
gggagtggaaccttgaaggtgatgagaagtaagtttacgaaggaatgcacaaggagactggaacctactgaacgacctcttcagatcgtttatgattacttatccaggctgggatttgatgatcctgtgcgcatacaggaggaggctacaaatcctgacctcggctgtatgattcgattttatggtgaaaaaccatgccacatggatcgtttggatcgaatcctattgtctggcatctataatgtacgcaagggaaagacccagctgcataagtgggctgagcgcctagttgtcctctgtggtacctgccttatcgtttcctcagtgaaggattgtcaaactggaaagatgcacattttgcctctggttggtggaaagatagaagaagtgaagcgacggcaatactcccttgctttcagctcagcaggagcccaagctcagacctatcatgtcagcttcgagactttggccgagtaccagcgatggcaacggcaagcatccaaggtggtgtcccagcgaatcagtaccgtggatctctcgtgttacagcctcgaggaggttcctgagcatctcttctatagtcaagatattacctacctcaacttgcgacacaacttcatgcagttagaaagacccggaggcctcgatacactctacaaattttctcaactgaagggcctgaacttgtcccataataaacttgggttgtttcctatattgttatgcgagatctctaccctgactgagctcaacctttcctgtaatggatttcatgacctaccaagtcaaattggcaatctgctaaatcttcaaaccctctgtcttgatggcaactttctgactactttacctgaagaattgggaaatctacaacagctttcctccttgggaatttccttcaacaactttagtcaaattcctgaggtttatgagaaactcactatgttagatagagtggttatggcaggaaattgcctggaagtcctgaacttaggggtgctgaataggatgaaccatatcaagcatgtggatttaaggatgaaccatttgaaaaccatggttattgaaaatctggagggaaataaacacatcacccacgtggatctgcgggacaaccgactgactgacttggatcttagctccttatgcagcttggaacagctgcactgtgggcggaatcagctgagggagctaacactcagtggcttttcccttcggaccctctatgccagttccaacagtgagagcagtgaacgtctatccagtacccagcctgtcactttcttggatctctcccgaaactgctagag

SEQ ID NO: 460981 - DNA, 1366 bp, Homo sapiens
gggagtggaaccttgaaggtgatgagaagtaagtttacgaaggaatgcacaaggagactggaacctactgaacgacctcttcagatcgtttatgattacttatccaggctgggatttgatgatcctgtgcgcatacaggaggaggctacaaatcctgacctcggctgtatgattcgattttatggtgaaaaaccatgccacatggatcgtttggatcgaatcctattgtctggcatctataatgtacgcaagggaaagacccagctgcataagtgggctgagcgcctagttgtcctctgtggtacctgccttatcgtttcctcagtgaaggattgtcaaactggaaagatgcacattttgcctctggttggtggaaagatagaagaagtgaagcgacggcaatactcccttgctttcagctcagcaggagcccaagctcagacctatcatgtcagcttcgagactttggccgagtaccagcgatggcaacggcaagcatccaaggtggtgtcccagcgaatcagtaccgtggatctctcgtgttacagcctcgaggaggttcctgagcatctcttctatagtcaagatattacctacctcaacttgcgacacaacttcatgcagttagaaagacccggaggcctcgatacactctacaaattttctcaactgaagggcctgaacttgtcccataataaacttgggttgtttcctatattgttatgcgagatctctaccctgactgagctcaacctttcctgtaatggatttcatgacctaccaagtcaaattggcaatctgctaaatcttcaaaccctctgtcttgatggcaactttctgactactttacctgaagaattgggaaatctacaacagctttcctccttgggaatttccttcaacaactttagtcaaattcctgaggtttatgagaaactcactatgttagatagagtggttatggcaggaaattgcctggaagtcctgaacttaggggtgctgaataggatgaaccatatcaagcatgtggatttaaggtaaggttattctttaccacaccttcctttaaattgactctggtggacctttatgtcttctgtttatgaagatttgtttaaaacattagggtttttaaaattttgttgttgttttgagacaaggtctcactttgtcacccaagctggcatacagtggcacgatctcggcccactgcagtcttgacctcccgttctcaggcgattctcccacctcagcctcccgagtagttgggacttcaggtgcgcaccacgaggcctggctaatttttttctacttttagtagagatgaggtttcaccatgttgtgcaggcaggtctcgaactcctgg

SEQ ID NO: 460982 - DNA, 2127 bp, Homo sapiens
gacaccagtcctgttccaagtgtgctgtccaccggcaggcgagtcgaggcacgttctcacactgtggcagagccgagcgagcaagccccgtttgccagcacttttcagacctctgcttgtatcccacttgctgacatcacttggccaaagcaagttacatgactgacgctgggtcaaaaaaaaagaaggccctgcaaggggactcgtgatggacgtagattcagggagggaattttccatccactgcccctaccctgatctttggctgtcagttcccccttgcccgaaccgtattcagagccgacccaatctcccctccccactgtataagcccgtcgcagcagtccctgtagctatcctgatggtcctgaatagcctgtgggacaccaggatttgttgtaagacgctgtcctgcatcctctcccacccacctctgttggcagtgccctggagtcacgtgacaaccgaaagcgccccccacaaaggtctgaatgctccctgggtggcagtgcccactggcaagcccgtttgtgccctgctccgcactgggggcctggcagagaagaggggctggagcccagtggggtttaccagcatcttcaccaagcgctgtgcccaggaatgaggtgctgttcctggccgcacgtctgggggacgctgccttcgaatccactcacaggctccggatcaggctgccaatctgtaaatgatgttttaggtttttctttgttgttgttttggtgctgtgaagcctgccttgttaacaccaggtgctgaaagattaaaacttatcaatcaccatcatcaagaggaaccaggatatcacttagtggtgactgctttgtgtattactttggatagtaaaagtacctgatatggtttggctgtgtccacaccaaaatctcatcttgaattgtaactcccacaattcccacatgtcatgggaggaacccagtgggaggtgattgaatcatggaggcaggtctttcccatgctactcttgtgataatgactacatctcacgagatctgattatataagggggagttgccgggcacaagttctcttctcttgtctgctgccatgtgagacatacctttcaccttccgccatgattgtgaggcctctccagccacgtggaactcaggtttcagtccttgaggagcgctcactaggatggtaattgtttgatcgatagattaagtgagttggaagactctccaagtgaaaatttaaaattactgcagttttggcctgatgatgttaaccagcaagaacagaatctgaaaccagatgagctgttagtactgctttcatctgttttacagccacagcgacagcagttccctggcttctggaaggagtgtcggtctatccaaaaaatgtactaacagatatgtaaagtctgtcatccatttgcagcaaattttgcctacggtatgaaataggagttcaatttgacattgaatattgatatcttagcaatattatctcccaatctgtgaacacgaaatttctttatatttattcaaattatctttggtttttaatgatgttaaatccaagtattctttgtgatgctgttgtaaatggaattttttgtgttgttcattgctaatgtataaaaaccaatgatgtttgtatattaatcttgtatcctgcaacctcattgaactagtttattagctctagtaatatgttggtgtgaatcccttaatattttctacatacaagatcatgtcatctgcaaattgttttacttcttcctttccaatttggatgctttttatttcatcttgcctactgctttggctacaacctccagtacaagattgaatagaagtgatgagacagaacatccttgtcttatttgtgatctctgggggggaaggcttacagtattttgcatcaacatatcagctacgggtttttcatagatgtcctttctcaggatgaaaaagtccatgtttggctttttgaatgttttcatctaagagttttggattttgccaaatgttaaatgcttcttctgtatgcattgagatgatcttgttgtttttgtcctttattctaataatatggtgtactacattgatttctgtatgttgaagtttgtattcctaagat

SEQ ID NO: 460983 - DNA, 1277 bp, Homo sapiens
tatctctggaacagtccccaaacgtcttgccaagggcacaggttttcagctttaaaggccatttcaatttaagaaaacaaaagatgatcctgtgaacactgtatcaggcatcattactggactgaaaaaaggatcacttgatggacatgcctggcgttttgtttagaagtatttcttctctggccttagaagattagttttcaaagcgatggtaaaatcattgatgtatgtcttttcaagaaaaagaaaaaaaaaagactcctaaatgccaaacatttgctctttggagcatagcaagaagaaagggagaggaccagacggccacatcctaagaacagagtattgtccaggtagctgtcgccccaaatgggatctctttccaggtctttttgttaaagcttttctttcctaaataaaacttaattttctctcgctaatctttccagtgggtgtctgccgcttcctcatgccttgctataagaaagctcgtaaaaaggaagaaatctaaaactagaacaattctatattcacagtttctctgacattaaaaagtactcaagagaagagttttttttttaatttaaagaaacatctgtccaacatggatgattttgaagaagagcactcccctttgtccagagccatagaaagataatttaattacacttatcattacaccctccccaaattagactacaaatggatcttgatttctcatgattttttcactttacaaaataatcttaaagtttaggaggaagaaaagatgcttaagaataatcaagaatgcttggaaaagaggaagaaaaagggaaatttctcctactgaaccggtagtgctgggaagggaagagcgtggtccctttaatgacagggaagtggggcagggaagtgctgggtagagaaaggcgaggtctctgtctagggctccacccccagggacctagaagacacaagcagctggtagtggagagcacacggcggaatgacgcagagttttactggagcaggccgccaaaggacccgactccaggggaaaaccatctcccttcttgctcccccatagcgagcgacagagtgcgcgcgagccagaccgcgacaccttgcaaaattaacaccccaacaacacccacaccccaacatccccacaacctcacaacacacacaccccatcacaccacacccatacacccctcaccaataaccctcaaccaacacaatcataccacacaaccacaccaccaatacaccccccactacacaaccacttaaccata

SEQ ID NO: 460984 - DNA, 1181 bp, Homo sapiens
tatctctggaacagtccccaaacgtcttgccaagggcacaggttttcagctttaaaggccatttcaatttaagaaaacaaaagatgatcctgtgaacactgtatcaggcatcattactggactgaaaaaaggatcacttgatggacatgcctggcgttttgtttagaagtatttcttctctggccttagaagattagttttcaaagcgatggtaaaatcattgatgtatgtcttttcaagaaaaagaaaaaaaaaagactcctaaatgccaaacatttgctctttggagcatagcaagaagaaagggagaggaccagacggccacatcctaagaacagagtattgtccagtgggtgtctgccgcttcctcatgccttgctataagaaagctcgtaaaaaggaagaaatctaaaactagaacaattctatattcacagtttctctgacattaaaaagtactcaagagaagagttttttttttaatttaaagaaacatctgtccaacatggatgattttgaagaagagcactcccctttgtccagagccatagaaagataatttaattacacttatcattacaccctccccaaattagactacaaatggatcttgatttctcatgattttttcactttacaaaataatcttaaagtttaggaggaagaaaagatgcttaagaataatcaagaatgcttggaaaagaggaagaaaaagggaaatttctcctactgaaccggtagtgctgggaagggaagagcgtggtccctttaatgacagggaagtggggcagggaagtgctgggtagagaaaggcgaggtctctgtctagggctccacccccagggacctagaagacacaagcagctggtagtggagagcacacggcggaatgacgcagagttttactggagcaggccgccaaaggacccgactccaggggaaaaccatctcccttcttgctcccccatagcgagcgacagagtgcgcgcgagccagaccgcgacaccttgcaaaattaacaccccaacaacacccacaccccaacatccccacaacctcacaacacacacaccccatcacaccacacccatacacccctcaccaataaccctcaaccaacacaatcataccacacaaccacaccaccaatacaccccccactacacaaccacttaaccata

SEQ ID NO: 460985 - DNA, 1645 bp, Homo sapiens
gctaggattgtgccactgcaccccagcctgggcaacagagtgagaccctgtctctaaaaaaataattttttttaaagataattcttcaaaggagatccgctcttcctttcctacacccattccctttcctccctttcctgaacaatgctgtcttacagcctctaggggcaggcagagccaaagaggcctctgccgggtgtggggagtgagacgcagcaggccagagcatgtatcagagctccagcaggtgggggagggtgtccacacgagaaggtggcctggcttggcatggcagaacctgataggattaggaaggcatcagccacgggaaggagatggcgagagagataagaaactgcttccaccagctattggtcaaataagtacacatttgaaagataacagccaggtttctcagtgtcagagaaaaccgagacacagctcgggaaagggagaaaatgtgggtggggagacccttgtggtgtcgaattggaactggaggtataggagtagactcaggattttcagaaagtgtttagatagacatagaaattagtatgggtgtgtatatgtgtatgtgcacgcagatgtgtgtaaatgtccatatattccctagctctggaaagccctggagcagtgccatcccaataacaaaaagctttttatggttttttgagatagggtctctccctcacccaggctggggtgcagtggtgcgaccacagcccactgcagcctcgacttcctgggctcaggtgatcctcctgtgtcagcctcccaagtagctgggactacaggcatatgccaccacacccagctaatttttaattttttttttttgtagggacgggtcttgctacgttgcccaggatggtcctgaactcctgggctcaagcaatcctcccacctcagtctcccaaagtgctgggactacaggtgtaacagttttaaggtaatcagaatcaagaaatgattgaggtgatgctctggaataatggggactagagagtcgtgacaactaaatgcaatgtgtggtgtggtagcatttttctgggctgtagtccctagatgggtagagaagaaagccccggagagggtgaagaggtggggatgtggaagacgtcagagagagcacagggcagagcgcagagaactgcatccacaggcctcgccatgcccccagcatggctgcaccacaccagcagatgccttcgcttcccagcagtggacacaggtcactggatcctcacaaatgagcagccaggagaatgtttgcagcctggagattcggggctttgtcagcaccttgggaaggttttgttcttgggttttgggtttttggtttttggatttttttggtaacaatatcgctatatttattctcctgcagtacacttttaaattgcttcaacattttccccttaaaataaaaaagaacaacaacaaaaaaattccaaaccttagaattgaaatatttggccttttctctctctcttttttttttttttttttttttttgagatggaatctcgctctgtcgcctaggctggagagcagtggcgcgatctcagctcactgcaacttctacctcctgggatcaagcgattctcctgccttaccctcctgagtagctgggaccacaggc

SEQ ID NO: 460986 - DNA, 1314 bp, Homo sapiens
tcccttcacaggcctagggagtgatggggttaatcacacctagaacaacagctacctcttcccagaggaatgggaccagaaatcaggcaagcccctcccttcaaaagtcctctcagcacgtgagaactatcattatggatgatgctagggtggtgggggccccagaacagacctgtatgttgagttcaggggttgctttgttgcatttctgggcaggggcaagaggcccagggtttgtcatctgccccttcccctgccttatccccttcccttccaagttccccaggctccttttctgccagtctgtcaagagagggaagagtggcgaagagtcctttgtgcctggacattggggactgaacatggcccttttgcctgggcattgcccaaacatatatttctactggcataactttgtggagtcagtgatgaggtatggggttcttgacatcttcctcacccaggacccttcagagagtcctttttacactgcttactagtggcctttaagcctcagtttcctcacagttgccttgattaaaaaattttgtatcatgaaagggtaaatgaattaattagtgaatctggtttctaagccaatggcttactagaaatattatagtaatcagaatcaagaaatgattgaggtgatgctctggaataatggggactagagagtcgtgacaactaaatgcaatgtgtggtgtggtagcatttttctgggctgtagtccctagatgggtagagaagaaagccccggagagggtgaagaggtggggatgtggaagacgtcagagagagcacagggcagagcgcagagaactgcatccacaggcctcgccatgcccccagcatggctgcaccacaccagcagatgccttcgcttcccagcagtggacacaggtcactggatcctcacaaatgagcagccaggagaatgtttgcagcctggagattcggggctttgtcagcaccttgggaaggttttgttcttgggttttgggtttttggtttttggatttttttggtaacaatatcgctatatttattctcctgcagtacacttttaaattgcttcaacattttccccttaaaataaaaaagaacaacaacaaaaaaattccaaaccttagaattgaaatatttggccttttctctctctcttttttttttttttttttttttttgagatggaatctcgctctgtcgcctaggctggagagcagtggcgcgatctcagctcactgcaacttctacctcctgggatcaagcgattctcctgccttaccctcctgagtagctgggaccacaggc

SEQ ID NO: 460987 - DNA, 1032 bp, Homo sapiens
tggggtggggggagcgcggtggtgatcaatgggcctagtccagaagactctgtctgtatgtcccatagggaggtcacaaagaagtccttattgagggcagatatctggactcaccacattcagtaactgggagagagctgagaactggaaatttggttggcagagattcagacagagtatccatcttgacaagtcctttcagaaacagtagcagggagaaagtggatatagagaatcatgcactaagcttcgaaagtttataagcaaaagtgccatgggtttcttctactcagactccaatgtccaggggctttatgatagctgacaagaagcactttgtactcaactcctccactagaagcaccaaaattatgaatagattatcacacctcaaatcgatgaaacaagagaaaatggaaattcaatggaaaagtgacagacaataattaaagcaaaggagaaggaagcaaggcagcttgcaaggccagcagtggctgagagctgagagatactccccagtatggagaaagagtaagcgaaataccctcagaggtttacgtttgcatcatgtactctggcaatcctagccataggaaagacccttaacccttggaggaccctgaaactaacataaagagctagaaggaaattgtgtgaaggcactgcaccaatgaggaaggtagcactgagtcccacacattctctgagaccacagcagctacagcaaggcaccattttagagccccgtcttcaacagactgctcactgtgctagagtccaacatcactggcgctgaggcacaagagacgtgacagctgctgccaccaggccttaggtgcaagcaaccatggttgaccacacctgagactgagcagcaagcaaggctccccaataactgcacttcacctgtaaagacatataaagtctgaaaataaaggaatgacaaaagatatttcacgtaaatgcaagctagcaggactagctctagttagagtagataaaacagactccaagttaaaagcagttaagaaa

SEQ ID NO: 460988 - DNA, 1760 bp, Homo sapiens
tggggtggggggagcgcggtggtgatcaatgggcctagtccagaagactctgtctgtatgtcccatagggaggtcacaaagaagtccttattgagggcagatatctggactcaccacattcagtaactgggagagagctgagaactggaaatttgaggtggagttttcccatgttgcccatgctggtctggaactcctgagcacaggtgatccacccgcttctgcctcccaaagtgctggaattacaggcatgagtgactgcgcctgacccatttccttgtttctcttttctttgtttttcccacctcccgtagaaacaactgaagaacagcagaatacaactattcgttccctagggcgcctaaatttcccagtgttcctttagaatctgatgagatgaggtttagatctgatgaccatcaaaagtgcacggtgcaagctgtcagtgcatctaccattctggggtctggaggatgatgaccctcttctcacagcttcagtaaccagtgccccagtggaagttcccaaacttcaattactgacttctgtgcacctgcaggcccaaaaccacatgcaagccaccaaggcttggggcttgcaccctctgaagcaatggcctgatctgtacattagcccatttttgccatggctggcatgcagggaaccagatctcatgagacttatgcactatcatgagaacagcacaggaaaatccacccccattattcaattacctctgaccaggtccctcctacaacacatggagattatgcgagttacaattccagatgagattttgatgaggagacagccaaacagtatcaaaaggtttgtcgaagatcagatagttgcagatgtgcggttttatttctgggttctctattctgttccactggtctatgtgtctgtttttaacttccaatactatgttgaatatgagtggtgagagtgggcatccttgtcttgtgttggttttaaagggaatgatttcagcttttgcccattcagtactataccattaaatgacactaaagtatttcatttttttgtgtttagactttatataaatagctacttacaagccttgtggatttgcaatagtatttacaaagccgccattctgaaatagctaatctaacccatttgaattggaaatgtttcctaaaacaccaaaagcatacattgggtcatttgtgaaatctgctgatatatgtttttcattttaacatgcatatctaaatttctcaatgaatatacaattaatgttgctaacttttatgttgtgaagtgtagtatagtttctcaaataaaatattatgagtacaactaacaagatgtcatcaaagtttttatccaagattttatttaattttacgaaaatgaagattttatttaattttacaaaaaacaaatcctaacgggcttcttgagaacctggaaggttagaaaaagcctattttttgccattggatatagtaattggacaatgtatttaaaaagtagaaatatattacttttttactatggaaaaataaataaatttgattctgtttctagatctatgtcaaaatggattctaggaatgaccttgctgattaaaataatttaaaagttaggtagttttaaaatcttattcaatataaaaaagaaagtattttcacttgttacaaataaagtgacagcactaatcctgaaggtaactgtattttactctgtttctgccaagtcattgagacattgacaacacctataaatttttc

SEQ ID NO: 460989 - DNA, 2218 bp, Homo sapiens
  misc_feature (1146)..(1146): n is a, c, g, or t
gcgctgctggtcctcgccaccgtgctgtgcaacctcggcgccatgcgcaacctctatgcgatgcaccggcggctgcagcggcacccgcgctcctgcaccagggactgtgccgagccgcgcgcggacgggagggaagcgtcccctcagcccctggaggagctggatcacctcctgctgctggcgctgatgaccgtgctcttcactatgtgttctctgcccgtaatttatcgcgcttactatggagcatttaaggatgtcaaggagaaaaacaggacctctgaagaagcagaagacctccgagccttgcgatttctatctgtgatttcaattgtggacccttggatttttatcattttcagatctccagtatttcggatattttttcacaagattttcattagacctcttaggtacaggagccggtgcagcaattccactaacatggaatccagtctgtgacagtgtttttcactctgtggtaagctgaggaatatgtcacattttcagtcaaagaaccatgattaaaaaaaaaaagacaacttacaatttaaatccttaaaagttacctcccataacaaaagcatgtatatgtattttcaaaagtatttgatatcttaacaatgtgttaccattctatagtcatgaaccccttcagtgcattttcatttttttattaacagcaactaaaattttatatattgtaaccagtgttaaaagtcttaaaaaacaatggtattaattgtccctacatttgtgcttggtggccctattttttttttttagagaggccttgagacatacaggtcttttaaaatacagtagaaacaccactgtttacgattatacgatggacattcataaaaagcataatttcttaccctattcattttttggtgaaacctgattcattgattttatatcattgccgatgtttagttcatttctttgccaattgatctaagcatagcctgaattatgatgttcctcagagaagtgaggtgggaaatatgaccaggtcaggcagttggaggggcttccccagccaccatcggggagtacttgctgcctcaggtggagacctgaagctgtaactagatgcagagcaagatatgactatagcccacaacccaaagaagcaaaaattcntttttatcttttgaaatccagtttcttttgtattgagtcaagggtgtcagtaggaatcaaaagttgggggtgggttgcaaaatgttctttcagtttttagaacctccattttataaaagaattatcctatcaatggattctttagtggaaggatttatgcttctttgaaaaccagtgtgtgactcactgtagagccatgtttactgtttgactgtgtggcacaggggggcatttggcacagcaaaaagcccacccaggacttagcctcagttgacgatagtaacaatggccttaacatctaccttaacagctacctattacagccgtattctgctgtccgtggagacggtaagatcttaggttccaagattttacttcaaattacaccttcaaaactggagcagcatatagccgaaaaggagcacaactgagcactttaatagtaatttaaaagttttcaagggtcagcaatatgatgactgaaagggaaaagtggaggaaacgcagctgcaactgaagcggagactctaaacccagcttgcaggtaagagctttcacctttggtaaaagaacagctggggaggttcaaggggtttcagcatctctggagttcctttgtatctgacaatctcaggactccaaggtgcaaagcctgctgcatttgcgtgatctcaagacctccagccagaagtcccttccaaatataagagtactcatgtttatttatttccaactgagcagcaacctcctttgtttcacttatgttttttccagtatctgagataatataaagctgggtaattttttatgtaattttttggtatagcaaaactgtgaaaaagccaaattaggcatacaaggagtatgatttaacagtatgacatgatgaaaaaaatacagttgtttttgaaatttaacttttgtttgtaccttcaatgtgtaagtacatgcatgttttattgtcagaggaagaacatgttttttgtattctttttttggagaggtgtgttaggataattgtccagttaatttgaaaaggccccagatgaatcaataaatataattttatagt

SEQ ID NO: 460990 - DNA, 881 bp, Homo sapiens
caggtcttttttctatatcctttccaccactatttgtagaaaaatgctacatcgccacatgcttatatttcgactgcctaacttacagatgttagatggaagtcctgtgaattcagatgatagggcaaaagctgaatttcacctcgctgaactacaagcaaagaaaaactcggtaataattatattatttacaattttccttttgaagcacattaatggtgaagcagcaagtgctgatgtagaagctgctgcaagttatccagaagatctagctaggatcattgatgaaagtcgctacactaaaaaagagattttcaatgtagatgcaacagccttatatcagaagaagatgccatctaggaccttcatagctagagaggagaagtcaatgactggcttcaaagcttcaaaggacaacaaaaaaaacaagaatgctgggattctgacaaataatcctcggagcatccatgcagaaatagcttttcggcaactcagagggataagtatctctccatctcttttatcacatcagaatattgcatctcctactgcacaaatataccagagcaaccaagataagagaagaatttttgggagcaactttccaagatcaaatcgaatgtaactgcctaaagagaaatgagcatacaccaagaaactcacctgtttagtagttgtacaaaaactagcggacagtggtcagttaaaaaaaaaaaaaaaagataatcatgttacttaagttactgaagcacttcagttccatatgaagataatctattacccttcatgaacttgatttaatatcacctctcttaaactttctttatggttatctttagttatttgtttgaatttctatatcataaaaatcatcaactatt

SEQ ID NO: 460991 - DNA, 1057 bp, Homo sapiens
ttcaggatgtctctgaagtctctcttcagccaggaggcttttcctattgaagcactctggggcacattgatttctcctatgttttaacttcaaacatggcatcatctgaaacctatattttgattatgggtttgtctgcaaggtttttttcaaattggcacaaatttccaaaaaggtttctgaaatatttattgaaaaaaaatccacatatcattggagccacaccaatcaaacctgtgttgttcaagggtcaactgtattctctaaagtctcaattcatgaactcaatgctttcatttgcagtagtttatctactttgtaaaatatatctttttgaggaaataaacatgtatacttaaattcatctcaccaatatggcgcacctgcaagtgttgttatgtatacttacgttgccaacaattttatccactgaattacttaccatcaatattggatttctatcatatccttttagggtctttttccttctgatagaagtacaccttttctatggtttgaatgtatgtgttctccaaaattcatatgtcgaaaccaaggtgatggtatcagaaggacctattcatactctaattaccgagagcgatgggtacttcaatcgacagcaagccagcttgcctacagaaccatctctctcgggcaccagtctgcatgcaggatggctggggcaagcaggtatgaaacaggtgagagcaaagttgagattcaatggaagaatccaaggtgtcaagtccataggggcatatgtgttgagtggcaagaaaccaaccaacatcaaaggctttgcaatggcaggctggcaggaaaaagctagtatgttcagttggcagaacatcaagaggcttctataaacaacagtagaaacagagacagagcttatggttgctttgattttgggaaggtaactgttatagcctgcattatctccagcctgaatcatttctcctttttatgatacttgagtagaaatgtctttcaaacttttttcttaaaattcttgcatcttatctattaaaacttcccaccttcaactttcttc

SEQ ID NO: 460992 - DNA, 2838 bp, Homo sapiens
agagcctccatctcactccctcctgatgaaggctagtaggctgcaagagccaccagcatgggccacacctgccccaagggcatgtttctagccccagctaaggtcccgatagcacgatacaaccgcaccagctacttctaccccacattctcagagagctcggagcacagccatctgctcgtgtcccccgtgctggtggcgagtgccgtcataggtgtggtcatcatcctctcctgcatcaccatcattgtgggcagcatccgcagggacaggcaggcccggcttcagcggcaccgccaccgccaccaccgccaccaccaccaccatcatcaccaccgccggcgtcgacaccgagagtacgagcacggctacgtgtcggacgagcacacatacagccgctcaagccgcaggatgcgctatgcctgcagctcctcagaggactggcccccacccttggacatcagctctgacggggacgtggatgccacggtgctcagggagctgtacccagattctccaccaggctacgaggagtgtgtggggccaggggccactcagctgtatgtccccacggacgcaccaccaccctactcgctgactgattcctgccccacgctggatggcacctccgactcaggcagcggccacagccctggccgacaccagcaggagcagaggaccccggcccaaggtggccttcacacggtctccatggacacccttcccccctacgaggctgtgtgcggggctggccccccatcaggcctgctgccactgccgggcccagacccagggccaaggggctcccagggctcacccaccccaacccgggccccagcctctggcccagagaggattgtgtgagggacccagccagccgggtcctgctggtccctacaggctgaaccacattctttaggcacacaaaggcgtgcacacacacacagagatgcacacgtgactcataacacacacatagaccaaacttgtatacacacagacatctacactgacataccccatgtacacacacagatctagacgtgctccacatatgtgtgaatatgcgcacatacaggcctaccacaaacacaaaacccacctgcaaaggtttcacggaacgtggagctctcctggcctcccgtccctcctcccggcctgtttgttgtgcctctgtagagagcgcttcggagagagaggcgaagtaggaagtgggattttctcttccctctcctgggcccgtttgcccctaccctcgcccagcaagctgcgcccaaattctattctgcctctggaaactgctggaccatccaaggtcagctgcctgccctgacccctaccccagggccagcttgtcctcctgggaggcgggacaggccccagtgaggttccgttgtgcgctgtgcctatctctcgattccagggcagatgagccacaacatcaccaccctgccacttacaaggtgggggacctgggtctggggtctcaggcgcaaactggaggccctcacagcccactaggccccctcccaaccccagtaccctcagtccctcagtcaggtggtgctagtagagctatctctgacgctgcaggccccaggtagatgggcagggccctccgtgggtgtgcagcggcggttccctcatcagtccagccactgcccaggactaagggtcttcaaggaagatgaggccattgcccttctccaggtggcttcaccacagtgctgcctgggcacctctctgaggcagagaagtggcccctccctcagtccctgcctggccgaccactgtggcctgcacgcgaatgggtcagagccagaccccggagctggtgctgtccttctaggtggctgctcatagctggggatggtgagtggctgtgttctggccttgcccacgtgggtgtttgcagagacaaaatgaaggggatatgctccccataaataccaccttgccaccacaagaggaccagaaggctactcagccttgctgccacagaaggggatttgtagggtcagcctggctgcagaaaggctggctcagatcttgaccaagaaaccccagcgatttccatcaaagaccacgcaggtaacagaggtgattcctgaagacccagcccacagagggtggcagccaagcatctctgagcagtgtccctgctagcatcgccagcggccatcactctgcctccctcccacctcttgtccctcgtcgttaaaaaacagcaccctatcctgcttccccacatttctgttcctccaatgaagggctaagactatttagtaatctctttcttaagcagaggagtggcaaggatggcaatcttgaattttattttctgtagagatagcatttcttctggtgcggagctgaaaggaatccacccagaagttctgtagcatcctgcgtgcagcctcctggagccccagactccatctgggggagggacttgtttacaagcagttctgaccaccttagtggtgtactgttttctaggcaaaaaatatctgtctgttgtactgtatagcctttaaaatgcagtccaggaatgagactcttttaagaaacacatcctgcttctgcaattccagagagtgctgggggaaaaaaagggataaaaattcctacctactcatcagtgtttgaaagatggagctgaatagcttttcttgttcctggactaggcaatgaataagcaacaatgtatcttttctgtgttcaaaataaatacataatatcaataaaatgtagcaagaagtaacactttcagagagtgcataaggttcctttttttcttttctttttttcttcagacagggtctcactcagtcgcct

SEQ ID NO: 460993 - DNA, 2771 bp, Homo sapiens
agagcctccatctcactccctcctgatgaaggctagtaggctgcaagagccaccagcatgggccacacctgccccaagggcatgtttctagccccagctaaggtcccgatagcacgatacaaccgcaccagctacttctaccccacattctcagagagctcggagcacagccatctgctcgtgtcccccgtgctggtggcgagtgccgtcataggtgtggtcatcatcctctcctgcatcaccatcattgtgggcagcatccgcagggacaggcaggcccggcttcagcggcaccgccaccgccaccaccgccaccaccaccaccatcatcaccaccgccggcgtcgacaccgagagtacgagcacggctacgtgtcggacgagcacacatacagccgctcaagccgcaggatgcgctatgcctgcagctcctcagaggactggcccccacccttggacatcagctctgacggggacgtggatgccacggtgctcagggagctgtacccagattctccaccaggctacgaggagtgtgtggggccaggggccactcagctgtatgtccccacggacgcaccaccaccctactcgctgactgattcctgccccacgctggatggcacctccgactcaggcagcggccacagccctggccgacaccagcaggagcagaggaccccggcccaaggtggccttcacacggtctccatggacacccttcccccctacgaggctgtgtgcggggctggccccccatcaggcctgctgccactgccgggcccagacccagggccaaggggctcccagggctcacccaccccaacccgggccccagcctctggcccagagaggattgtgtgagggacccagccagccgggtcctgctggtccctacaggctgaaccacattctttaggcacacaaaggcgtgcacacacacacagagatgcacacgtgactcataacacacacatagaccaaacttgtatacacacagacatctacactgacataccccatgtacacacacagatctagacgtgctccacatatgtgtgaatatgcgcacatacaggcctaccacaaacacaaaacccacctgcaaaggtttcacggaacgtggagctctcctggcctcccgtccctcctcccggcctgtttgttgtgcctctgtagagagcgcttcggagagagaggcgaagtaggaagtgggattttctcttccctctcctgggcccgtttgcccctaccctcgcccagcaagctgcgcccaaattctattctgcctctggaaactgctggaccatccaaggtcagctgcctgccctgacccctaccccagggccagcttgtcctcctgggaggcgggacaggccccagtgaggttccgttgtgcgctgtgcctatctctcgattccagggcagatgagccacaacatcaccaccctgccacttacaaggtgggggacctgggtctggggtctcaggcgcaaactggaggccctcacagcccactaggccccctcccaaccccagtaccctcagtccctcagtcaggtggtgctagtagagctatctctgacgctgcaggccccaggtagatgggcagggccctccgtgggtgtgcagcggcggttccctcatcagtccagccactgcccaggactaagggtcttcaaggaagatgaggccattgcccttctccaggtggcttcaccacagtgctgcctgggcacctctctgaggcagagaagtggcccctccctcagtccctgcctggccgaccactgtggcctgcacgcgaatgggtcagagccagaccccggagctggtgctgtccttctaggtggctgctcatagctggggatggtgagtggctgtgttctggccttgcccacgtgggtgtttgcagagacaaaatgaaggggatatgctccccataaataccaccttgccaccacaagaggaccagaaggctactcagccttgctgccacagaaggggatttgtagggtcagcctggctgcagaaaggctggctcagatcttgaccaagaaaccccagcgatttccatcaaagaccacgcaggtaacagaggtgattcctgaagacccagcccacagagggtggcagccaagcatctctgagcagtgtccctgctagcatcgccagcggccatcactctgcctccctcccacctcttgtccctcgtcgttaaaaaacagcaccctatcctgcttccccacatttctgttcctccaatgaagggctaagactatttagtaatctctttcttaagcagaggagtggcaaggatggcaatcttgaattttattttctgtagagatagcatttcttctggtgcggagctgaaaggaatccacccagaagttctgtagcatcctgcgtgcagcctcctggagccccagactccatctgggggagggacttgtttacaagcagttctgaccaccttagtggtgtactgttttctaggcaaaaaatatctgtctgttgtactgtatagcctttaaaatgcagtccaggaatgagactcttttaagaaacacatcctgcttctgcaattccagagagtgctgggggaaaaaaagggataaaaattcctacctactcatcagtgtttgaaagatggagctgaatagcttttcttgttcctggactaggcaatgaataagcaacaatgtatcttttctgtgttcaaaataaatacataatatcaataaaatgtagcaagaagtaacactttc

SEQ ID NO: 460994 - DNA, 835 bp, Homo sapiens
acatgctcccaccccacccccaagtacccgcagtgcctggcaaagcatctggctcttaacagatgttcaagcaaaaacctgtgccttccaggcccctggtgctttctgccctcagacccccagcctgccctcactggcccttgctctttcatagcacactccacacccactcacctccaggcctttgcccggagcctttgctggggcctccccccaggacaggggagccttggagcagggctggccccctcactgtgctgagctcacacagggtccatgggacatacacctcggcaagtagaggccacgtcaatgcggccagctcagctgtcaggcaacttttattcctctcagacaggagctggccagtctcacctcccacttatgtggagctgagtgagcttcgaagtccactgactactgtcctccctctggcccacaacgtaaaggtggtgagcatccccagctaagaccctgcaggaaaggggagaccacccccaccccacaggagagctcactggcttcagtgagttccagtccctgctctgccaccaaccaattgaatggccttgagcaagtcactcaacccacacaatcttcatgggaataactgcagagtgcctttcgaagcatcctacagggagaatgtctggaaatggtttagcataaaaccaggcataggggaataataatagccaacacttactggcgctcatcacaggctggacacttctctctgtattttccattcgttaccttggatagtcctcgcaaatgcttctgtggttggctctaatgctcccatccctgctttgcagatgaggaaactgagacg

SEQ ID NO: 460995 - DNA, 582 bp, Homo sapiens
cctaacaggctgagcgttatcaatcagacgaattcctgggaactgcggatatagctcgccacagtatcttatcagttaactgcattcttggatgtgctgggagtcagcttgcacaagttaagtccttgaggaaggggctgccagggaaagagccaagatggagtctgtctggctctctcagctaagggagagtccattcaggtggaaatgaggctaggtgagtaaaggaaaggggagaccacccccaccccacaggagagctcactggcttcagtgagttccagtccctgctctgccaccaaccaattgaatggccttgagcaagtcactcaacccacacaatcttcatgggaataactgcagagtgcctttcgaagcatcctacagggagaatgtctggaaatggtttagcataaaaccaggcataggggaataataatagccaacacttactggcgctcatcacaggctggacacttctctctgtattttccattcgttaccttggatagtcctcgcaaatgcttctgtggttggctctaatgctcccatccctgctttgcagatgaggaaactgagacg

SEQ ID NO: 460996 - DNA, 988 bp, Homo sapiens
gcaacattgtcgatgcagcagattatttttaatgtacagattttaaaacaatgttctcgagtaatgagagataataaatcgtgtgcttttttcatgggaaagttaaatgtttgttttgaaggcacagtaatagcaggctattcagtgtttgtgattatgtgtgtcattgatatggctgtagctagtgcactacaatttcctaaaaagtcttctcaccctcataggactgctctacatctggcctctgccaatggaaattcagaagtagtaaaactcctgctggacagacgatgtcaacttaatatccttgacaacaaaaagaggacagctctgacaaaggccgtacaatgccgggaagatgaatgtgcgttaatgttgctggaacatggcactgatccgaatattccagatgagtatggaaataccgctctacactatgctatctacaatgaagataaattaatggccaaagcactgctcttatacggtgctgatatcgaatcaaaaaacaagattgagtctcactctgtttcccaggctggagtgcagtggtgtgatcacagctcactgcaacctcgacctcccgaagctcagatggtcctccaacctcaacctcagttgtttttttctttctttctttttatttttatttttatttttatttttttttagtagagatgaggtttttgccatgtttctcaggctggtcttgaactcctgggctcaagcaattcatccccctcagcctcccaaagtgctaggattacaggtgtgagccaccattcctggcctagtctgacttttatctctgtggttgagacattaaaatgaatattattggtagtatctatcaggttacagaataatatattttcctttctaccatcagttattcactgccattcagaaggtctttagtagtttgctgtgagcagtctttcaataagtagaggatggccctctcaggattttgtgtctctttgttcag

SEQ ID NO: 460997 - DNA, 2345 bp, Homo sapiens
aggattgaagagagctcgagccttgctctggattaggctttggcttaagagaacttcgtgtatgttcgttctggtgcccatgctgaaaggatggcagctatggagcagaaactctttacatggcaaacaaaaggtaaagcccaaccatccaagcatatttcaagtctttgcttgtgccatttctgctgacatcccattggccaaagcaacgcacaagaccaacctccaagttaaaggtggtaaagcacatttggtcagcagtggaataacttccaattacaaagcaaagggcatggatataaggagaggtgaagaattagtggtgtcttctttaaagaatagagtgaatgttggtggccaaaagaatgagagttatgatcaactcagtataccactggaggctacaggagcaaacagcaaactgtttctcatgaaagcaggatgttcaaagcaggatgttggcaaaatgacaaactgcatctgccacccagaaggaatgctgagggcagtcatgccccaagtgcagtgtttttgtgattaggcacaactgaagcttgttagcaataatatgaccctgtgattaattgagcggctgaccaatcattacctcctcctccctgctctttctacccaataaatacaaagggctgtggaagctcaatgggctgcctttgctcattagaagcagggagctctcttcttcttcccctggatccttcctttaaaatagtttcttttgtcttaagttttcatttctacgtttgtcccttcattcagtctcttaaatgacggtctcaagcagtaacagtagtaattgctgtaatgacggtctcaagtagtaaccagggcactctgccacaagtggcacctgaacagggactaacagggactatcaagaacaaacggagacctgaagagacctgaagggaactgaagaggtctgcagggacaaatagagataagtagggataaatagagataaatagagacaaatagagataggtaaggaatgacagggacttgcaggaagtaacagggaccatagggacagatagggatagataaagactagcaaagactagccgagattagcaaagaccagcaaggactagcagagactagcaaagactagcagaaacttgcagggacaggcagagacagatagggacagatagggtcctacagggacttgaacgaggaagatctgctggaaaagaaaagaactacaaccaaccagatgaacaagaaaccctgttacaagtctgctggcagcaacataaggaaatgaacaaaaagtgtgggtgcccccaaggtgtgtactaccatggaatgggagattggagggacacatggatcccaaccgtgggcctggttcccccagtatgagctgaatacgaagacagaacaaaccaccaaccggcaattgaagtgacacaaagtgaaccgggttctataaattaccatggaaagtggtgagccaacgatttggcagaacaaaaccctgaggatatgcaaacaaaagggactatggaatttgcaattgcagattaaaattgaagaagaaaacatttgagttgcaaataccgtattaaaagtggacactgcttatgactgctgtatgcaacagtttttcaggcccgaggtgataaataaaaaattgtttgctctatttaaccattgaatgcttggactacttttgtatccttaagatgtgaagtgttcttcactagaagtaaacattaaggtcatttaccattgattgcttaaggctagtaaatacgtttaaggagttttaaagctttactttgggagaagtcaggaccagacagcttaataaagccactctgtgtgggaccatgactaagttttgttgtgtttacagacattttgtcacagaatcaaagttaacttttttttttaattctctttgccacagaggaacccagacatgctctatttgcaaaccgactgcatgaaacaaaaagcacggtaattctgaagctgttggcttggatgaaatgagaatgtaattaaaaagaaaaaggttagcaaaagaacatgctgggaattgaaaataaaaatctgaaatgatgtcccagcctgcccttaaggtcttttccaccatgtagagagctacctcaaatgctctacttgtcccagagtctatgttctttcactactattgcctatatctgtgttttctgctttcaataatctattgaaataatcaaaattaattacattcagcattttttctgtattactctgattctaataattacctcaaatttatttgtgcatttctatactagaaagaaaaaataatttttagagttttactatat

SEQ ID NO: 460998 - DNA, 1146 bp, Homo sapiens
ggtatgcttgtttttgcaggaaatgaacaaaaagtgtgggtgcccccaaggtgtgtactaccatggaatgggagattggagggacacatggatcccaaccgtgggcctggttcccccagtatgagctgaatacgaagacagaacaaaccaccaaccggcaattgaaggaaatgatagctccttacaaatacagaggacaaaataaaagtgacttaattataaaaacacagtgacacaaagtgaaccgggttctataaattaccatggaaagtggtgagccaacgatttggcagaacaaaaccctgaggatatgcaaacaaaagggactatggaatttgcaattgcagattaaaattgaagaagaaaacatttgagttgcaaataccgtattaaaagtggacactgcttatgactgctgtatgcaacagtttttcaggcccgaggtgataaataaaaaattgtttgctctatttaaccattgaatgcttggactacttttgtatccttaagatgtgaagtgttcttcactagaagtaaacattaaggtcatttaccattgattgcttaaggctagtaaatacgtttaaggagttttaaagctttactttgggagaagtcaggaccagacagcttaataaagccactctgtgtgggaccatgactaagttttgttgtgtttacagacattttgtcacagaatcaaagttaacttttttttttaattctctttgccacagaggaacccagacatgctctatttgcaaaccgactgcatgaaacaaaaagcacggtaattctgaagctgttggcttggatgaaatgagaatgtaattaaaaagaaaaaggttagcaaaagaacatgctgggaattgaaaataaaaatctgaaatgatgtcccagcctgcccttaaggtcttttccaccatgtagagagctacctcaaatgctctacttgtcccagagtctatgttctttcactactattgcctatatctgtgttttctgctttcaataatctattgaaataatcaaaattaattacattcagcattttttctgtattactctgattctaataattacctcaaatttatttgtgcatttctatactagaaagaaaaaataatttttagagttttactatat

SEQ ID NO: 460999 - DNA, 2252 bp, Homo sapiens
aggattgaagagagctcgagccttgctctggattaggctttggcttaagagaacttcgtgtatgttcgttctggtgcccatgctgaaaggatggcagctatggagcagaaactctttacatggcaaacaaaaggtaaagcccaaccatccaagcatatttcaagtctttgcttgtgccatttctgctgacatcccattggccaaagcaacgcacaagaccaacctccaagttaaaggtggtaaagcacatttggtcagcagtggaataacttccaattacaaagcaaagggcatggatataaggagaggtgaagaattagtggtgtcttctttaaagaatagagtgaatgttggtggccaaaagaatgagagttatgatcaactcagtataccactggaggctacaggagcaaacagcaaactgtttctcatgaaagcaggatgttcaaagcaggatgttggcaaaatgacaaactgcatctgccacccagaaggaatgctgagggcagtcatgccccaagtgcagtgtttttgtgattaggcacaactgaagcttgttagcaataatatgaccctgtgattaattgagcggctgaccaatcattacctcctcctccctgctctttctacccaataaatacaaagggctgtggaagctcaatgggctgcctttgctcattagaagcagggagctctcttcttcttcccctggatccttcctttaaaatagtttcttttgtcttaagttttcatttctacgtttgtcccttcattcagtctcttaaatgacggtctcaagcagtaacagtagtaattgctgtaatgacggtctcaagtagtaaccagggcactctgccacaagtggcacctgaacagggactaacagggactatcaagaacaaacggagacctgaagagacctgaagggaactgaagaggtctgcagggacaaatagagataagtagggataaatagagataaatagagacaaatagagataggtaaggaatgacagggacttgcaggaagtaacagggaccatagggacagatagggatagataaagactagcaaagactagccgagattagcaaagaccagcaaggactagcagagactagcaaagactagcagaaacttgcagggacaggcagagacagatagggacagatagggtcctacagggacttgaacgaggaagatctgctggaaaagaaaagaactacaaccaaccagatgaacaagaaaccctgttacaagtctgctggcagcaacataaggatgatgcccattctatttcctaggaagggataagttttaaggccttataaaaagtgacacaaagtgaaccgggttctataaattaccatggaaagtggtgagccaacgatttggcagaacaaaaccctgaggatatgcaaacaaaagggactatggaatttgcaattgcagattaaaattgaagaagaaaacatttgagttgcaaataccgtattaaaagtggacactgcttatgactgctgtatgcaacagtttttcaggcccgaggtgataaataaaaaattgtttgctctatttaaccattgaatgcttggactacttttgtatccttaagatgtgaagtgttcttcactagaagtaaacattaaggtcatttaccattgattgcttaaggctagtaaatacgtttaaggagttttaaagctttactttgggagaagtcaggaccagacagcttaataaagccactctgtgtgggaccatgactaagttttgttgtgtttacagacattttgtcacagaatcaaagttaacttttttttttaattctctttgccacagaggaacccagacatgctctatttgcaaaccgactgcatgaaacaaaaagcacggtaattctgaagctgttggcttggatgaaatgagaatgtaattaaaaagaaaaaggttagcaaaagaacatgctgggaattgaaaataaaaatctgaaatgatgtcccagcctgcccttaaggtcttttccaccatgtagagagctacctcaaatgctctacttgtcccagagtctatgttctttcactactattgcctatatctgtgttttctgctttcaataatctattgaaataatcaaaattaattacattcagcattttttctgtattactctgattctaataattacctcaaatttatttgtgcatttctatactagaaagaaaaaataatttttagagttttactatat

SEQ ID NO: 461000 - DNA, 2197 bp, Homo sapiens
aggattgaagagagctcgagccttgctctggattaggctttggcttaagagaacttcgtgtatgttcgttctggtgcccatgctgaaaggatggcagctatggagcagaaactctttacatggcaaacaaaaggtaaagcccaaccatccaagcatatttcaagtctttgcttgtgccatttctgctgacatcccattggccaaagcaacgcacaagaccaacctccaagttaaaggtggtaaagcacatttggtcagcagtggaataacttccaattacaaagcaaagggcatggatataaggagaggtgaagaattagtggtgtcttctttaaagaatagagtgaatgttggtggccaaaagaatgagagttatgatcaactcagtataccactggaggctacaggagcaaacagcaaactgtttctcatgaaagcaggatgttcaaagcaggatgttggcaaaatgacaaactgcatctgccacccagaaggaatgctgagggcagtcatgccccaagtgcagtgtttttgtgattaggcacaactgaagcttgttagcaataatatgaccctgtgattaattgagcggctgaccaatcattacctcctcctccctgctctttctacccaataaatacaaagggctgtggaagctcaatgggctgcctttgctcattagaagcagggagctctcttcttcttcccctggatccttcctttaaaatagtttcttttgtcttaagttttcatttctacgtttgtcccttcattcagtctcttaaatgacggtctcaagcagtaacagtagtaattgctgtaatgacggtctcaagtagtaaccagggcactctgccacaagtggcacctgaacagggactaacagggactatcaagaacaaacggagacctgaagagacctgaagggaactgaagaggtctgcagggacaaatagagataagtagggataaatagagataaatagagacaaatagagataggtaaggaatgacagggacttgcaggaagtaacagggaccatagggacagatagggatagataaagactagcaaagactagccgagattagcaaagaccagcaaggactagcagagactagcaaagactagcagaaacttgcagggacaggcagagacagatagggacagatagggtcctacagggacttgaacgaggaagatctgctggaaaagaaaagaactacaaccaaccagatgaacaagaaaccctgttacaagtctgctggcagcaacataagtgacacaaagtgaaccgggttctataaattaccatggaaagtggtgagccaacgatttggcagaacaaaaccctgaggatatgcaaacaaaagggactatggaatttgcaattgcagattaaaattgaagaagaaaacatttgagttgcaaataccgtattaaaagtggacactgcttatgactgctgtatgcaacagtttttcaggcccgaggtgataaataaaaaattgtttgctctatttaaccattgaatgcttggactacttttgtatccttaagatgtgaagtgttcttcactagaagtaaacattaaggtcatttaccattgattgcttaaggctagtaaatacgtttaaggagttttaaagctttactttgggagaagtcaggaccagacagcttaataaagccactctgtgtgggaccatgactaagttttgttgtgtttacagacattttgtcacagaatcaaagttaacttttttttttaattctctttgccacagaggaacccagacatgctctatttgcaaaccgactgcatgaaacaaaaagcacggtaattctgaagctgttggcttggatgaaatgagaatgtaattaaaaagaaaaaggttagcaaaagaacatgctgggaattgaaaataaaaatctgaaatgatgtcccagcctgcccttaaggtcttttccaccatgtagagagctacctcaaatgctctacttgtcccagagtctatgttctttcactactattgcctatatctgtgttttctgctttcaataatctattgaaataatcaaaattaattacattcagcattttttctgtattactctgattctaataattacctcaaatttatttgtgcatttctatactagaaagaaaaaataatttttagagttttactatat

SEQ ID NO: 461001 - DNA, 5115 bp, Homo sapiens
cagagaggcagctgaggcagggacaatggggctaactgtagagcaggctctggcggtggccatccagcttggtggccatctggctgatccactcctccaggtggaccctctgtcctcatgtggtgcaggtcccattgtgccacctccagacaggccatgctagccccagggcctccgttccctgttacccagcccccacccccagaagtacagaggaacctggtgccggccgcagtcaacccctatgtgatgatctttctacccgccctctttcgtgtcttggtgctggctgctgtctttggccagctaaaagaatatcagcaaaggaagagccctggtattccagcaggagcaaagacaaaaaagaaaaaaactgacagtagccctgagacaaccacttccggtggtggccactcacctggggatattcaggacattctgaaggtgcgggtgtccaaccttaaccactccaatgggagccagtaccaagaactagcagtagccctggagtcaagctcagtgacaatcaatcagctcaatgaaaacatagaatcattggcaaagaaaacaaacaatgaaatacacaaagcacaaatggagcagttagagacaatcaacatcctcacattggaaaaggcagacttgaagaccaccctttaccatactaaacgtgctgcccgacacttcgaagaagagtccaaggatctggctggccgcctgcaatactccttacagcgtattcaagaattggagcgggctctctctgctgtgtctacacagcagcaggaagaggacagggggcactgcccgggctccccagatcaaaacttctcactcttcaccatccagtcctcgagctgcagagaagcggtcctccagcggcggttacagcagaccataaaggagcgggcgctgctgaacgcacacgtgacacaggtgacagagtcactaaaacaagtccagctagagcgggacgaatatgctaaacacataaaaggagagagggcccggtggcaggagaggatgtggaaaatgtcggtggaggctcgaacattgaaggaagagaagaagcgtgacatacatcggatacaggagctggagaggagcttgtccgaactcaaaaaccagatggctgagcccccatccctggcacccccagcagtgacctctgtggtggaacagctacaagatgaggccaaacacctgaggcaggaggtggaaggtctggagggaaagctccagtcccaggtggaaaacaatcaggccttgagtctccttagcaaggaacaaaagcagagactccaggagcaggaggagatgctccgagagcaggaggcgcagagagtgcgggagcaggagagactgtgtgaacaaaacgagaggcttcgggagcagcagaagacgctacaggagcagggtgagaggctgcgaaagcaggagcagaggctacgcaaacaggaggagaggctgcgaaaggaggaggagaggctgcaaaagcaggaaaagaggctgtgggaccaggaggagaggctgtggaagaaggaggagaggctacaaaagcaggaggagaggctcgcgctctcccagaaccacaagctcgacaagcagctggccgagccacagtgcagcttcgaggatctgaacaacgagaaaaagagcgcactgcagttggagcagcaagtaaaggagctgcaggagaagctagacgaggtgaaggagatgcagtacatggccacctatcagcagctgacctctgagaaggaggcgctgcacaggcagttactgctgcagacccagttcgtggaccagctgcagcagcaggaagcttggggcaaagcggagcacctagaagctgccagccagcggaaccaacagctagagacccagctaagcctcgtggctctccctggagaaggagatggaggacaacatctggacagtgaggaggaggaggcgcctcggcccacgccaaacatcccagaggacctggagagccgggaggccacggaggagcaggcacggctatgtgggcagcggaaggtgcgaaggctgtgccgcctgcacctggctcatctggtggccttggcctggaaggagccagaggcagaggccccagccccagggaggactggagatgagtttgtgtgtggggagagctaccgggccctgaaggaggccatggtgaagctgaaagggagagagtccttcaccgtatatgaaagccagggggcagtgccaaacacgcggcaccaggagatggaggatgtcatcaggctggcccagaaggaggaggagatgaaggtgaagctgctggagctgcaagagttggtgttgccccttgtgggcaaccatgaggggcatggcaaattcctcatcgctgcccagaaccctgctgatgagcccactccaggggccccagccccccaggaacttggggctgccggtgagcaggatggatttgtatgtgctctgggctcatgaagatattgcatcatgagctgcagcagttgtaccctttcttgatgacctaaaaagggattatttctgaggaatgaaaggctcccatcattgactgtggatgtggaaaaccttttctagcttagagcatttatatctacaatacattttaaagtcagagttcatgttacctgttttaatcacgagtatatgtcccagtacacaaaagggcactggttggcattcttcttaagccacattagttactctgacataggaatttacttcttttctttgaatggaaaacactttaaaaataataacaaccattattataaaccaatatatgtgagagtacttagttgaaacaaaaaggagttttagtagacagtattatactacacatgaaaatcaaggcgaagtttatgcaacttaaaatgtttacaagctgcagtgcaatctaatgtttgtgaatgtccaagtattatgagaaaaagtgtctatacaatgacagacttatgtttcctcacaaagttcttcacaaagagtgaaatatgtttttatacctctcagtttcagttagaggcatattttgtgccatatttatgttaatgtgcctatacgtgatgagtgaattatttcagtcatacattgcctaaatcataactttaagatgcttgggaaagaatcaacagctaaaagttcatgaagttctaatgtctgtgttccaaaatacgtcacagtattaggatgcagggagagatgtgtgtgcgctccctggggtgggcatttctagttactagaccatctccatttttagcatttggcatcctcatgatacttttatacatatgacattaataggagagcaataatacgattttacagatggaataacagatgtgcctgcattcagtgaaagagtgcaaatattaagtccttgtgacttcaactgactcttccaaattgtatgaatttatcaatgtattagataaactcagttccagaattataaagaaaaactgttagaccaacgaatgtggctaattaacagtaggacgatttctagcccgagggtttaaaatggacttcaagtcctgttcttgccttttattttctgaacttgccacttttgcattctttgagttcagtttaaagacagtttgagtccaatttagaccctcgggctagaaatcataccactgttaattagccaccttatttggtctaacagtttttctttataattctgaaactgggtttacctaatacattgataaattatttcaaaggtatttttatagttcaatcacttcacttttaccctgataaatataaatgactaggaatgatcttcagctagcctttagcacctgcaaccaatctgacaataatgtgttcatcaggtacctgtggattaaatcacacaccggcatatttaagctgaatgtcagtctggaaaatgaatgtactatattaactgaaataccactctttgtgtaggtattctgtcatatatttaagaaaaattaaatagcatgtaaatcatatgacaacaacttaagtctttcttcaaagtgcatgtggtcctttgcaatacctcattcagccaagtatttgttctcttcctcattcagtataaggcagcgttcaatttgcttagaaggcaacattagaagggtagagtttaatcagaaacatagaattttaaagtgtgggttcaactgaataaatttgaatttctgtaggaagtaaagaattaaaaaccgatttaaagattgcaatatataatcatttttaaagtatttgattaaatctgataggttttccagaaatgaaaaaaagtcagttctaaaaccaaagctgatatttagaaaatgtgaaaatgtaaatcagtcctatccataatagtttctctaaaactttatcttaaagagtcattttaaaagaatataactattcaaaaatgtaactgctatcttaagttttaaaataagttaagacattttaaaatatgaatactgtagtttaaaagaaagaaactgggggaaggaaaagtagagaaagaaatgccaattccaatgcaaagctttatttgccaagttttcttagaatgacttttaccaatttatgaattcttgtaaacagaatgtataatggaaatactgaaacactgttgcctaaagtggcattattcactgctactgtgatgctactgtaatgtaataaattattaaattgttgcaaagtgctgtttttgccttaaaattttgtgtgtcttgaaaactgtggtgttaaaggtattgagactgtgcaaatgctgggcacgcttggcatgagataaccggtttttatttttataaaattttaatgtaaccatgaagtgtgtttatttgaagaacacaaaccaaagttatgggataaaaaaggttgtgggatgaaaaagttacaggataaaaaatgttgtggaaaggttgtggcaaaaaaagttgtggaaaaaacgtaaaagttttatgaaaagcttaaaaaaagggccgggcttgcttgtcacgcctgtaatcccagcactttgggaggccgaggcgggtggatcacaaggtcaggagatcgagaccatcctggctaacatggtgaaaccccatctctactaaaaataca

SEQ ID NO: 461002 - DNA, 1125 bp, Homo sapiens
ctctgcatgcatttgagccagctatgcctgacagggtcttccaacagagagaacctctgggcatcttcttttggtgcagcctcagttgcctgcacaggggccttcctgacacttcccaaaggacagaacgggcaactgcaaatgacagaaaggccaacaccacttggctcaggcaggaaggccaagagcttgcaaaaccaggaattgctgggggtggctccaactctgaacacaacacggcacctccagggccctgggcatttccagggtccagggccctgggcgtcttcaggctgccttctctctcccagcagatcctcgttgcacaaggctgtctagtgctccatggtgaccagaagaagggcagcacctccagctcactaaagcacctgtgcagctctcaaggctccagagaaacttgcccctcattggttgggatccagattggcaatgacaacatcactcactcaaaacagccaaatcagtatgttatgggagaaccaaatgatgatatctgtaaatacacaagtacagcagccatggcttgggaagggcatagtgaacaggagctcgtactgctcagaaataaggatctggatcacagcatcagcaaggactaagagacacccctaaggaagaaaagtagtagtagtggcttggaaccaggacccacaatatctccaaggatgccggtatatcccacttcatttcaatgacccacttactgagttacattccatactacattatcaatgcctccaagtcagagactatgtcttacttttgtttgtatgtctagttgctagaatagttctgagtgcacagtaggtgatgaggtttattttgatgttgaacaaatatgtacaacctgcaaagatatttttactcagtgctttatccattcagattttgccctcatgaatcaaaactgtagttataaatataaataaatgtataaatgcatatatatgtgtgtgcatacaatcagttggccctccatatctgtggattccacatcctctgattcaacaaactggataaaaagtatttttaaaaatcaataaaaaatacaagctaataaaaaatacagtataacatctatttacatagcatttgcattgtatt

SEQ ID NO: 461003 - DNA, 818 bp, Homo sapiens
tcagtgctgtgtgggaggggtttgtgccttccttgtgatgccatggggctcctgcagagctgtgaccctcaatctgcccaacccatgaccatagccatggagaatcccaaggagttaatgacttccctgattgagttgcttcctttggaagcctcctgtgccagctctgcccagcccccgccttcagtggccactgcggggctgcccagccagaaaccaggtctccccaggcaggacctctcgctcccatcagctgcaaagtcactgtcttccagggccacctgcctcatgactggctctcctcaggtcacaggaagctgggagcgggaccctgaaagaactcgagttctgtccttagatgttgggcatgcagcaggcaaagggagaatgagaggagacaaggacctggcttcccatctacagactgttcagccaaggccatgcctagagtgggatctgctaaatgggcacagcagaacattggaagaagcacctttgagccagtgctgctggggtctccgtggattagagccaggagccctgatgaggcctgtgggcggggcttcactttcgaccctgagaagccaactccacatctccttccctctcacccttgagccgtgggtagttcagggaggccacagccttctttctgtgccatggcctatcccaaagtcacctccactcacaacgtcgtgaccttaggtaagttcttgtacttttgtgaacatcatttctcacccagaataatgtccttactgcaatatgctcgttccattccctgctggctttgtggccacaaatggaggggcagctac

SEQ ID NO: 461004 - DNA, 1184 bp, Homo sapiens
tgagggacctggagatgttcttttccaatttctggattgggaaatggaggcaaattctgggtactagagtcagaactaagacgaggctgaatcgggagagtctggggtcctgagaggcagagacctgaaaccctctagattgtgtggggagctgggtgtgtgttctggccagttgtttctccctgtgcctcaatgttccaggtacccttggagggggctgagatcctggggatgcctggagcctggctgcatggcctggccgccctgatgccttcgtgctctccacagcaggccagcaaggccgaggagaatggttccaacagcttcatgcactccatggtcccacagctggagtggcagatggagaccacccagagcctggtggactcctatgtggccattgtcaacaagaccgtgtgggacctcatggttggtctcacacccaagaccatcatgcacctcatgatcaacaacaacaaggagtttatcttctcggagctgctggccaacctgtacttgcatggggacaagaacatgctgatggaggagtcggcagagcaggcacagcggtcatgaacacaatcagcacgcccacgggggcccatggacaactcctgactgcaggtgcagagcatcctactggatgcaggtaccagggctggcccccacggccccaaagccccccagcctccatggctaagactgtgggctcttggaacagcctccatgcccaagttggcagatgtgggtgctctctagagtcctcggagagggcagagaactcatggtttatggtgtaggggctgggaatgtggagggcgttgtgtgtggggctggactctgaggcggccagaggcctaggaatgtcacctgggcacaacataactgtcgtgcagtctgagtcatgctgccagggcagggtatccagttcccagtctgggagtgccgagagccaaatccactgcagagcagggttgatagtcagggtcccacctcctctatatgttggcaatccagtggtgatctaggataaaatcttgagagtcccatacacatggtcatcccacaacacacctcacaggccaggcaggaacacacagcccccttccctccctcccagataccatcatacctgctagcgtgtgactgaaggcagggtccctggcccctgctgaaacactacc

SEQ ID NO: 461005 - DNA, 1035 bp, Homo sapiens
taagggaagagcgcctcaagtgagcatgcctacaacgccagtaagcacactgcgcatgcccatcttccaagtactagcaggtgctgcgcatgcggacagcggatcgcaaggggaaaagaccccggaagtacgccaaagtataaaacctcaggttaaaaggtcaaaactagtacttgtccttcaagtcgcccacttggccctcttccagttaaggtggcaggagtggaatcttggattcaccacaccagagttaaattttggacaccccctgaggaacctgtgggaccatcagctcaggagtcccaagatcagccagaccagcctcgatacacctgcgaacagttggaagacttgcatctcctatgtgggaaggaaacatcccagattaaaaaggctcctaccactgatcctgaagaaaaaccccttcctccttaaaaaagataagtgaaaaccacataatctttaacacctctccttacccctttaatggaatcattttactatttcatcatattattaagcagcatactaaccatactctttgtgatagggctataaactgtagctcctgctgggtcgaacatcctaatcacatcagccttctttctgtcttccttccttctgacagcaatttactcctacctttaactcagcctggataaaatgatctcgtgttccagagcacctctttaccttcctatttactctttgcctatctatccctcctgcttccttggatacgtcatacaatcacctatccccttccactagctcctaattacctctacaagactctcaacttaacccactctctgttaaaccagtccaatccttccctggcaaataactgttggctttgtatctctctatcaacctcggcttacgttgccactcccattcccgcaaaaaattgggtctttaccgacttaacctaccaccctcattatgaaggaaaagcccctttctgacttctaaatatgcaatcattagccgacttccccatctctgataggaccaagaataccctaacaggac

SEQ ID NO: 461006 - DNA, 734 bp, Homo sapiens
tctctctacagatatgttgctagaaacatatctatgttcaccaaccacacttctggatggccaccaggacaattgtcccctgcttaccatcactgtaatacttcacagccacttcaaacacaaagctatcccagagagaaccctcttttccacaaatctacatctcttcctaaattcctggtgtgccctccgtgctctgctgctctactctagtttgggtcctggacagccattagaagccaaggatgactggggagatagcaagaagctgaacagggatttggacttagatttgtctccaaaatgtgtggctccttcactaacacactgttctaccttactattttcttctttgcttgctttgaaaacatttggttttatgttcacctacatgaaatgcactaaatctctggtgatggcagtgttttacatttctaaccagatgcagctgagcagatcaatgcatgaagtaaatcacaaaatagagattgaacttaacaggagcacactggaatctacaatctcaaggtattagggaaaaatttttctgaccatacaacctacccaaaggatgaaaatctagctcagtttcagcctttttagttgttatttccatacctgctttacaaaattctacactttttctcctgcaattggcaacagtcatgcatgtgtgtatggagatggcatcctctttagggaacatattaaattgattatgcacatctgaatat

SEQ ID NO: 461007 - DNA, 1274 bp, Homo sapiens
tagctcttcttactgggtcctagctaaaaactggacatgtgattttgggacctgatcatgaactgggtgtgcaccccacttcccccctggctcttagggcccccatcgcaggggggggaggcacccccggcgaggcggggactgagagccagcccctcatcccccccggcttaggacccccatcgcagatcctaagaaccttaggacccacctgggggactgtgggtattaggtgtccaagaagaaagctcaaatctgccgagggcaggtaccttacttgggatttactatccgacaggggtccaaacgcagcccgggaacagaaagaaagcaggtcatttgcagtctaccggagcctaagggcagaaggcaggtgagggaattcttaggggctgtggggttttgtagactgtgcatcccaaactttgcagtattagccaagcctttgtatgaggtcacaaagggggcggggaccgggaacctttgaaatggggatcccaacaacagcaagtctttcatgagttaaaggaaaaacttctggcagccccagccctggggctacccgatctgaccaagccttttccattgaatgcgtcagatagagaaaagatggcagctggacttttaaccgaaactctgggaccctggctgtggccggtggcctacgtgtctaaacaactagagagggtttctaaaggatggcccctcatgtttgagggctgtggtatcaactgccctgatagacccccatcgcggatcctaagatctttaggactcacctggaggactgtgggtattaggtgtccaagaagaaagctcaaatctgccgatggcaggacaccaatcgcaggggtgggaggcacccccaacgaggcagggactgagagccagcccctcgtcccccccggcataggacccccatcgcggatcctaagaaccttaggacccacttggaggactgtgggtattaggtgtccaagaagaaagctcaaatctgccgatggcagatatgttttggttcacaacttgaaggagatagatgatgcagtgactgatgtgtttgcctatggtgataaacaccagccacactcactagcctatttcctactgacactcacccctacagacccttaaccccacccacagctgtcagctctgcctggcccttgaggggtgggtttatgagagaccttctgcttactgctagtctcagaatctatggtattcatggaatgctgatgctatggtttgaatgtatgtatttctccaaactt

SEQ ID NO: 461008 - DNA, 2029 bp, Homo sapiens
gattattgcagggagtggggcagggggattccctgccccaggtgactggcagggccgtgtctgttttgctctctccgctcatgttgcaacagcgtggctgccacacggcaacgccgacagctgctcaggaagatgcggcgtcaggctgcccgacacaggtggccaagagagggacggaccaccctagccaagcgcagtgtggagtccggcctcaaggccagggcggcgtgactgccccgctgggggaccgtcacctccccgctcccagccatctccatgggccccgcgggagaggagcagcagcatgtgttatgccgttggcgccggccctgccccaggtgctctccgtgctctgcgtccttgccagcccacgccaggggcttctctcattcccggtctccactgcaggcccagatggacctgctgatcccagtagaccacaaagtggagctaaagtgtacaacctaagagcacaggggacctgcattcgacccaagaaagagatttttaaccatgagaaaaacatcagaaaagcccaaactgagggatcttctacaaaatattctacccgagcagtcctcaaaaccatcagcgtcatcacagacaggcaaagtcccagaaactgtcagccaagaggagcccacggaaacccaatgactgtcacgtggaatcctggatgggatcctgggacagaaacagccacgaggggaaatctgaggaaattggaattaaagcagtgtgtcaggctaatccacagctgccctttggtggacggctgccgaatcttgaccaacgtcaaggtcagtgttgtcctgtaagagcaataagttctgcagtgagcgtagcgtcgaggaatgatggttacgcgcaggagccctggacttggactatgctggcttttaatctttcagatgattggccacaaatttcagtgtttaaaagcaggttaccaagagaaaaatgctgagagcccttgctctcagtccccttccaacccgtacactctcagacactagataggccatcaaaacaactgaacaaagatatctggggggtgaactacgggccactttcatttactcagtcagtgtccatcgttacgctgtaggggctgtttgtcactaatgcgggcaccccagcctaagagcccctctgctgtttacaggatttcccctcccgtgagaagggagtaggacatgccagacactcattctcccagcctcctttgcagctagagtgcagccacgtgactgaggttccccagggtccccaaagtgcttggggcagagtacagctcccctttgagaaagtcggtgctctggactgatgaaaaggacaaaagagaagccagttttgagaagtcaaagtgtgggcagaacggttcctttctggaggctttaggggagaatctgtttcctcgcttctccagcctttagaggccacctgcagtccctggctcacggccatcttcaaagccagcggtcgcatcgccctgacctccgcctccatcaaccatctccttgctgaccctgaccctcctgcctccctctcacaacgactcctgcgatgacgtggggctgtgaaaggaaaaatctcttgggtcccttcaagctgggaactgctcagggcaaaactccctcccattctattcaaactcatccctctgctcactgagatagatgcatattctgattgcctcgcttaccagaaactcaaaagaatgcaaccggttgtctctaaactcaaaagaatgcaaccagttgtctcacctacctgtgacctggaaacccctttcctgcttggagctgtccccgtctttctggatggaaccagtgtacttcttacatgtattgattgatgtctcatgtctccctaaaatgtataaaaccaggctgtgccccgaccaccttgggcacatgtcgtcaggacttcccgaggtcgtgtcacggatgcgcatccttaactttgtcgaataaacctcataaagtgacggacacgtgtcatttttctcgattgacagggccaaccc

SEQ ID NO: 461009 - DNA, 955 bp, Homo sapiens
gactataatgaacgcatatgaatatgatggattgaacgctacttcaagtaggcttcaatgcagcttggaacatgaatgcaaagctgctcagcctgactggggggttgtccctgctgcgggtggcccacagggctgtttttcaggcacaggacatgggctctcagctgctcagccagtgtgggggctggcccattgggggcagcctgtgctcagcctctagcccagctggattctccgggaaaaggcagagacagtttggcgaaaaagacacagggaaggagggggcggtgaaaggagaaagcagccttccagttaaagatcagccctcagttaaaggtcagcttctggcaggctggcctcaggcggagtctgggtcacagggaggagcagcagcagggtgggactggggcattctacatctcattcaggtcaagcagagtctggtccagcatcctttgtgtacagaggtgctcctctttggtgcatttcagtttatcttccaagtcatcaattgtcttttccagcttggctaccgatcgctcagcaaactcagcacaggtctctgcctccttgggtttatcagtaaaaatcttgatttcttcctcatatttgtcttctttttgagagtacttttcttcagcagcactcagacacttcaggttctggtccatcagtctaatctgctcatccatctctcggcaacgggactctgtcagctcagctcgttcctctgtgcgttccaagtctccttcaatggtcaccaacttacgagccacctcttcatacttcctatctgcctcttctgcaatgtgcttagcttctttgagttggagttcttggagttccatcttttcttcatcttttaaagcccggttttcaataaccttcatacctctctcactctcaccagcagctttttctgcttcttccagcttttgcagggcagtggccaggc

SEQ ID NO: 461010 - DNA, 299 bp, Homo sapiens
tcgcctgtgtcgactctagcaggctccccttgcttgtccgggtgtccgggactctgtcagctcagctcgttcctctgtgcgttccaagtctccttcaatggtcaccaacttacgagccacctcttcatacttcctatctgcctcttctgcaatgtgcttagcttctttgagttggagttcttggagttccatcttttcttcatcttttaaagcccggttttcaataaccttcatacctctctcactctcaccagcagctttttctgcttcttccagcttttgcagggcagtggccaggc

SEQ ID NO: 461011 - DNA, 1399 bp, Homo sapiens
tgcatcgtcaaaggacactcgaggacgtctaaaagaaactcagcgggaaagctgagcactcggaagaaccagggtaacaatgagacaaataacccgcggatggcccaaatgcattccatcggtagcggcaactgctttgctaacagaagaaagtagaaaaataacctttagaggactcacccctgagcacaaaggcaatgttgggcacactggtaaaggaccactagaatccagcagcccggacccttttctttgtggtcaagaaaggggaaaacaggtgcaggactgctacatcgatgggaaatgttccccccaaggcaaaaacgcccttaagatgtattctggagaattcgacccagtcagagtgtgtgtacctttttccctctcagatttgaagcaacttaaaatagacctaggtagattctcagataaccctgatggctatattgatgttttacaagggttaggacaatcctttgatctgacatggagagatataatgttactgctagatcagacactaaccccaaatgagagaaatgccaccataactgcagcccgagagtttggtgatctctggtgtctcagtcaggtcaatgataggatgacaacagagcaaagagaacgattccccacaggccagcaggcagttcccagtgtagaccctcgctgggacacagagtcagaacatggagatggaaataagccgccccctcatccatgccccttatgtcaagggaattactggaaggcctactgctccaggggacgaaggtcctctgagtcagaagctgatccagcagcaggactgagggtgcccagggcaagcaccagcccatgccatcaccctcactgagccccaggttatttttcttgagaaatactatacaggataaatctttcttcctagaaataaggaaaaaaacaacggactggattttcctagtttctacagatgcaagagccaaatgacttttgagtgtttcctgcctggatgttgacttttgaaactcagatattagatcaagcttctcaatacaaagcccagatcaagcttttcaacacaaaaagccatcagcctcaacaaaatcctaggaagcagaattcaagcagtgaaggataatgttttgtttaagttgtcagtgttcacccttcaaaaatgtaaaatataattccaaatcaaaatccaagttgcttttctttttggtattttgcgatttattgtagcattacctttatttgtgaggaaaatatattgaaggtttttttctcattaaatatgtaactatgaaatatttaggtctacaaaatgaatttctctatattttatgaacaaaatatcctagaaaagagagactttttaaataaatgaagattagtgaggataattatttcatat

SEQ ID NO: 461012 - DNA, 1274 bp, Homo sapiens
gcaaatcaagttttattgaggctgagtgcagtggctcatgcctgcaatcccagcgctttgggaggccaagtaattatggttctcattcactaactcatctgcacaaagcaccgagcatggtgtcggtcacaaaagaatggttcgcgggcactgctcaggggattgtgtttgaccggcacgttgttgatgactcccggccctcagagccagcagacatgctgcccagggaatgcagccgtgacctgcggaagtggtggcagcagccgggcacactgaggtgcctctcggggagagggagagccaggagcgccaggagctccaggagaggcggctttgatgccaggagcccaccccgactctcaggcaagcgtcacatcccccttcctgaatggcctcctgtcctgctgtccgctcagcactgccagggcagtctcccccagacctggggctccccagggacagagactgcaccttgcaacccgaaggacctagatggggctctggcacagaggagctcaatcaatatttgtccaatgaacaaatgccactccctggagctcgttgttctgggtgaaccagaggccaagccttcatgtccttcccatcgccagctggtagcccgaagaaaaggccacctgtgtccaggtcgcaggggtgttgtcatggaaagcctcaccctggccctctggtctcctcttagatttgacttttcctaattttccagccttgactttggctgttcctctatgtccatgaccctctgctccttccagatgtcagaaggggccttgcaagtgaggagcccccgagctcaagttcttctggcctcgcagaaaactcactgccccggatctctgagccaaagagctgtgtgaactgtgaaaactgtctaccccgtgtgggaggcggagatggtttcctattttaatcctctctaagactccaaaggaggacctcaggaacccaggatctgatcactccagctcctggtttatgccgctcgctcacaactggtccagtgtgttaattttatgtgcgtgtgtgtataataaatcatgtgagcccgccaccaacacgagaatcagagcatcgtccataacttgcttctactgagggcctgtgctctccctcccccaggtgaccacactcctgaatcctgcatttaaactaaaaagacaactatatagtttttcatatgtacgtatttgaaaaggtatgatgtttagttttactgttttttaaatttcatttttcaaaaggtttctctttccatc

SEQ ID NO: 461013 - DNA, 2630 bp, Homo sapiens
atcacaggccgtacgctggaggctggagccgcggtaggacggctcgcctcgctgcggtttgtggtgacggcaacggagaaagcagtgtggcgcaagcggtcccctgaagaccttgccaaagtgtgagatcgccctggagaaactcaagaatgacatggcggtggcaccaaccccttcctcaggtcgatgcaccaccgcgtgacctccaggcggctgcagctcccggacaagcactaggttaccaccttgctcagcacctgtgcccagagcatccacaaggcctgcctctcggctgcctagccaggactgcagggatggcccgcagcctcatcggggccaaggatgcatgcctcctggagttggctgtcttcttggagaaggcactccatgtgacttcctccatgaagccagacacagtccccagccacgatcctcgggctgctctcaccacggcctgtccaggtcttatatttaaagaaaaagtaacaagccttaaatttaaagaaaaacctacaggcctggagacaagaagctcgcagaccaaactagaagtggccctgtacatgtttctgcggaaccctgacactgaagctgttctggttgccatgtcctgtttccgccacctctgtgaggaagcagatacccggtgtggggtggacgaagtgtcattgcgtaacctcttgcccaactctaacacattcatggagtttgcctgtcagcaatgtgatgtcaacagctatccaaaagcccaaatggaagatggccagaggcgaatgtcccatgtgagtggaggaggacccatagatttgtctgacacagactccctacaggcatggatcaacatgactggcttcctttgtgcccttgggggagtgtgcctccagcagagaaggaattctggcctggcaacctatagcccacccgtggatataatgaagaacttgctagataatcatactgaaggcagctctgaacatctagagcaagctagcattgaaacaatgatgttaaatctggtcagccacatcaccatcctggtggaaccctcctgtgaggacagccaaggcctgaactacctgcgggtttgcccaggcaaccagccagccctggtccaaggcatcctggagcgagttgtggatggccccgtgccccaccagacagtgcgcctggaggacctggacgagagcggtgagccccaggctggggagccagtgctgcctggcatcctccggccaccctacctggctgaggggctgggcctgggcctgccggtgacagccatccctgtccttcctgctgagggggcaggcttactgcactacctctccaagatgcttttgatggtagctacaggattgctaagaccgtatatgggaaagggctttgtaaactgtgaggcttttttatgtaaagcagaacatgatgtccctggagctcccggtccctggagctccgcacttgggggcacaacctgcatgaggcagcgccactctggtgactggccggccatgccgtcccgggctgaggactatgaagtgttgtacaccattggcacaggctcctatggccgctgccagaagatccggaggaagagtgacagcaagatattagtttggaaagaacttgattatggcttcatgacagaagctgagaaacagatgcttatttctgaagtgaatttgctttgtaaactgaaaaatccaaacatcgttcattactatgatcgtattattgaccggaccaacacaacactgtacattgtaatggaatattgtgaagaaggagacctggctagtgtaattacaaagggaaccaaggaaaggcaatacttagatgaagagtttgttcttcgagtgacaactcagttgactctggccctgaagatgttaaaggattaccatcgaccttctgttgaagaaattctcgagaaccctttaatagcagatttggttgcagaagagcaaagaagaaatcttgagagaagagggcgacaattaggagagccagaaaaattgccggattccagccctgtattgagtgagctgaaactaaaggaaattcagttagaggagcaagagcgagctctcaaagcaggagaagaaaggttggagcagaaagaacaggagctttgtgtttgtgagagactagcagaggacagactgactataccagaaaatctgttgaagaattacagcttgctaaaggaacagaagttcctgtctctggcaagtagtccagaacttcttaatcttccatcctcagtaattaagaagaaagttcatttcagtggggaaagtaaagagaatgtcatgaggaaggtttcagaaacaggttagaaaatgcttccatagtatttcatagattctttataatttgagcagtttttcagggttttcagtccatttaaaccatttatctaatgaacagtaaatagaaactctgagctctacattctcttgtaagctttctttttctgttatagttgagcaaatttgttgacattcttatatttttgcattttgattttttgcaaaatgtttggttaaaatactttgggggaaaaatgcaagtactttgttctcatttatagttgacttcctactttgtttatgttgtcttctgtatgtatt

SEQ ID NO: 461014 - DNA, 5502 bp, Homo sapiens
ttctttgggctcacctctccaaggacctgggtcccccagccccaaccccccagcatcgccagtcatcccggggtgactttgggctggtgactcctggggttccctgagcagactctgctctcccctcctgctgacccaagcccgacctccctgggctctctggactggcatctccaaggacctgggtcccagccccacgtcccccctcccccatcgtggatcggcaactcagccattgcactgatgaggtttcccccacccccaggaggagtggaatgtagtgatgtcacagtcctcctaggaactctaaaagaatatcagcaaaggaagagccctggtattccagcaggagcaaagacaaaaaagaaaaaaactgacagtagccctgagacaaccacttccggtggtggccactcacctggggatattcaggacattctgaaggtgcgggtgtccaaccttaaccactccaatgggagccagtaccaagaactagcagtagccctggagtcaagctcagtgacaatcaatcagctcaatgaaaacatagaatcattggcaaagaaaacaaacaatgaaatacacaaagcacaaatggagcagttagagacaatcaacatcctcacattggaaaaggcagacttgaagaccaccctttaccatactaaacgtgctgcccgacacttcgaagaagagtccaaggatctggctggccgcctgcaatactccttacagcatattcaagaattggagcgggctctctgtgctgtgtctacacagcagcaggaagaggacagggggcactgcccgagctccccagatcaaaacttctcactcttcaccatccagtcctcgagctgcagagaagcggtcctccagcggcggttacagcagaccataaaggagcgggcgctgctgaacgcacacgtgacacaggtgacagagtcactaaaacaagtccagctagagcgagacgaatatgctaaacacataaaaggagagagggcccggtggcaggagaggatgtggaaaatgtcggtggaggctcgaacattgaaggaagagaagaagcgtgacatacatcggatacaggagctggagaggagcttgtccgaactcaaaaaccagatggctgagcccccatccctggcacccccagcagtgacctctgtggtggaacagctacaagatgaggccaaacacctgaggcaggaggtggaaggtctggagggaaagctccagtcccaggtggaaaacaatcaggccttgagtctccttagcaaggaacaaaagcagagactccaggagcaggaggagatgctccgagagcaggaggcgcagagagtgcgggagcaggagagactgtgtgaacaaaacgagaggcttcgggagcagcagaagacgctacaggagcagggtgagaggctgcgaaagcaggagcagaggctacgcaaacaggaggagaggctgcgaaaggaggaggagaggctgcaaaagcaggaaaagaggctgtgggaccaggaggagaggctgtggaagaaggaggagaggctacaaaagcaggaggagaggctcgcgctctcccagaaccacaagctcgacaagcagctggccgagccacagtgcagcttcgaggatctgaacaacgagaaaaagagcgcactgcagttggagcagcaagtaaaggagctgcaggagaagctagacgaggtgaaggagatgcagtacatggccacctatcagcagctgacctctgagaaggaggcgctgcacaggcagttactgctgcagacccagttcgtggaccagctgcagcagcaggaagcttggggcaaagcggagcacctagaagctgccagccagcggaaccaacagctagagacccagctaagcctcgtggctctccctggagaaggagatggaggacaacatctggacagtgaggaggaggaggcgcctcggcccacgccaaacatcccagaggacctggagagccgggaggccacggagccagaggcagaggccccagccccagggaggactggagatgagtttgtgtgtggggagagctaccgggccctgaaggaggccatggtgaagctgaaagggagagagtccttcaccgtatatgaaagccagggggcagtgccaaacacgcggcaccaggagatggaggatgtcatcaggctggcccagaaggaggaggagatgaaggtgaagctgctggagctgcaagagttggtgttgccccttgtgggcaaccatgaggggcatggcaaattcctcatcgctgcccagaaccctgctgatgagcccactccaggggccccagccccccaggaacttggggctgccggtgagcaggatgttttttatgaagtgagcctggacaacaacgtggagcctgcaccaggagtggccagggagggttctccccataacaaccccactgtacagcagatcgtgcagctgtctcctgtcatgcaggacacctaggagcacccaggcttgcccagcaaaccctgcgtgccattcttctaccaggcagccgagaacagggagataaacatcatcatcttctaagagctggtcaagaaatttaaaacaacaacaacaacaaaaagttacggggttcatctcctacacaattcatttactccatttgaatgctagagccactcacttttatttgtgtttctaatttaccgtttaaatttatttgtaaaaagttaagggagagttggtctttccctgatgttctttctggcatcctttagcatttttatttttaatttgataattgtaggtcattagtatgcatatcgagtttgcccttaggtggtgggaattcaaacacacaaagacccactaatttgcacaaaactattctggctggtttggaacaggctgccatgcttttttaatgttattgcagcatgtatattcattccagaattcagataaaatgtgcttatgttctgctattacgtttgatcgaatcctaaccacagtgagctcttcattagctcaatatgtggtttgccctcaattgagcactgtttattactttgtaatatgccactgtgagtactgacatttagagttgtttaaaggccaagaactggaaacagccttttccctattttctgtgtattggggatgggagtaataacattttggggagctttttaaatctcacagaagaggaaagtggcctgctctggcaggtgtgtgcaggatagagtgtgtttcatttgttctggtgccaagaatgagcgctgcactatggtagttcccttaggatttgtatgtgctctgggctcatgaagatattgcatcatgagctgcagcagttgtaccctttcttgatgacctaaaaagggattatttctgaggaatgaaaggctcccatcattgactgtggatgtggaaaaccttttctagcttagagcatttatatctacaatacattttaaagtcagagttcatgttacctgttttaatcacatgagtatatgtcccagtacacaaaagggcactggttggcattcttcttaaggtatttagtgaagatcataagaaatcctttaagagtttaaatgtccctggaagaggcatacaggctctagtcaagaatgaattcgagtgaaggaaagctgtgtgacacctggccttcctctatgttcatggagcttctttgaggctagaagattgattttatcatctagacctctctggctaatacctattcttcaaccacactagttactctgacataggaatttacttcttttctttgaatggaaaacactttaaaaataataacaatcattattataaaccaatatatgtgagagtacttagttgaaacaaaaaggagttttagtagacagtattatactacacatgaaaatcaaggtgaagtttatgcaacttaaaatgtttacaagctgccgtgcaatctactgtttgtgagtgtccaagtattatgagaaaaagtgtctatacaatgacagacttatgtttcctcacaaagttcttcacaaagagtgaaatatgtttttatacctctcggtttcagttagaggcatattttgtgccatatttatgttaatgtgcctatacatgatgagtgaattatttcagtcatacattgcctaaatcataactttaagatgcttgggaaagaatcaacagctaaaagttcatgaagttctaatgtctgtgttccaaaatacgtcacattattaggatgcagggagagatgtgtgtgcgctccctggggtgggcatttctagttactagaccatctccatttttagcatttggcatcttcatgatacttttatacatatgacattaataggagagcaataatacgattttacagatggaataacagatgtgcctgcattcactgaaagagtgcaaatattaagtccttgtgacttcaactgactcttccaaattgtatgaatttatcaatgtattagataaacccagtttcagaattataaagaaaaactgttagaccaactaatgtggctaattaacagtaggacgatttctagcccgagggtttaaaatggacttcaagtcctgttcttgccttttattttctgaacttgccacttttgcattctttgagttcagtttaaagacagtttgagtccaatttagaccctcgggctagaaatcatatcactgttaattagccaccttatttggtctaacagtgggtttacctaatacattgataaattatttcaaaggtatttttatagttcaaatcacttcacttttaccctgataaatataaatgactaggaatgatcttcagatagcctttagcacctgcaaccaatctgacaataatgtgttcatcaggtacctgtggattaaatcacacaccggcatatttaagctgaatgtcagtctggaaaatgaatgtactatattaactgaaataccactctttgtgtaggtattctgtcatatatttaagaaaaattaaatagcatgtaaatcgtatgacaacaacttaagtctttcttcaaagtgcatgtggtcctttgcaatacctcattcagccaagtatttgttctcttcctcattcagtataaggcagctttcaatttgcttagaaggcaacattagaagggtagagtttaatcagaaacatagaattttaaagtgtgggttcaactgaataaatctgaatttctgtaggaagtaaagaattaaaaaccgatttaaagattgcaatatataatcatttttaaagtatttgattaaatctgataggttttccagaaatgaaaaaaagtcagttctaaaaccaaagctgatatttagaaaatgtgaaaatgtaaatcagccctatccataatagtttctctaaaactttatcttaaagagtcattttaaaagaatataactattcaaaaatgtaactgctatcttaagttttaaaataagttaagacattttgaaatatgaata

SEQ ID NO: 461015 - DNA, 1776 bp, Homo sapiens
tcccacagctagactgccacagagctggagggagaggagagattaaagtgaggagagagctacaaccaagtaagcaagtgtcagggctcaccaaccatgcaaggacagggcaggagaagaggaacctgcaaagacatattttgttccaaaatggcatcttacctttatggagtactctttgctgttggcctctgtgctccaatctactgtgtgtccccggccaatgcccccagtgcatacccccgcccttcctccacaaagagcacccctgcctcacaggtgtattccctcaacaccgactttgccttccgcctataccgcaggctggttttggagaccccgagtcagaacatcttcttctcccctgtgagtgtctccacttccctggccatgctctcccttggggcccactcagtcaccaagaccgagattctccagggcctgggcttcaacctcacacacacaccagagtctgccatccaccagggcttccagcacctggttcactcactgactgttcccagcaaagacctgaccttgaagatgggaagtgccctcttcgtcaagaaggagctgcagctgcaggcaaatttcttgggcaatgtcaagaggctgtatgaagcagaagtcttttctacagatttctccaacccctccattgcccaggcgaggatcaacagccatgtgaaaaagaagacccaagggaaggttgtagacataatccaaggccttgaccttctgacggccatggttctggtgaaccacattttctttaaagccaagtgggaaaagccctttcaccctgaatatacaagaaagaacttcccattcctggtgggcgagcaggtcactgtgcatgtccccatgatgcaccagaaagagcagttcgcttttggggtggatacagagctgaactgctttgtgctgcagatggattacaagggagatgccgtggccttctttgtcctccctagcaagggcaagatgaggcaactggaacaggccttgtcagccagaacactgagaaagtggagccactcactccagaaaaggtggatagcaggtgttcatccccagattttccatttctgcctcctacaatctggaaaccatcctcccgaagatgggcatccaaaatgtctttgacaaaaatgctgatttttctggaattgcaaagagagactccctgcaggtttctaaagcaacccacaaggctgtgctggatgtcagtgaagagggcactgaggccacagcagctaccaccaccaagttcatagtccgatcgaaggatggcccctcttacttcactgtctccttcaataggaccttcctgatgatgattacaaataaagccacagacggtattctctttctagggaaagtggaaaatcccactaaatcctaggtgggaaatggcctgttaactgatggcacattgctaatgcacaagaaataacaaaccacatccctctttctgttctgagggtgcatttgaccccagtggagctggattcgctggcagggatgccacttccaaggctcaatcaccaaaccatcaacagggaccccagtcacaagccaacacccattaaccccagtcagtgcccttttccacaaattctcccaggtaactagcttcatgggatgttgctgggttaccatatttccattccttggggctcccaggaatggaaatacgccaacccaggttaggcacctctattgcagaattacaataacacattcaataaaactaaaatatgaattcatctgtca

SEQ ID NO: 461016 - DNA, 1586 bp, Homo sapiens
tcccacagctagactgccacagagctggagggagaggagagattaaagtgaggagagagctacaaccaagtaagcaagtgtcagggctcaccaaccatgcaaggacagggcaggagaagaggaacctgcaaaggctggttttggagaccccgagtcagaacatcttcttctcccctgtgagtgtctccacttccctggccatgctctcccttggggcccactcagtcaccaagaccgagattctccagggcctgggcttcaacctcacacacacaccagagtctgccatccaccagggcttccagcacctggttcactcactgactgttcccagcaaagacctgaccttgaagatgggaagtgccctcttcgtcaagaaggagctgcagctgcaggcaaatttcttgggcaatgtcaagaggctgtatgaagcagaagtcttttctacagatttctccaacccctccattgcccaggcgaggatcaacagccatgtgaaaaagaagacccaagggaaggttgtagacataatccaaggccttgaccttctgacggccatggttctggtgaaccacattttctttaaagccaagtgggaaaagccctttcaccctgaatatacaagaaagaacttcccattcctggtgggcgagcaggtcactgtgcatgtccccatgatgcaccagaaagagcagttcgcttttggggtggatacagagctgaactgctttgtgctgcagatggattacaagggagatgccgtggccttctttgtcctccctagcaagggcaagatgaggcaactggaacaggccttgtcagccagaacactgagaaagtggagccactcactccagaaaaggtggatagcaggtgttcatccccagattttccatttctgcctcctacaatctggaaaccatcctcccgaagatgggcatccaaaatgtctttgacaaaaatgctgatttttctggaattgcaaagagagactccctgcaggtttctaaagcaacccacaaggctgtgctggatgtcagtgaagagggcactgaggccacagcagctaccaccaccaagttcatagtccgatcgaaggatggcccctcttacttcactgtctccttcaataggaccttcctgatgatgattacaaataaagccacagacggtattctctttctagggaaagtggaaaatcccactaaatcctaggtgggaaatggcctgttaactgatggcacattgctaatgcacaagaaataacaaaccacatccctctttctgttctgagggtgcatttgaccccagtggagctggattcgctggcagggatgccacttccaaggctcaatcaccaaaccatcaacagggaccccagtcacaagccaacacccattaaccccagtcagtgcccttttccacaaattctcccaggtaactagcttcatgggatgttgctgggttaccatatttccattccttggggctcccaggaatggaaatacgccaacccaggttaggcacctctattgcagaattacaataacacattcaataaaactaaaatatgaattcatctgtca

SEQ ID NO: 461017 - DNA, 782 bp, Homo sapiens
tctgggtcacatttttgtggatacagaagccaggctggagtggaccagtgagtgagttggagacatattttgttccaaaatggcatcttacctttatggagtactctttgctgttggcctctgtgctccaatctactgtgtgtccccggccaatgcccccagtgcatacccccgcccttcctccacaaagagcacccctgcctcacaggtgtattccctcaacaccgactttgccttccgcctataccgcaggctggttttggagaccccgagtcagaacatcttcttctcccctgtgagtgtctccacttccctggccatgctctcccttggggcccactcagtcaccaagaccgagattctccagggcctgggcttcaacctcacacacacaccagagtctgccatccaccagggcttccagcacctggttcactcactgactgttcccagcaaagacctgaccttgaagatgggaagtgccctcttcgtcaagaaggagctgcagctgcaggcaaatttcttgggcaatgtcaagaggctgtatgaagcagaagtcttttctacagatttctccaacccctccattgcccaggcgaggatcaacagccatgtgaaaaagaagacccaagggaaggttgtagacataatccaaggccttgaccttctgacggccatggttctggtgaaccacattttctttaaagccagtggcaaaagccctttaccctggatattccagaaagaattcccttcctggtggggaacagtcatgtttttcc

SEQ ID NO: 461018 - DNA, 2610 bp, Homo sapiens
aggccgaggaggcgcccagagcgagtgagggctgtgagggctaccagcatgctgtcacctctcaaaagaagacggccactgtcctccagtcgccagaatggtagattcactgccagcatgcactgtgtgcctagaaaaactgcaggcactcaatgccagcctgtgaaagcacccatgggtgctgtaccctgcagaggcacaggggaagagctgcgcaaggtcttcaaagcccaccaccacttatatcagtgtgcccttaatagtagatccatgccatacctgcaggctctatacatctctcaccagttcaacctatggaggacaatggggaatgaagaactagcaccaaatgtaatcagctataacaagaagattcttaaatttatgtggaaattcaaagagccaaatagtaaaagcaaccctgaacaagaacaaaacaagatcatctttactataatatattaaaaatataaatgactacaaattgcaagaattcaaagtagaagaactgcaagtgtttgagaaataattgcgaaacagagtacagcatatggtagaactgaaggattttggctctggaaagcaatgcctaggttttgaattcagattctgtcatttaccaactttgtgaccttggatgaattattgggggctatgcctcaatttcatgtcacatacaatggtgctaatattaacacctatcttattgggttgttgtgagaattcaataaattaaattcttagattattgaaataatcaatttaaataaataatttagtgtccggaacatatttagcattcaataaacatgaggtattatttactcagtaaaagaggaaataagtttcagggaaaataatgtagtggaggaaggctactgtgattagaacacagggatcaagggagagagaactagaaggtgaagtaaaggaggaaggtagacacataatagttggtcataatgaatgtttagaaagtcattataattgcaaatgcaaacaaatggaggagtttaagcagggcagtgacacaatcagatgcacatttgagaaagttttctgtcttctgtgtggaggataaaatgcagttgtgaaaaactaaagagagaatatttgtataaagttgtatatacttactatgagttgtgtattttgtacccaagtgggcatgttgaaaagacgattgaaatagaagtccataactcatgggagagatgaggagtagagataaagaattatgtgtcagatagatggtatttaaaataaaaatattaatggaaattatgatgatagatatttagttatgcatatcttcttctcgccagcctctgtgcaaactgctttataagcatcatctcatttatctctcaaaatgaccctaagggataggttctatttaatatccatcttaagataaatttaaactagagtaggagtaatttgaccatgatcacaaataataagtagtagagctatgatttgaataaatgccagtctgactaaaagctttctttttcaattatgtgactttttaaaaaacatcaaatcacctctcccaagtcacagaattaaaaatgtggctttctaacagaagataactatttaagtctgtcactatgttgtcttaaacatttaacttatgccatatcacacaagaatgcaaatcttcatttgaattattttgtattaagagaataatagttcctccatcatataaatttatgttatattaaaaaaaaaaaaaaagtttatggtgaataatcagcatctgagcatggcttttcagttactgaaagatcccgctggaagccatagcatataatcaaacatgctgctgctgaccaggaggagtgactgcataatagctgcaaggctatggctcttggtctttaattctttggataaatgctgctacaaggaagaaaagtgaggatacaaacctctctaaacaggatgcttttcttttgaaatctgcagggcccctatgtctcccaggtttgaaattccttctctaagcaggagtaatgcttttttaaaaaggtatcttcttgtatattttaatgggcctgatattgcagctccaaatatttttaaaaaaggaatctttggcagttcttatggatgctaaactgaataaatgcagtttctacagtacaaagtatacaattatatttccattctgagaaacatatgttactaataaaaactctttcacaaaatcagtgattttttttttaaaaaaaggactcattttctaataacaagaaaaataacctgatatgtcaaaaatggtttccatttgttgtattgcagaacaattgcttttatttcagtttatgacagaaaataaagtatttcagttctatttttgcattccatgatgcaatttttcatacataatttttataagcaatgtataagttcttaaattattttttagagaaatattgtacaataatttgttaatcgtgggaagggaaaattaaaccatcatcacccatttacgctataattcgagcatgaaatggcagcatagtgttcggaaaatactgtaggcttggaactagaaatacctgaaataaaactttaccttcattatttactaactgt

SEQ ID NO: 461019 - DNA, 744 bp, Homo sapiens
ttgataactttttctaggtttgagatgttctctgtaactatccttttaaataaactctccaccctaatctctctctctctctgtctctcctctttaaggccaggtcatactttggtagatgcaaagcatggagttgagataaccagtgatggcatggaaactattttcattgactcagtagaggattctgagccagaggaggaagaggaaggaaagggctctgaaataggaaagaaaaggaagcaaaagaaacccaaattgaaaaacttgtgcgctactggtgttatggaaaatccttatgaaaagctagaaaataataaacaatgcccaataatgattgtacttttcccagttgagcatattgccacaatgaatgagattgaggttctctcaacaaaaatggatgcaatgctgcttggtgaaaacttagtgtatcccacagcaagcaatttgaaatattttactaactcttctttagctctttttcaggaggagattgagaggcttacggagtttgtgcaagtgtctgaatgcatgcagcgggtgctttgcgaggtacagatccgctgaagtacttattccattttctctgtggtgtgcatttctgatgtgaggctttcacgtgggcatcagtgtcctgtccggctcacccggaggaaaccaacctttcaaagttactcttaacagctgttcattgaattgcttctgtgggccaagcacagtgctagccgctgagggtagact

SEQ ID NO: 461020 - DNA, 505 bp, Homo sapiens
agtgagatcttcaaatttcctgtcgtctgtgttctcatgttctccccttatctgagattaagaaacgcacctgcatgtagtgttttcatttggtgatcaggactgaacagagagaactcaccatggagtttgggctgagctggctttttcttgtggctattttaaaaggtgtccagtgtgaggtgcagctgttggagtctgggggaggcttggtacagcctggggggtccctgagactctcctgtgcagcctctggattcacctttagcagctatgccatgagctgggtccgccaggctccagggaaggggctggagtgggtctcagctattagtggtagtgggtgccacgaggcccctgcgctggccttcacacagaagaccatcgaccgcttggcggtaaacccacccacgtcaatgtgtctgttgtcatggcggaggcggacggcacctgctactgagccgcccgcctgtccccacccctgaataaactccatgctccccta

SEQ ID NO: 461021 - DNA, 909 bp, Homo sapiens
agtgagatcttcaaatttcctgtcgtctgtgttctcatgttctccccttatctgagattaagaaacgcacctgcatgtagtgttttcatttggtgatcaggactgaacagagagaactcaccatggagtttgggctgagctggctttttcttgtggctattttaaaaggtgtccagtgtgaggtgcagctgttggagtctgggggaggcttggtacagcctggggggtccctgagactctcctgtgcagcctctggattcacctttagcagctatgccatgagctgggtccgccaggctccagggaaggggctggagtgggtctcagctattagtggtagtggtggtagcacatactacgcagactccgtgaagggccggttcaccatctccagagacaattccaagaacacgctgtatctgcaaatgaacagcctgagagccgaggacacggccgtatattactgtgcgaaagacacagtgaggggaagtcattgtgagcccagacacaaacctccctgcaggaacgatgggggggaaatcagcggcagggggcgctcaggacccgctgatcagagtcatccgcagaggcaggtgcagatggaggctgtttcctgtcaggatggtccccttggtccacattccagggctcaaggcattttcttggagctcagtgattggagcctcttagaaagagattagaaggtggggacctcacggattttttaaaaagttagagaacggttgtcatcacttttttaaacgctgagagtcatttgttatctaatatataacccatcatgaggaatatctctagtgtgcttgggaagcatgcatattacgctgctgttggttggaatgttccgtagatgtctgttagggcagtttgttcgagagtgcttgagtccac

SEQ ID NO: 461022 - DNA, 997 bp, Homo sapiens
ttcagagccaagaagacttggtgaagaggtggcagagcagaatgagtagtggaaggaaggagagccaagaggaacgcgggaaagagatgtccaagtaccagggacatgtttgccaggcacgcactttggcccagcaggatactaggcgtggtggagatcctgagaagtgtgaactctgtctctccctgaaaggatttagtttacaatctattcatttcctggaaaggctttcttcttcttcttcttcttcttcttcttcttcttcttcttcttcttcttcttcttcttcttcttcttcctcttcctcttcctcttcctcttcttcttcttcttcttcttcttcttgttcttcttcttcttcttcttcttcaggaacggcagaggtagttagtaaggaagaaatcaaagatgacctcactctccaaaatttcaacatttatcatgcctgtggaaatgctttatcaccgtaaattcaccatattttacagatgactacctcatcttcctccaaaatgaaacctgcctcgtacaacaggtatttactgaccaccccttttgtgttaggcgttgggctttggatgcttaaacatagaaaggccgataacatagagacgttgtccttgcctagtttacagtggaatgagcagcactgccacgttatgatacagtgtgatgatacagtgtgttctatctggttaagatacaaagtgctaggccctagacagagggtctcctgaatcccctggctctgtgaacactggcatcattcttcttctcactccagcacaaaggcttagttatcagcaattttgttctgtcctccccaactcaccctttgatattcaattagtctgtaactttcctgacgttcttcagattaccccttttgcttacttctatcacagacctgaacccagggccttaatacctcctacttgggctaagttccttgctttctaagctgatttcttcacccctgagctgacttccttcaaag

SEQ ID NO: 461023 - DNA, 1221 bp, Homo sapiens
tttttaggctgagaggaagcatgtccagggctgacacgagaacctcctccctaagccctcccctcatctccctcctctcaggggtccctggaatgcctccatcccttattgtctgtccttaaaatcttaaagggaaaccaggaaggagagaaggagagagactatgggaatctcatccctggttctgattaagcttcaattagaaataaaatatgtcaatcactcctcctggaaggggttcctgctgtcggggctggttatgcaaagcactccaaggggaatacaggaagggggaggtggggtctacctagaaaacaacatggaaggaccagagggcaggcgcaacggaagtcactcacctgtcccaggccaagaggtctccacaccaggctctgttcttctggcagtgcccctgaccttttgtgtcctggaatacagcagaagaacaggatggcatggccctgctggacacagtacttgggaaaagaccacagactcaactgcttgctccacagcacgcacaagggccactgccaaaaatataattacccagaaatgtggaaccgagacaatgcagcagaggggactgagcagggacagtgggggagggacagagaggctagaggaagtagggctggtcctgagggacggatagagtccttctcagtggcccagtgagctgcggctggggaataagaggccccaggcaccaaggaagatggatctgcaaactagaagcttctaaggaagttggcttgactctctaacctttctggaaagagagaagccctttccatcctgcaaaattgtgaatggtcactttgcaatggaagaatcaggccgtcttccccaaacagaagcagaggagcaacccacccagctctcctctgcccagtccgtgttaggcaaaactaacctccctgatcctcagaggggatgggaacaaaaggtgggctacaagctcatctgtggagaaactacagcggaatatttgctgagatctttgacccagaggcttttgtgcaactgctaagctcatttcaggtcacgtgacactcttgtgccagtcctcactggtgtgatagttacagaaaagctggcattcgtctttgctcgaacaatgccccatcaacgtacaatatagaataaatgattattaatgacaagttttggggtatctctgaattgctatgactatttccaaccctgagaatgtgtcct

SEQ ID NO: 461024 - DNA, 1114 bp, Homo sapiens
aatcatgcacagcctggggcaagaacgcgctatggccgccccaactcggatgctctgtcgggatctctggctgctcctgccgtctcagcccggaggctccacttcaggcagcctggccaccctcccttcctctctgtttcccactatagcatgctttccttttttttgtttgttaaactttgcggcactccccgcatactgtagatccacgtctgtttccctgtttgacttccttcaggagggcaagggacttagggacccggtgcctagcacagtgccttgcccagagtcagggatcagcaaatggtgaatgagtgaatgaatgaatgaatgagtgagtgaacccgagtggtcatctagtcctgtctgcaggtgaggaaatcgaagcccggagaggggaaattctttgcccaagatcacatgattactacttacagatgtcctttattcaatgtaagctcacgttttcttgattttagcaatacttgtaataatttttaaaatataaatatatatgaaataaaagttcatcattgattgactatttcctatgtggcgactcctctgcttggcactcgacaacactcttggccactgtgtcatggttcccaaacttgtctgcacattagtcccctggggagctttaaaaatacaccccagggattgggatttagctggtctttggtgtgggctgcgctttggcatttttgagagatcccctggttctcatgtgcagacaagttctgagacccagtgtattacactgccctgcctcattcaccagggcagggggacattcacattcagtatcagccagggccgtccttttgggtcacttaattttcacaacgacacagtgaggcactgctctcctcattcccattttacagatgggatgccgagtttcggtggtcggccaggcccatgcggtggtggagtgaggactggaacagtggcatgtgtgactcagagacctggacctctgaccggctgcactgtgcactctgcagccccgcgggcctgacaatgtcccgcctgcctgtgagggcccagtgtacagaagatcacgcctggctcttcttctgtttcttgctgtcacccaggttctctcact

SEQ ID NO: 461025 - DNA, 979 bp, Homo sapiens
ttagagccagtgaggagcatatccccctgccccaagctccacccccgagcagctgggggtgggctggcgcaacgtgtggagaagcgaaccagcattcaggccaggacctgggctggaatggactgggctcgggtggcaagggggccatctggacaaagaccgtggccctgaatctgcctcccctgagcctggaacggaggtggagaccccgaggcagcaacagggagaagaaatagagacgctgaggcagagagaccagaagactcagagacggggagactaagagacagacccagcaacaggcggcctcacgggggcccgcggcgacccggagagggcgaggcaccgggacacagacccgggccgagaggagcccccgcgaggcgcagggccgtggcgcgcgggcgcagggtccccggcggggccagggtggccacactcgccgggcgccccctcccgggccgctcgcccaagatggcgatggaggggcgggtgaggcggcagcggccctggcccccgcgccggccccagctcgggcccgggcccccgaggccgcgcccccgcccgcggcgccgcgcctccccgggccactgacgcccggcgcgctctccccccgcggcggcggccgaagcacggggaggcggcggcggcggcggcggcccgagcccagccccatggcgcggggggacgccggccgcggccgcgggctcctcgcgttgaccttctgcctgttggccgcgcgcggtaagggcgggcgcccggagaggcaggagcgactgcggagtgctggtgcgcccgcgccctggtctgcatcgggctgcggggctggctcaagccggagtcccgagcaagtgcgggggctgcgcgtccaggtgcccgcgatgcctgcgcgggggtctgcgagctgcggccggggggcgtttgtggggcgtgcttgtccgcagtgggtgtgtgcctttggttcgcagagtctggagtc

SEQ ID NO: 461026 - DNA, 1853 bp, Homo sapiens
  misc_feature (1519)..(1519): n is a, c, g, or t
  misc_feature (1524)..(1524): n is a, c, g, or t
  misc_feature (1526)..(1527): n is a, c, g, or t
ttagagccagtgaggagcatatccccctgccccaagctccacccccgagcagctgggggtgggctggcgcaacgtgtggagaagcgaaccagcattcaggccaggacctgggctggaatggactgggctcgggtggcaagggggccatctggacaaagaccgtggccctgaatctgcctcccctgagcctggaacggaggtggagaccccgaggcagcaacagggagaagaaatagagacgctgaggcagagagaccagaagactcagagacggggagactaagagacagacccagcaacaggcggcctcacgggggcccgcggcgacccggagagggcgaggcaccgggacacagacccgggccgagaggagcccccgcgaggcgcagggccgtggcgcgcgggcgcagggtccccggcggggccagggtggccacactcgccgggcgccccctcccgggccgctcgcccaagatggcgatggaggggcgggtgaggcggcagcggccctggcccccgcgccggccccagctcgggcccgggcccccgaggccgcgcccccgcccgcggcgccgcgcctccccgggccactgacgcccggcgcgctctccccccgcggcggcggccgaagcacggggaggcggcggcggcggcggcggcccgagcccagccccatggcgcggggggacgccggccgcggccgcgggctcctcgcgttgaccttctgcctgttggccgcgcgcggggagctgctgttgccccaggagacgactgtggagctgagctgtggagtggggccactgcaagtgatcctgggcccagagcaggctgcagtgctaaactgtagcctgggggctgctgccgctggaccccccaccagggtgacctggagcaaggatggggacaccctgctggagcacgaccacttacacctgctgcccaatggttccctgtggctgtcccagccactagcacccaatggcagtgacgagtcagtccctgaggctgtgggggtcattgaaggcaactattcgtgcctagcccacggccccctcggagtgctggccagccagactgctgtcgtcaagcttgccacactcgcagacttctctctgcacccggagtctcagacggtggaggagaacgggacagctcgctttgagtgccacattgaagggctgccagctcccatcattacttgggagaaggaccaggtgacattgcctgaggagcctcggctcatcgtgcttcccaacggcgtccttcagatcctggatgttcaggagagtgatgcaggcccctaccgctgcgtggccaccaactcagctcgccagcacttcagccaggaggccctactcagtgtggcccacagagggtccctggcgtccaccagggggcaggacgtggtcattgtggcagccccagagaacaccacagtggtgtctggccagagtgtggtgatggaatgtgtggcctcagctgaccccaccccttttgtgtcctgggtccgacaaggtgntgtgntnntcagctctactacctatgactagttagaaatgcagaatctggggccctgcctcagtcctctacatcttaacaaggtcccctgctaatctgtgattcgtgtgcacagtttttctatgcctatgtacagttttctccctgaaattgagaacatgtgccgcatttatagttccaagtcctattttcattcaacagtataccataagcatttctctatctttaaaactttttcaaaaaattgtaatgactaatattccatactttaaatatagctataatgtaattcaccagttcctgctgttggatttttaagtcctttccagttatcc

SEQ ID NO: 461027 - DNA, 1562 bp, Homo sapiens
cgctcgggtccccccttccttgcccaaagaaacgatgacaacccacaaacgccacttcttccttcgcagtttgggaagccactgtaatgcgtcatttctgaggctcaggaaagacctttacccagaaggtgggggtgggggtgtcttgaatgtcccaaagcccaaggctggcccttatgtagagttgaggaagccctggccagggacaggggagtgcaagggaaggctcggtgacccaggcacatggtgcaaacctaggacctccacctcccagctctgtagccaggggcagctcactccaccctggtccctggagtgtgcttacaggcttccgtgttggggggctgcgaggcctgggcagcaaaccgccttgtactgcctctggcctgtggatagtagatgctcaataaacctctccttcctgtcagaaactcagtctccctatgtggatgacagcattttcctaaaggatctaaagttccatccaccttaaactctgcctgaagggaagactatgaaactagaaaagaaaatggtgtggatttgtgtgctactgcagacactgctgcgacatatattaaggagcatggaacggaaccgcgtggatgataaagtctgcgtggtgtttacaaaggaatattcataagcactttctgagaagccccgtgcagctgctaacagtgactgcctaggggaaaatggacttgaaggagtagaggccaacttttcattttatacctttctatactttttaggactaccacctatgtacgtgcattttatttttgttaaatgttcgcaggggatatctggcaggacaaggaactggctggaaaggggcgcgaggagatcttctgggtgacggagatccaggtggtggttactcagatgtattttatccttcaatgagaagtttatttcgaaaacgtcctgtgtctcttccaaagatagctccagctgggcaaagtggcagctctgtgggctccaacggaagaggccaaaaggcccatcctcctcctgtcccctgggttcaattcacagccctgcctgtctctagctgtgtgatcctggacgtgcctctctgcttcctcagctcctgcttcaagacaggcctaaccaaattttgagaagtccccagcagagctcccgaccctaatcagagaagaagaatgaatgttctgagtgggtaccacatggcaggtgctattctaaatactgaacagctgtgaacccatttaatccccgtaagaaactggtgagcttggtttcatttgactcaagaggcccagagacgaaagcaactggtccagggtcacacagccagcaggaagtggatcagggttggaacctgggcagtctggccctgaagcgctgcagaaagtattattttgggagcaaataggtaataggtggtgagagccacctaaaaatacccctcctctctggcccagtaaccacttctagaaatctgccctaaacaagtaactcaaataaagcgaaagctgagatacacgacggtcatggctgcgttatctataactgaggaaagctgggaacgaccc

SEQ ID NO: 461028 - DNA, 3006 bp, Homo sapiens
aggctgagtgttcttcgccattaactgtggccccgacaggcctgggttactgcggccaccgccacagcagccttggcgctatggaggagcccggggctacccctcagccttactgggggctggtcctggaggagccacgcagggttgtggcagcactgcctgaaggcaggagaccagattcgaatccttatggatttccatgggaattggtgatatgtgcagctgtccttggatttgttgctgttccctttttcttgtggagaagttttagatcggttaggagtcggctttatgtgggaagagagaaagagcttgctgtagcgctttctggactaattgaagaaaaatgtagactacttgaaaaatttagccttgttcaaaaagagtatgaaggctatgaagcagagtcacctttagaggatgccagctttgagaaggaggcaacagaagcacaaagtttggaggcaaactgtgaaaagctgaacaggtccaattctgaactggagcatgaaatactctgtctagaaaaggagttaaaagaagataaatctaaacattctgaacaagatgaggtgatggcggatatttccaaaaggatacagtctctagaagatgagtcaaaatccctaaaatcactgctagctgaagccaaaatgaccttcaagagatttcaaatgaatgaagaacaaatgaagatagcaatacaagatgctttgaatgaaaattctcaacttcaggaaagccagaaacagcttttgcaagaagctgaagtatggaaagaacaagtgagtgaacttaataaacagaaaataacatttgaagactccaaagtacacgcagaacaagttctaaatgataaagaaaatcacatcgagactctgactgaacgcttgctaaagatcaaagatcgggctgctatgctggaagaagacataacagatgatgaaaacttggaattagaaatgaacagtgaatcggaagatggtgcttacttagataatcctccaaaaggagctttgaagaaactgattcatactgctaagttaaatgcttctttaacaaccttagaaggagtaagaaaccaaatctatattcagttatctgaagttgataaaaccaaggaagagcttagagagcatattaaaaatcttcagacggaacaagcatctttgcagtcagaaaacacatattttgaaagtgagaatcagaagcttcaacagaaacttaaggtaatgactgaattatatcaagaaaatgaaatgaaactctacaggaaattaatagtagaggaaaataaccggctagagaaagagaaattttctaaagtagacgaaatgatcagccatgccactgaggagctggagacctacagaaagcgagccaaatatcttgaagaagaacttgagagaactattcatttttatcaagggaagattatataccatgagaaaaaagcacatgataattgtttggcagcacagaccgctgaaagaaacctcaatgatttaaggaaagaaaatgctcacaacagacaaaaattaattgaaacagactttaaaattaaatttttagaaaaagatccttatgcacttgatgttccaaacacagcatttggcagagagcattcctcatatggtccctcaccattgggtcggccttcatctgaaacgagagcttttctctatcctccaactttgtcggagggtccactcagactctcacctttccctccagggggaggaggaagaggcccaagaggcccagggaatcctctggaccaccagattaccagtgaaagaggagaatcaagctgtaataggtttactgatcctcacaaggctccttctgacactgggcccctgtcacctccgtgggaacaggaccgtaggatgatgtttcctccaccaggacaatcatatcctgattcagctcttcctccacaaaggcaagacagattttattctaattgtgctagacgctctggaccagcagaactcagaagttttaatatgccttctttggataaaatggatgggtcagtgcattcagaaatggaattcagtggaaatgataccaaagataatcttggtaatttaaatgtgcctgattcatctctccccgctgaaagtgaagcaactggccctggctttgttcctccacctcttgctccaatcagaggtccgttgtttccagtggatacgaggggcccgttcatgagaagaggacctcctttccctccacctcctccaggaaccatgtttggagcttctccagattattttccaccaagggatgtcccaggtccaccacgtgctccatttgcaatgagaaatgtctgtccactgaggggttttcctccttaccttcccccaagacctggattttccccccctacccgcacattctgaaggtagagtgagttccctttagggttgagtctgccttcaaatgagcctgctgctgaagatccagaaccatggcaagaaacttgacaatatttttgctctcttcaaaagtcattttgactattctcattttcagttgaagtaactgttgttacttcagtgattacacttttgctcatattcaaacttaatggaattataattctcaggatagtattttgtaaataaagatgatttaaatatgaatcttatgagtaaattatttccatatcattttattctagatagtataactattttaatttgtttaactaatccactattatataaacaacagtgggagatttatagatgtaatcttgcaggtggggaggctttacatttgaaaggccatggcattatgccaagaactgtatttactgtggttgtagacaaatgtgaaagtaactttatgcttaattaaataaattttacttgattaaaaaatatatataggttgcattattcttcagaacagtttgtatttatagaaaaagagaagacagcattgagttcccatatataaactctcctagtttctcctgttaacatcttacgttag

SEQ ID NO: 461029 - DNA, 1232 bp, Homo sapiens
ctgtgcgccaaaaagccgggcggcttcggagccagagcagcggctctgcggcgcaggcggcgggtcggggcagccttgaagccgggatccggcccgaaggggtctttttggagttcctgagctcagtgccccagaaggcacatacttcatatgaaatatgaaggatttcatactgcacaagaaaaagccttgagaaagacagaattgcttgtggaccgtgcgtgttccaccccacctgggccccagaccgtgctgatccttgatgagctctcggattccttgtgcagagtgaccgacttgtggaggggctagccagacagcacattcaagctgtatgtcccgggatgattccaatgaaggctcttcacaggaacacggagagaggccatgccctgaccctgcagacggagctgtggacaatgctgtttaaagccagcagtggtagctgaaaagtgagaggacgctgatgaagaacattgcagacacaaagaaaagaaaaaagtaaccaacatgtttcaaatgtttcaaacatatcaagtgagtcttctgaccattttgtgaagcaaatttttattaaacatattcactataaatgtcacaaagatcatgagaatgtcatggtaatgatgtattttacctttggacaactctctgtagacttcctgcggcaaagcttgtgcaaatagagacatatattaagaaaccaatttttatgcaaaattatcctaaacactagttttataaatcctgttgaaagaacactaagatgttgctttctaatggccatctataacattttctcaagaaatacaaaagaaaaaatagacaagaacatgtagctgttcaagcacatttcttttcttttttctttttttttttttttaaagatacaaggtcttggctgggcacggtggctcacacctgtaatcccagtactttgggaggcggagacaggcggatcacttgaggttgagtttgagaccagcctggccaacatggtgaaaccctgtctctactaaaaatgcaaaaattagccgggcatggtggtacacgcctgtaatcccagctacttgggaggctgaggcaggagaatcacttaacccagaaggtggaggttgcagtgagccaagatcgcactgctgcactccagaggcaggcagatcacctgaggtcaagagttcgagaccagcctggccaacatggtgaaaccccgtctctactaaaaatgcaaa

SEQ ID NO: 461030 - DNA, 553 bp, Homo sapiens
ctgtgcgccaaaaagccgggcggcttcggagccagagcagcggctctgcggcgcaggcggcgggtcggggcagccttgaagccgggatccggcccgaaggggtctttttggagttcctgagctcagtgccccagaaggcacatacttcatatgaaatatgaaggatttcatactgcacaagaaaaagccttgagaaagacagaattgcttgtggaccgtgcgtgttccaccccacctgggccccagaccgtgctgatccttgatgagctctcggattccttgtgcagagtgaccgacttggtaagatgctttgcctcagacttgaagctacctctctttcaacctgttaaaatttaagtgaaatttatcctttgttgtttactgttaatattagattataaagttaaaaatgtctgaaactatttgagatccattgggtataattttttgtgatgaaatacatcattaggaatggggaaaatgttataggaaaaggtgacatttagaacttgtactttaatatgtgtatttaataaaatatacctgtaatata

SEQ ID NO: 461031 - DNA, 1488 bp, Homo sapiens
  misc_feature (1)..(1): n is a, c, g, or t
  misc_feature (12)..(12): n is a, c, g, or t
nattcggcacgnggacttctttcacccagcataactcatccttttttggaaaatttccttccacccatacacctgatttgagcattaacacctttcagatgattatatgttcaccacaagcctcccgctcttaaggaaactgataaagtatcttattgtaaagggtttttctctggagtgaagttgcaggctctgggtagttctgttgtgctgggtttttgttctgtgcctcccgtatgtgcataggaaatgtgtctttgaatgatgggggagctgtggaacgcactgccaaaaggaggtttcataccctgttcacctgattgtgtcacagaaatcagaaaaggaaaatctgtgtcagtgaatttcactattcaagtacagtcaacccctccagattcgggcatctgtagagtcaaccaaccttggatcaaaaatatctggaaaaaaaaattgcatcggtactgaacacatacagacttttttccttgtcgctgttgcatgaaataatacagtgtaacagctatttacatattatttacattcattaggtattacaagtaatctagagatgattcagtgtaagggttgtgctgtgtgtcagttatatgatttgatgtatggagtgtgctgtgcgtcagttatatgcaagtactacaccattttatatcagagacttgagcatctgtggatttgggtatctgtaggaagatctaaccattgcccactgatactgaggggtgactgttggcatggctgtcacaaatcccagaattcactgtgtatttgttgtcttagtcttcatcttaatcagtattctaggatttttttctacatttttgcttgtggtcttcactaaaatattttaacttttctgccctgtatcttatcttattttgacatttttaatattatgtataatatctcattttgaaaacttaaaaaaaaaaaaaaactatgtgatttatatatgtagttctccgggtaaaaaagaacctttctcctttttgaatttttgagatgttacctaccagtaatgttggtactattataaggcaatcgtcttataaactttttcactaaatagtcattttgttttctttgttttcaacacagtttttacgtaacagaactgttttcctcatcactattagaaatcagttgttaatgtgcatgctagtgttttgaattttaatattgattataaattcacatgtagattagtaatttgtaaaaaaaaaaatgtaaatttatgtaactcatttttcagatactttggtactaatgttattttatcgttaccaattcttacaacaaatataccaaactatggatttaaatgttttggcattaaaaactatttgataataaaatcaggaaattttaccttgtggtgattttatttcatgttatagtcacacatcttcttggcaaataaaatatgtagtgttttgtagtttctctgctttttgttacaattgacatgaaaac

SEQ ID NO: 461032 - DNA, 1230 bp, Homo sapiens
  misc_feature (1)..(1): n is a, c, g, or t
  misc_feature (12)..(12): n is a, c, g, or t
nattcggcacgnggacttctttcacccagcataactcatccttttttggaaaatttccttccacccatacacctgatttgagcattaacacctttcagatgattatatgttcaccacaagcctcccgctcttaaggaaactgataaagtatcttattgtaaagggtttttctctggagtgaagttgcaggctctgggtagttctgttgtgctgggtttttgttctgtgcctcccgtatgtgcataggaaatgtgtctttgaatgatgggggagctgtggaacgcactgccaaaaggaggtttcataccctgttcacctgattgtgtcacagaaatcagaaaaggaaaatctgtgtcagtgaatttcactattcaagtacagtcaacccctccagattcgggcatctgtagagtcaaccaaccttggatcaaaaatatctggaaaaaaaaattgcatcggtactgaacacatacagacttttttccttgtcgctgttgcatgaaataatacagtgtaacagctatttacatattatttacattcattaggtattacaagtaatctagagatgattcagtgtaagggttgtgctgtgtgtcagttatatgatttgatgtatggagtgtgctgtgcgtcagttatatgcaagtactacaccattttatatcagagacttgagcatctgtggatttgggtatctgtaggaagatctaaccattgcccactgatactgaggggtgactgttggcatggctgtcacaaatcccagaattcactgtgtatttgttgtcttagtcttcatcttaatcagtattctaggatttttttctacatttttgcttgtggtcttcactaaaatattttaacttttctgccctgtatcttatcttattttgacatttttaatattatgtataatatctcattttgaaaacttaaaaaaaaaaaaaaactatgtgatttatatatgtagttctccgggtaaaaaagaacctttctcctttttgaatttttgagatgttacctaccagtaatgttggtactattataaggcaatcgtcttataaactttttcactaaatagtcattttgttttctttgttttcaacacagtttttacgtaacagaactgttttcctcatcactattagaaatcagttgttaatgtgcatgctagtgttttgaattttaatattgattataaattcacatgtagattagtaatttgta

SEQ ID NO: 461033 - DNA, 2275 bp, Homo sapiens
ttccttggctctccccacttacttcctgataacctgagttgaagtcggtgaagacattcatgatttaaacaccagatcctgaaaggcattaaatctactttgaaatgaatctgcaatcagtatttcaaagcttttctgacgttgctgaatttgaattgggatcacatgtgtttcctcatctaggacctggtgaacttccaacactatgttgaataggagtggtgagagagggcatccctgacatgggtgcaggctatgaagatgggaaaaggccgttgatcactctggcttcttcctgctgacagcggacatagtgggaatgggagtgaaccccaaggtgagagagtggaaccactttgcaactgtctgagcgtactcatgcagccctggcttttcagtaggcctacacagaaaatgtgagactgaaaacccctgcatccttgagctcatggacgatgtgctctatgaggcagtagaggagctccgcctggtactcgacactccacaaagcaactctccctttggggctgcagttggtgaacaaaaagaaactctcaaggatccaagatgatgctgataagacttattaaatttggagaaaccaaatttaacgtcactgaacccaaagaacccggagagtcagtggttataagaattccagtgattcaccaaggagacacttccaaggtttccatcgcctatggtgggcatttcttgtttactcaagaacctaccatctctcacaaaataatgtccactggaattcgattatcgacggcggcagagaaagcgtgggagcgacgctcttgctctggacgccgacgtgcccacgtcgaggccgcgcccagacccggaggcggggccgtcacgtggggcagcgtgggccgctgccttggaaacgcagagcgcgcgctccagggtctttttggagttcctgagctcagtgccccagaaggcacatacttcatatgaaatatgaaggatttcatactgcacaagaaaaagccttgagaaagacagaattgcttgtggaccgtgcgtgttccaccccacctgggccccagaccgtgctgatccttgatgagctctcggattccttgtgcagagtgaccgacttgaaatcagaaaaggaaaatctgtgtcagtgaatttcactattcaagtacagtcaacccctccagattcgggcatctgtagagtcaaccaaccttggatcaaaaatatctggaaaaaaaaattgcatcggtactgaacacatacagacttttttccttgtcgctgttgcatgaaataatacagtgtaacagctatttacatattatttacattcattaggtattacaagtaatctagagatgattcagtgtaagggttgtgctgtgtgtcagttatatgatttgatgtatggagtgtgctgtgcgtcagttatatgcaagtactacaccattttatatcagagacttgagcatctgtggatttgggtatctgtaggaagatctaaccattgcccactgatactgaggggtgactgttggcatggctgtcacaaatcccagaattcactgtgtatttgttgtcttagtcttcatcttaatcagtattctaggatttttttctacatttttgcttgtggtcttcactaaaatattttaacttttctgccctgtatcttatcttattttgacatttttaatattatgtataatatctcattttgaaaacttaaaaaaaaaaaaaaactatgtgatttatatatgtagttctccgggtaaaaaagaacctttctcctttttgaatttttgagatgttacctaccagtaatgttggtactattataaggcaatcgtcttataaactttttcactaaatagtcattttgttttctttgttttcaacacagtttttacgtaacagaactgttttcctcatcactattagaaatcagttgttaatgtgcatgctagtgttttgaattttaatattgattataaattcacatgtagattagtaatttgtaaaaaaaaaaatgtaaatttatgtaactcatttttcagatactttggtactaatgttattttatcgttaccaattcttacaacaaatataccaaactatggatttaaatgttttggcattaaaaactatttgataataaaatcaggaaattttaccttgtggtgattttatttcatgttatagtcacacatcttcttggcaaataaaatatgtagtgttttgtagtttctctgctttttgttacaattgacatgaaaac

SEQ ID NO: 461034 - DNA, 1587 bp, Homo sapiens
gaaaacggcaggtgattctgcatggaaggttccaagaaggaagaaacgtctccttattcccaggctacagcccacattgaaggtccaccattgaacaaaaagatgggagtaggtcaagaagttttctgcaactacagctttagaataaaaattgctgataaacagttcacccaggtgatggtgagagggtcacaagggcagttcccccacacaagctctcttgccttctgccatgtaagatatgactgtgctcctccttcaccttctgccatgattgtgaggcctccacagccatgtggaactggaagctgtttttccctctttggggtctcagagagattggtggcaaggactcctgggaagagaaaagctgaaggacactctggcaagaggtaccacctctcactggctgcccaagcaagattctatggcttggaataattctcagcgactcactcatcaaagggcatctatctagaagccctgctccttcagggacatctgaggttgatgagctgatccaataagccatcagagctggaatagtagtagttaacaatggctctctgcactctttttaaataactttgcttttcaggccaaggtgagagcctcgtgggaatttcacaaattttatagaagcagaggagtgctatttgagcaaggggcggataacacctacaatccactcaggatttccaagcatagccggatgcagaagtactcatacttcactacagaatcacctggggagcttttaaccttctgattctagtgtttccctctggcagatggagacagaaacttgactgggctcaggaatatgtgtttttaaaattctccagaagattttaatgcagtacaagtaagaagacaggactgcaattcacaagaacagtatatcctggtgattcctcagaacagaacagactcaaaaaaaaaaaaaaaagaagaagacaaaaacaaagataacatgaaaccagattccacaaccatgtttcaagtgacctatgtgagtcaggcccatgagacacatactacaccagtttcagtgaagcctcacaaaatttaggggggtagaggaaagggtcctatgcccatttcatagatgaacaaactaaggacttaatagatttcaacaatttgttcaaagtctctaccttaaaggattttggggttctggtttttgtttttacctgccctggtaactcttctaagaatgagccaagaagaagacaaccttctaagatacttttcctgccctccaagggctgtggagaatctgatagggttggagctgccctctcctcttcccagagacactgccccacaatcccatcaagtctgactggtaccaacgactccagggggcctctgccttcagaactgtataggcctgtgtgggcaccagtctttacatccatgttccctctccctcgaggacccaggttgacctgtccaagagctctctcatcatgctgaattttggtgacagcatagggtcacgaagcggattaccctagatttctcagagctggcccttgtgttctttctggaaggtgcttgtgtaatgacatggagagaggc

SEQ ID NO: 461035 - DNA, 607 bp, Homo sapiens
gaaaacggcaggtgattctgcatggaaggttccaagaaggaagaaacgtctccttattcccaggctacagcccacattgaaggtccaccattgaacaaaaagatgggagtaggtcaagaagttttctgcaactacagctttagaataaaaattgctgataaacagttcacccaggtgatggtgagagggtcacaagggcagttcccccacacaagctctcttgccttctgccatgtaagatatgactgtgctcctccttcaccttctgccatgattgtgaggcctccacagccatgtggaactggaagctgtttttccctctttggggtctcagagagattggtggcaaggactcctgggaagagaaaagctgaaggacactctggcaagaggaaaccccgagccaaacgtatggccacctctgaccactcgaccagcccagcatggtgtacatttctgggtagcttatcacgccttccaagcattgcctttatcttccttctccccatcaagcctgtattgttttccttttgaatcataagcacttttgttaaatacctcaaatctttcgagaacagcaaggagcaaaataaacttaacttctctg

SEQ ID NO: 461036 - DNA, 669 bp, Homo sapiens
gaaaacggcaggtgattctgcatggaaggttccaagaaggaagaaacgtctccttattcccaggctacagcccacattgaaggtccaccattgaacaaaaagatgggagtaggtcaagaagttttctgcaactacagctttagaataaaaattgctgataaacagttcacccaggtgatggtgagagggtcacaagggcagttcccccacacaagctctcttgccttctgccatgtaagatatgactgtgctcctccttcaccttctgccatgattgtgaggcctccacagccatgtggaactccatgagtatgactatgtgctgagtcctgtgagtcctcctactgaatcatcaaagccaggggggaagctgtttttccctctttggggtctcagagagattggtggcaaggactcctgggaagagaaaagctgaaggacactctggcaagaggaaaccccgagccaaacgtatggccacctctgaccactcgaccagcccagcatggtgtacatttctgggtagcttatcacgccttccaagcattgcctttatcttccttctccccatcaagcctgtattgttttccttttgaatcataagcacttttgttaaatacctcaaatctttcgagaacagcaaggagcaaaataaacttaacttctctg

SEQ ID NO: 461037 - DNA, 1188 bp, Homo sapiens
gaaaacggcaggtgattctgcatggaaggttccaagaaggaagaaacgtctccttattcccaggctacagcccacattgaaggtccaccattgaacaaaaagatgggagtaggtcaagaagttttctgcaactacagctttagaataaaaattgctgataaacagttcacccaggtgatggtgagagggtcacaagggcagttcccccacacaagctctcttgccttctgccatgtaagatatgactgtgctcctccttcaccttctgccatgattgtgaggcctccacagccatgtggaactggaagctgtttttccctctttggggtctcagagagattggtggcaaggactcctgggaagagaaaagctgaaggacactctggcaagagatggagacagaaacttgactgggctcaggaatatgtgtttttaaaattctccagaagattttaatgcagtacaagtaagaagacaggactgcaattcacaagaacagtatatcctggtgattcctcagaacagaacagactcaaaaaaaaaaaaaaaagaagaagacaaaaacaaagataacatgaaaccagattccacaaccatgtttcaagtgacctatgtgagtcaggcccatgagacacatactacaccagtttcagtgaagcctcacaaaatttaggggggtagaggaaagggtcctatgcccatttcatagatgaacaaactaaggacttaatagatttcaacaatttgttcaaagtctctaccttaaaggattttggggttctggtttttgtttttacctgccctggtaactcttctaagaatgagccaagaagaagacaaccttctaagatacttttcctgccctccaagggctgtggagaatctgatagggttggagctgccctctcctcttcccagagacactgccccacaatcccatcaagtctgactggtaccaacgactccagggggcctctgccttcagaactgtataggcctgtgtgggcaccagtctttacatccatgttccctctccctcgaggacccaggttgacctgtccaagagctctctcatcatgctgaattttggtgacagcatagggtcacgaagcggattaccctagatttctcagagctggcccttgtgttctttctggaaggtgcttgtgtaatgacatggagagaggc

SEQ ID NO: 461038 - DNA, 963 bp, Homo sapiens
  misc_feature (920)..(920): n is a, c, g, or t
gaaaacggcaggtgattctgcatggaaggttccaagaaggaagaaacgtctccttattcccaggctacagcccacattgaaggtccaccattgaacaaaaagatgggagtaggtcaagaagttttctgcaactacagctttagaataaaaattgctgataaacagttcacccaggtgatggtgagagggtcacaagggcagttcccccacacaagctctcttgccttctgccatgtaagatatgactgtgctcctccttcaccttctgccatgattgtgaggcctccacagccatgtggaactggaagctgtttttccctctttggggtctcagagagattggtggcaaggactcctgggaagagaaaagctgaaggacactctggcaagaggccaaggtgagagcctcgtgggaatttcacaaattttatagaagcagaggagtgctatttgagcaaggggcggataacacctacaatccactcaggatttccaagcatagccggatgcagaagtactcatacttcactacagaatcacctggggagcttttaaccttctgattctagtgtttccctctggcagatggagacagaaacttgactgggctcaggaatatgtgtttttaaaattctccagaagattttaatgcagtacaagtaagaagacaggactgcaattcacaagaacagtatatcctggtgattcctcagaacagaacagactcaaaaaaaaaaaaaaaagaagaagaaaaaacttgggggttttatgggggggggggaaaaaggggtatggaggggccagttggtcatagctgttccctgacccagtttttttgtccaaggtggtaaatcgcggggtctccctatagggagcgtataaattcgataagccggtacctgctatgttgtggcaaaaancagaaaaaagaaacaggagaggctacattgtcaaaagtggtaa

SEQ ID NO: 461039 - DNA, 1231 bp, Homo sapiens
tctggagagaagatcaaaccagtcacaacattcccgtaagccaaagcctaatccagggcaaggtcctaactctcttcaaacaataaagcctgaatgacagcaaaactgtttatagcacagtttactgaatattttaaactccctgttaagacctactgttcagaacaaaagcttcctttcaaaatactactgctcattgacaatgcacctagtcactcaaaagccttgatggagattgtacaggagattaatgttgttttcatgcctgttaacacaacatgcattctgcagcccatcagtcagggaatcatttcaaatttgaagtcttatcctttaagacctacattttatgtcattaagaatatgcctgattcatgggaggaagtcaagatgtccacattaactgcaatttggaagaagttggttccaatccttatggatgactttgaggggttcagaacttcagtgaaggaagtaactactgattgggttgaaaaagcaagagaattagaattagaagtggagcctgaaaatgtgactgaattgttacaatctcatgataaaacttgaacaaatgagaaagcatttcttatggatgagcaaagaaagtgtttttttgagatggaatctactcctgatggaagatgctagcaagtgatccaacagagagcactgacacatgaaaacaccactgtcttttatgacctagtcccagaagtcacactttgtcccttctgcaataccacactggttacacaggtcagctctattcactgacagagggaacaacaagggcatgaaccccaagaggcaaggatgacaggagccatcttgaaggctggcgaccacagatccacacctaactccaaaccaccaaattactcggagtgtgtgtcgggttgcagaaaatgaaatgaccataataactccaagacagagcagaaggttcatctgagtcataccaaataacttcattgctgctaaagtaaaatttgaaaatgattgaagtgatttttatgatcagccttttggaagtcattcaaaagtgctgcaatgctacttcaaagaagataattcaaatttaaatgtcactcttcagtgttgtttatcaacagctgagtattaaaattggtgagcttgatttgtgttatttcacttcaccagcttataatttaaacactcttatacttattatttgaataaatggaataaacacaagtcaaactttggt

SEQ ID NO: 461040 - DNA, 1089 bp, Homo sapiens
tctggagagaagatcaaaccagtcacaacattcccgtaagccaaagcctaatccagggcaaggtcctaactctcttcaaacaataaagcctgaatgacagcaaaactgtttatagcacagtttactgaatattttaaactccctgttaagacctactgttcagaacaaaagcttcctttcaaaatactactgctcattgacaatgcacctagtcactcaaaagccttgatggagattgtacaggagattaatgttgttttcatgcctgttaacacaacatgcattctgcagcccatcagtcagggaatcatttcaaatttgaagtcttatcctttaagacctacattttatgtcattaagaatatgcctgattcatgggaggaagtcaagatgtccacattaactgcaatttggaagaagttggttccaatccttatggatgactttgaggggttcagaacttcagtgaaggaagtaactactgattgggttgaaaaagcaagagaattagaattagaagtggagcctgaaaatgtgactgaattgttacaatctcatgataaaacttgaacaaatgagaaagcatttcttatggatgagcaaagaaagtgtttttttgagatggaatctactcctgatggaagatgctagcaagtgatccaacagagagcactgacacatgaaaacaccactgtcttttatgacctagtcccagaagtcacactttgtcccttctgcaataccacactggttacacaggtcagctctattcactgacagagggaacaacaagggcatgaaccccaagaggcaaggatgacaggagccatcttgaaggctggcgaccacagatccacacctaactccaaaccaccaaattactcggagtgtgtgtcggcctgcccacggtgcggtgagcccatgtgactagaccccggacgatggactaagagggaagaggacgtgcctaagttccgggctgaggccttaagaacccatgcactcttctcctgttacttttccctgcggcaacaagcaaggagtcctcattccagggagtgtgaccgcatcgtggtgctaattcccttc

SEQ ID NO: 461041 - DNA, 1041 bp, Homo sapiens
ggccgcagctcgtcgccgcccgcgggcctgtccgacgccggggcccggcccgtcccctccgccgcccggcagccatgtgaccgcgccgccgccctccgcgcgcccggcccgcccgccgcgcgtccgcggcccggccgcagccccaggccgccgagggagcggcggggccggcgccatggccgagcgaggccgcctcggcctccccggcgcgcccggcgcgctcaacacgcccgtgcccatgaacctgttcgccacctgggaggtggacggctccagccccagctgcgtgcccaggtacgcgccgcccgccgcgctttgttcccgccgggcacctgctgggggtgtcctggccgcggcctctgcgcgccccatccccggcccgggtcccccagcggagcccaggtcgccccccgcgcccccgcccgccggttcgacgcgtgcagccgccgcccccccgcagctccggcaagcgcggccccagccccccaggtcccgagcaccgggggccgcgctcagcttccgaggacccggtgctgctcagacccggcgggaccttggggctcccgggcggcgctcacctggctcgccgcaaccgcacctgcacacctgcctcaatgcggtgccggccggggtgacgagggtgcttcctctctcgggtaccacacgcttcctttcgcgttcggcgacactgtcagacctcggcctgggagcgacccccggcgcacggggcgcgcaggactcggttgtatcctccgtccagcgcgcggtggagatgccctgtcctgcggggcggggtcgtcctcgcgggtacctggttggcgctgtctctcatttagaggcgtcgccaagccagtactgctatttgcgcctcccagttgatcttgccattgcggaagactggctgttctgcacttggtaggggggcgcccggtcgcccagcgcaagggctgggctgctttgtaccttgcccttcccacttgattgttttttcggttgatgtttattaatttgtttttatttatgtattttgttgttgttgtt

SEQ ID NO: 461042 - DNA, 3427 bp, Homo sapiens
ggccgcagctcgtcgccgcccgcgggcctgtccgacgccggggcccggcccgtcccctccgccgcccggcagccatgtgaccgcgccgccgccctccgcgcgcccggcccgcccgccgcgcgtccgcggcccggccgcagccccaggccgccgagggagcggcggggccggcgccatggccgagcgaggccgcctcggcctccccggcgcgcccggcgcgctcaacacgcccgtgcccatgaacctgttcgccacctgggaggtggacggctccagccccagctgcgtgcccaggttgtgcagcctgactctgaagaagctggtggtcttcaaggagctggagaaggagctgatctccgtggtgatcgctgtcaagatgcagggctccaaacgaatcctgcggtcccatgagattgtgctgccccccagtggacaagtggagacagacctggccctgaccttctccttgcagtatcctcacttcttgaagagggaaggcaacaagcttcagatcatgctgcagcgcagaaagcgctacaagaacagaaccatcctgggctacaagacgctggccgcgggctccatcagcatggctgaggtgatgcaacacccgtctgaaggtggccaggtgctgagcctctgcagcagcatcaaggaggcccccgtcaaggcggccgagatctggatcgcctccctgtccagccagcccattgaccacgaagacagcaccatgcaggccggccccaaggccaagtccacggataactactccgaggaggagtatgagagcttctcctccgagcaggaggccagtgacgacgccgtgcaggggcaggacttggacgaggacgactttgacgtggggaagccgaagaagcagcggagatcgattgtaagaacgacgtccatgaccaggcaacagaacttcaagcagaaagtggtagcgctgctgcggaggttcaaagtgtccgacgaggtcctggactcggagcaggaccctgcggacacatccccgaggcagaggaggacctggacctcctgtatgacaccctggacatggagcaccccagcgacagcggccccgacatggaggatgacgacagcgtcctcagcacccccaagccgaagctgcggccatactttgaaggcctgtcgcactcgagctcgcagacggagattgggagcatccacagcgcccgcagccacaaggagcccccaagcccggctgacgtgcccgagaagacgcggtccctgggaggcaggcagccgagcgacagtgtctctgacacggtggccctcggtgtgccaggcccgagggagcaccctggacagcctgaggacagccccgaggctgaggcctccaccctggatgtgttcacggagaggctgccgcccagcgggaggatcaccaagacagagtcccttgtcatcccctccaccaggtccgaggggaagcaggctggccgacggggccggagcacatccttgaaggagcggcaggcagcacggccccagaatgagcgggccaacagcctggacaacgagcgctgcccggacgcccggagccagctacaggtgcagctgcagatccccaggaagactgtgtatgaccagctcaaccacatcctcatctccgatgaccagcttcccgaaaacatcatccttgtcaacacctcggactggcaggggcagttcctctccgacgtcctgcagaggcacacgctccccgtggtgtgcacgtgctctcctgcggacgtccaggcggccttcagcaccatcgtctcacggatacagagatactgcaactgcaattcccagcccccgacccccgtgaagatcgccgtggcgggagcgcagcattacctcagtgccatcctgcggctctttgtggagcagctgtcccacaagacacccgactggctcggctacatgcgcttcctggtcatcccactgggctcccaccccgtggccaggtacctaggctccgtggactaccgctacaacaacttcttccaggacctggcctggagagacctgttcaacaagctggaggcccagagtgcggtacaggacacgccagacattgtgtcacgcatcacgcagtacatcgcaggggccaactgtgcccaccagctccccatcgcagaggccatgctgacctacaagcagaagaggaaaaagcattttcattttgactttaccctaagccctgacgaagagtcctcccaaaagttcattccctttgtcggggttgtgaaggttggaattgtggagccatcctcggccacatcaggcgactcggacgacgcggccccctcgggctctggcacgctctcctccaccccgccgtccgcatctcctgcggccaaggaggcctcacccaccccgccctcctccccgtcggtgagcggaggcctgtcctcccccagccagggtgtcggcgccgagctgatggggctgcaggtggactactggacggcagcacagcctgcggacaggaagagggacgccgagaagaaggacctgcctgtcaccaaaaacacgctcaagtgcactttccggtccctccaggtcagcaggctgcccagcagcggcgaggctgcagccacgcccaccatgtccatgaccgtggtcaccaaggagaagaacaagaaggtgatgtttctgcccaagaaagcgaaggacaaggacgtggagtctaagagccagtgcattgagggcatcagccggctcatctgcactgccaggcagcagcagaacatgctgcgggtcctcatcgacggcgtggagtgcagcgacgtcaagttcttccagctggccgcgcagtggtcctcgcacgtgaagcacttccccatctgcatcttcggacactccaaggccaccttctagccccacccaccagggggcccacctcctgccccatgctgtgaggggcccagctgcatttctgttaacatttcagtttactacagagacagacgcttaaaacacaaagagaaacagtcttaagtatgaatgtgctcacaacgtggaaactaacgggggagctcctgccaggagccgaataactgctctgcttattaacccgaacgttcggcccggggctgggaagccagaaggacgatgctgagccatggatcgcggaaggcgtcctctggcctcaggagccacccagagcctcacaggctgagttcttgcctctgtgtcctgtccttcctggaagtcaggactctgcttcctcagggagcccggggaaggcggagctcagtggccacaggccgagggccatggggccgctcagtcccgttggggttgtcctgagttgagcctgggggggccgtcctgcccgcctaagagatgcccccagcaccgcacactcgtggttcccaataaactcctgcctgcggcggaggttttatagcagcag

SEQ ID NO: 461043 - DNA, 1537 bp, Homo sapiens
agagaaagcaagagaaggtggatgagaagggaggcaggggaactgcaagccttcagtccttgtaccttttaggatgtagggacacccagagaacagccctcaataagatctggaaagaagagctgtcaccacagacttagaaagtaggtgtatttttttacaaatccaaaattcctatatcccataatcataggtgtgtgttgagcagggcagatttcctttcctaatctctgttttctctttcagaataataggttattcccctgtcctgagttctgcttgaaaaactgagagttctagaactttgcaaaagctcctctattgttccaagatgagcatttttctggggtgaactgggcagaggtttgactggcaagcagctctgggtgtacatttcatccaagagtctcatggtggtcgaaggagatccccagatgcaaaatcaaagttgcttggatttccatttcttccccatctaggaaaagggcaatggaatcaaagcctttaaaaaatgtagtaagagaaagactctctaattgatcagaaccttctggcaaccaggactttggcccatctactgaaaaatactttatcagtgtctttagtaaaggcccccaagatgcacaatacatttttggttgttgaaatagagtgtcttctaagtcatcaagtaaaagagaaattctgctcagaagacttttggatagtacccaacatttggtgaggcttactatattacatgcattacctcgctaaatcaccacattagaacacttacagctacctcaggcctgatcccagctgccagactccaacggagtcagatcctcaaattgccaggagatcgctatccaaactgtcaccccctgatcagaaaagaaggagttatgtaagtaactgacagcacctgagcgatctctcatttggattaaatcaagttctttaaatatttataaaaatgacacctgtcaatcaggcaggacatccccttgggtcgtccagtccaagaaaactcactggcttcttgaaaagccaaagagaacaagagaaaagggatgaggagagtgaacagaggggaggagggaacaataggaaagggaggagagtattgggggagatgctgctgacaggtggtgtcctagcacagttccctggagaatggcctgaggaaaagcttatgggctggggctttactggagcacacaacaccaggacagcaaaaatgaaatgcctttccactcagatgaggctgactcctacaccaccctacttcatgccctggctgcagagctgggcacatgttccagtaactgtgcatgtagtggtccttaataagtgcttactcacagtcagcaccatcagcccagggactattccaagcaaaattgtgaagatgatgggaagccatttctgtgcagggagacccgaaaagaacaacaagatatcaatcaactttgagcatcaccaggagggtgaaaacaatggtactgaattgcaaattgtaggactgcagaaataaagttctgttcacaaaaaa

SEQ ID NO: 461044 - DNA, 881 bp, Homo sapiens
agagaaagcaagagaaggtggatgagaagggaggcaggggaactgcaagccttcagtccttgtaccttttaggatgtagggacacccagagaacagccctcaataagatctggaaagaagagctgtcaccacagacttagaaagtaggtgtatttttttacaaatccaaaattcctatatcccataatcataggtgtgtgttgagcagggcagatttcctttcctaatctctgttttctctttcagaataataggttattcccctgtcctgagttctgcttgaaaaactgagagttctagaactttgcaaaagctcctctattgttccaagatgagcatttttctggggtgaactgggcagaggtttgactggcaagcagctctgggtgtacatttcatccaagagtctcatggtggtcgaaggagatccccagatgcaaaatcaaagttgcttggatttccatttcttccccatctaggaaaagggcaatggaatcaaagcctttaaaaaatgtagtaagagaaagactctctaattgatcagaaccttctggcaaccaggactttggcccatctactgaaaaatactttatcagtgtctttagtaaaggcccccaagatgcacaatacatttttggttgttgaaatagagtgtcttctaagtcatcaagtaaaagagaaattctgctcagaagacttttggatagtacccaacatttggtgaggcttactatattacatgcattacctcgctaaatcaccacattagaacacttacaggttatgacaaaacaagaaggcccttacaagatgccagcaccttgatcttgaacttcccagactccagaactgtaagccaataaatttctgttcttcataaa

SEQ ID NO: 461045 - DNA, 925 bp, Homo sapiens
agagaaagcaagagaaggtggatgagaagggaggcaggggaactgcaagccttcagtccttgtaccttttaggatgtagggacacccagagaacagccctcaataagatctggaaagaagagctgtcaccacagacttagaaagtaggtgtatttttttacaaatccaaaattcctatatcccataatcataggtgtgtgttgagcagggcagatttcctttcctaatctctgttttctctttcagaataataggttattcccctgtcctgagttctgcttgaaaaactgagagttctagaactttgcaaaagctcctctattgttccaagatgagcatttttctggggtgaactgggcagaggtttgactggcaagcagctctgggtgtacatttcatccaagagtctcatggtggtcgaaggagatccccagatgcaaaatcaaagttgcttggatttccatttcttccccatctaggaaaagggcaatggaatcaaagcctttaaaaaatgtagtaagagaaagactctctaattgatcagaaccttctggcaaccaggactttggcccatctactgaaaaatactttatcagtgtctttagtaaaggcccccaagatgcacaatacatttttggttgttgaaatagagtgtcttctaagtcatcaagtaaaagagaaattctgctcagaagacttttggatagtacccaacatttggtgaggcttactatattacatgcattacctcgctaaatcaccacattagaacacttacaggatgatgggaagccatttctgtgcagggagacccgaaaagaacaacaagatatcaatcaactttgagcatcaccaggagggtgaaaacaatggtactgaattgcaaattgtaggactgcagaaataaagttctgttcacaaaaaa

SEQ ID NO: 461046 - DNA, 1265 bp, Homo sapiens
agagaaagcaagagaaggtggatgagaagggaggcaggggaactgcaagccttcagtccttgtaccttttaggatgtagggacacccagagaacagccctcaataagatctggaaagaagagctgtcaccacagacttagaaagtaggtgtatttttttacaaatccaaaattcctatatcccataatcataggtgtgtgttgagcagggcagatttcctttcctaatctctgttttctctttcagaataataggttattcccctgtcctgagttctgcttgaaaaactgagagttctagaactttgcaaaagctcctctattgttccaagatgagcatttttctggggtgaactgggcagaggtttgactggcaagcagctctgggtgtacatttcatccaagagtctcatggtggtcgaaggagatccccagatgcaaaatcaaagttgcttggatttccatttcttccccatctaggaaaagggcaatggaatcaaagcctttaaaaaatgtagtaagagaaagactctctaattgatcagaaccttctggcaaccaggactttggcccatctactgaaaaatactttatcagtgtctttagtaaaggcccccaagatgcacaatacatttttggttgttgaaatagagtgtcttctaagtcatcaagtaaaagagaaattctgctcagaagacttttggatagtacccaacatttggtgaggcttactatattacatgcattacctcgctaaatcaccacattagaacacttacaggccgactgtgctgctttgtctgaatctagaacaaaggatcggcccttaaggaggctgatgcgatgttaaagcccatcactctaaaattgacaccacacctgggaagagcaggcagcaccatcactgtctttcctgttcaagaatgacacctgtcaatcaggtttctgacacatccatcacttgttatgtttagaaagggtggaccatccatggccttcatatcaacgtatgaaaaccaacataccctccagcaagctctacggctatatgacccttatccacagcaagtccctggggaaaattattccttaacatggtgttgaatgctgacaaggtatatcagtcagctttggctagcaaagtgaaggctctgtacctctgctccacatgttttctgcaacctgagatgcaggtctcatggttcagggagaagagcactgtgaatgaaccatacaaagtcttttaaaacttctgcacacagatat

SEQ ID NO: 461047 - DNA, 207 bp, Homo sapiens
acatcacctcttggattccagttcccaccaggcagtccctaccatggctccagctctcacaggatgatgggaagccatttctgtgcagggagacccgaaaagaacaacaagatatcaatcaactttgagcatcaccaggagggtgaaaacaatggtactgaattgcaaattgtaggactgcagaaataaagttctgttcacaaaaaa

SEQ ID NO: 461048 - DNA, 1679 bp, Homo sapiens
gtaagggacatggaacactgcgaccacattactatgccctcacctgcctgggcagcagggatctcaggcctcatcagagcagaacgatctggaagttgctggccacatgccactgattttctctcccaggagcaacccagcagtctttccttgagggagaaatttaattacaagaaatttgcaaacatatttgggaagaaagtctgctggagccgaggggcaacagtcgagctgattatttggtctgcaatggccctaggtcagagcaacaggcatgctcgacaatcctctgctggaaaattccaaactcctcaggcccgctttccatataaggagcctgtgtgcaagtgtgtatgttccagaatatttgtacatggaaatgagagtgtgtgtgagaagacccagttcctgaccaccgatgctttgctacgctaggctggaaaatgcctccctctgcccttgagaagggggtctgaatgttttgcgggactgacaccgcagcaacatgccggtgtgtttcacgctgctgcctcctgtttcccttgaagctttcaccagaccctggatttctttttcacttcctgttctgagccatcgccgggcactcattacccaccagctgtgtcccagctgccgcattctacactagaggtggcgccctgcacccggcggaaatgaagagaatcagactacccaccttggattctgatatgaaagatttaggataaaagagctactccatcagcctggaaagatgactcactggcaaactcttagataaagctaaacttcacaccaaactgcaagagagtctaagaatgaagagaaaactgctttggcaagcaactacctagtctctgacacagtccacctttttggtcagccaatatccagctccgccttgtcttcttacacaaagcccaggcaaagcccaggattgctaactgttgtacaaacctgttggtcaggcctagatggaagctttcaaccccatttcaagtcagctggcttatccaaccctgaaaggtctgtgatctctcagttctttttataaacaggcctctgcttgcaaatggccaattcttgcctgagctcatctctttcttgtaatactttatgaaaggcagccagtagtaactaatgcataaatttttccaaccaactggcccaaaggtcagtagacctttttaccaaatgtttcgcaatgtatagcatgaatctccatctttctcctctctgttatcaggttcctcagtgcccaaccattatgtcaatgccttttaccttaatttttttcttatggcaacattttcttctggaattatttctgtactgtagcaaatgccctaaactgtgtaaaacagtttgaagacactatttttttttctatttttatcatttgttcctcggtctactcaatacgctccctgcttaaaactcccctagtgattttctgttgggtttaaaatagagtctaaactctttaccatggattacaagcttctctgttaactggttgtaacctgcatttccagcctcctttggcgccactcttgtcccaccaactatatcacatttcctttggaacattttctgcttcttgaacttgcccaggtccttgctgttagctggtccctttgcctatgatgatcttccttcttagcatcacttgaactgca
